United States Patent Application Publication US 2004/0123343 A1 - sequence listing, part 14

SEQ ID NO: 37322 - DNA, 3075 bp, Oryza sativa
  Clone ID: PAT_MRT4530_41061C.1
atgatccgccgccgcgcggcggcggtagcgacactacgcgcctccctgcgccgcacctgctcccacgccgccggcgactccgaggaccccctgctcggcctcgtcgagccacccgcgccgccgcaaccgccaccccggtctcgcctcggccccagagacttcgagtttcttcgggagcccgccgccgccgccgcggccggtgccctcccgccaccggaggccgtgctgatctccaaggcgatccgggcattcggcgccgacttcgacggcaaggcggagcgcgtcctgcggcggtgccgcgggttcctgaccgactccgtcgtggtggcggtgctcggggcggtgcgcgacgccccggagctctgcgcgaggttcttcctctgggccgagcggcaggttgggtacagccacacgggcgcatgctacgacgcccttgcggatgcgttgggtttcgacggccgcgccagggatgccgagaggctgcttagggagattggggaggaggaccgcgaggtgctcggcagattgctcaatgtgctagtgcggcggtgctgccgcggagggatgtggaacgaggcgctggaggagctcgggaggctgaaggactttgggtacaggccgtctaaggtgacctacaatgcactggtccaggtgctctcgagcgcggggcaggtggacttggggttccgggttcagaaggagatgtccgagtcggggttctgcatggaccggttcaccgttgggtgctttgcgcacgctctgtgcaaagaggggcggtgggctgatgcactagacatgatagagagggaggatttcaagcttgatacagtattatgcacacatatgatcagcgggctgatggaggcatcgtattttgacgaggccatgtcattcctccataggatgcgatgcaactcatgtattccaaatgtggtcacatataggacgttgctctcaggatttttgaaaaagaaacagcttggctggtgcaagaggatcattaatatgatgatgactgagggctgcaatccaaatccatccttgtttaattcccttgtgcatagttattgcaatgaaaaggattatgcgtatgcctataaacttttaaataggatgactacttgtggttgccctcctggttatgttgtgtacaatatttttattggaagtatatgtggtcaggagaaattaccaagccctgatttgctggatttagctgagaaaatttatggagagatgctggctgctaattgtgttcttaataaggttaacgttgccaattttgctcgatgcctttgtggtgtcgggaagtttgacaaggcatttcagctcataaaggagatgatgaggaaaggttttgtccctgatacaagtacatactctaaggtgatcacttttctctgccatgctactaaggtagagaaagctttccttctgttccaagagatgaagatggtcggtgtaactcctgatgtgtatacatacacaattttgattgacagcttttgtaaagctggactcattgaacaagcccagtggttgtttgaggagatgaggagtgtgggttgctccccaactgtggtgacatatactgcacttattcatgcttacctcaaagctaagcaggtacctcaggctaatgatatttttcaccgaatggttgatgctggctgtcgtccaaatgatgttacttatggtgcattggtagatggtctctgtaaagcaggcaacatcagtaaggcttttgaagtctatgccaaattaattggaacttctgatagcgccgattctgatttttactttccatgtgaggacagacacacacttgctccaaatgttgtgacatatggtgcactagtagatggtttatgcaaagctcacaaagtggaccatgctcatgaattactagatgctatgttatcttctggttgcgagcccaatcacattgtgtacgatgctcttattgatggcttttgcaaagctggaaaaattgacagtgctcaggaggtatttctgcagatgacaaagtgtgggtaccttcccagtgtacatacgtacacctcgttgattgacaggatgttcaaggatggaagacttgatcttgcaatgaaagttctctctcagatgttaaaggattcttgtactcctaatgttgttacgtacacagctatgattgatggtctttgtaggataggtgaaagtgagaaggcactaaagcttctgtcattgatggaagagaaaggatgcagtccgaatgttgtaacttacactgctctaatagatggattaggcaaagctggcaagattgatctgagtcttgacctttttacacaaatgagcagaaaaggatgttctcccaattatgttacgtacagagttctgataaaccacttgtgtgctgctggccttttggataaggctcgtttactgcttggtgaaatgaagcagacttactggccaaagtacttacaaggataccgttgtgcaattcaaggtttcagcaagagctttatcgcttctctgggtattctggaggagatggaatcatatggcacagtaccaattgcacctgtttatggaatgctgatcgattgtttctccaaagctggcaggctggagatagctatggagttgcacaaagagatgatggaagttccgtcatctgtaaaaactgacaatgacatgtacgcttcattgatccaggcactttgtttagcatctcaagttgaggaagcatttcgattgtatagtgaaatgacaaggagaggctttgtacctgagttaagtgtctttgtttgcctcataaagggattagttgaagtaaaaaagtgggacgaagccctccagttgtgctatggcatatgtcatgaggttggtctacttctttcatataccactcaaatatttctatttacctttgttgttattgttgttggttatggcaagaatatagaaccacaggttgacttaggggattcatttagttctttcacagtatcagcatcagcaagtaatctcaagactgctgtaatatgtagacactcacctattaaatttgacagtgttattttatga

SEQ ID NO: 37323 - DNA, 1151 bp, Oryza sativa
  unsure (1)..(1151): unsure at all n locations
  Clone ID: PAT_MRT4530_41062C.1
gngggaagctctagcagatttgatcgaagcaaacgctaggatttatgcgtttgggccttatttgtagctccgatctcaaactagtcttcgaaattaatcaagatatggtggtggctgttactcggcgggacgaagcggaggccaacgtggacgcggcgctgtgggtgctcggcttagccaccatttccgcggcaatcaccttggctaccaccaccacgccgctgcaagctgacttgggtaataacggcgctgcctattactcctaccttgcacttgcacttgcagtggtgaccttcctcgccggcgtggcccaggttatcgctttcgtctgggtctccgacgacccccgccgtgccggcgccgccggcaactggttcttcgtctacgcctctgtcgcctcgctcgtcgtcgccgtcagcgcgctcgccatcctggccaagatccgccggcgcagtttcacggcgagggggtggccggaggacggcttccggcgacaggcgagggcgagggcaaaggcgaagtcgccatggccgtggccctctcgggccgccgcagtcgcaagtccgcgagaccgcgaccctgtgatcggctacttcttcccaagggagaacaaggcggcggcgggccggccgtacggtgcgcaccgtcgccggagccccgccagcggcagcgacgaagtggatgtcgaattggtgatcacgaacaccataatcgccggtcggcgcgcctccgccggcttcgcaattcgcgggatgaaccaaggtggaatgggattaccagagcagagccgctccggtgaggccggcggcgacgaggaggggtgcaatagaggcgtacatgattttcttgccgacggcatggcggccgcgagggtcgtcggcgacccagacggcggccgccacctgtgccactccggagaggaaggatcccacgagagcgaggtgattgatggccagagaggctgtggcgaggccgaacgcccccagcgcgcgcgccgcggcgatcttggacgcagcgccgactgcgccgtcggcctgatccaagcgagcaacgttcaccatgatcagcgattatacggtgcgggaggtggtcgggtggtggacgccgtcggagggggagagttggggggtggtggtggtggtggggcctaa

SEQ ID NO: 37324 - DNA, 1767 bp, Oryza sativa
  Clone ID: PAT_MRT4530_41063C.1
atggcggctacctcctctgcggccgccgctgctccacctccgtgccgcttactcggctccggtcaggcacacctgcgccttcctccttctgctgctgctgctgctgcttcagctcgtcgccgcctgctcctccgctgcgccgcctcgggcggcaacgggaaaggcggtggtggcgacggctccggctccgacccggttcttgaggagcggcggcggcggcgccaggctgagctggcggcgcgcattgcgtccggcgagttcaccgcccaaggccccgcgtggattgctcccctcgcggtggggcttgccaagctcggcccaccgggggagctcgccgccgcgctgctcaccaaggtcgccggtggcggcggaccggagataccgcaggcggtggggtctatgagtgcggtgacagggcaggctttcttcatcccgctctatgatctcttccttacctatggcggcatctttcgcctcaatttcggccctaagtctttcctcattgtctctgatccagctatagctaagcacatcctgagggacaactccaaggcttattccaagggtattctggcagaaattttagagtttgtgatgggtacgggtttgatccctgctgatggggagatttggcgtgttaggaggcgcgccattgtaccagcaatgcaccagaagtacgttaccgcaatgataagtctcttcggatatgcttcagatcggctctgccagaagttggacaaggcagcaacggatggggaggatgtggagatggaatctttgttctctcgactaacactggatgtcattgggaaggcagtcttcaattatgatttcgactcattgtcttacgataatggaatagttgaggcagtgtatgtgacactgcgagaagcagaaatgcggagcacttctcctataccaacttgggaaatacccatatggaaagatatttccccgcggcagaagaaggtcaatgaagctcttgcgctgataaataagactcttgatgaactaattgacatctgcaagagattggtcgaggaagaagatctgcagtttcatgaagaatacatgaatgagcaagaccccagtatcctccactttcttttggcatctggagatgatgtctccagcaagcaactccgtgatgatctgatgacaatgctcattgctggccatgagacctctgcagcagtcttgacatggacattttatcttctatctaagtatccaaatgtaatggccaaactccaagatgaggctgatactgttctaggtgaccgtttaccaacaattgaggatgtgaagaaattgaagtatactactagagtaattaacgaatcattgagactctatccacagccaccagttttaattcgtcgctctattgaggaggatatgctgggagggtacccaattggccgttacttgccatttggtggcggaccaaggaaatgtgtaggtgacatgtttgccactttcgagactgtggtggcaactgcaatgcttgtcaggcgctttgattttcaaatggctccaggagctcctccggttgagatgacaactggagcaacgattcacacaactgaggggttgaaaatgactgttactcggaggacaaagccacctgtaatcccaaacctagagatgaaagtcatttctgattcaccagaaaacatgagtactactacatcaatgcccgtttctgctgctagtattgcttcaggagaagatcaacaagggcaagtctcagcaactcgaatctga

SEQ ID NO: 37325 - DNA, 840 bp, Oryza sativa
  Clone ID: PAT_MRT4530_41064C.1
atggccggcatgaagattaattaccacaagagtgaggtttttactgtggggcttgaggagaatgaaaccatcagagttgcaaagatgcttaattgtcccattgggaagtttcctatgaagtacctgggattaccaattagccctgataagattcttaaacaagacctgatgttcttaccccacaaaatggaaaagaggttgggaaattgggcaggccctttatcttatgctggaagagttgttcacattaactcttgcctatcctctattccttcatatgccatgggcttttaccaactccccgagggtagatattattgggctggcaataaacaggggaggaaatatcatatggtgaagtgggctgacttagcactccccaaagattttggaggtttaggcttcactgaaacaagactgtttaacactgccctccttgccaaatggttaacaaaaattgaatctgaagacaagagcctttgtgttgagcttttaaggaagaaataccttctacaaggaggagtttttcaatgctctactgaaggggtctctcaattctggacaggtgttcttaacactagaaagtggatgaagtttggttctgtgtggcaactgggaaatgggactcatttttacttttggctggacctttgggttggttcctaccctttaaatattgctttctttgagattttcaaaatctgtaatcagcaaaaggttacaattgcagagtggaggggtttaagtcacgcgaatgaagctgccctgatggaggccctgaccgagaaactgaaatctgctgttacaaatgttggcgcgaccagagcaggaattggctag

SEQ ID NO: 37326 - DNA, 1422 bp, Oryza sativa
  Clone ID: PAT_MRT4530_41065C.1
atggagacgatcgacaggtctccactcctcctctgcttctcctcccagatctctctcccacaccccaccgccgccagcgacgcgaggcgggatcaggccatggacggcggcggcggcggaggaggaggcgggttcggactgggcggcctccagtggacggcggaggaggcgtcgacgatcgggggcatcgcgacggtgtcgctgctgcactccttcatccccacgcactggctccccttctccatcgtcgcccgcgcccagcggtggccgctctcccgcaccctcctcgtcactgcatttggaggcgtccttcatgttgtttccactgctcttcttgggataactgctgttactatggcaaatactatagcaggcgaggaaacagtgcataaacttgcatcactgttgctgattgttcttggtggaagttatatcctgctgtttgcactgggaaaaggtggccatggccatgctcataatcatccaatggagaagatggcagttgcaggtcttgtacttgtacctgcattatcaccctgtgcaacaactcttccagtgtttcttgctgttggcaattcatcctccatgatgatccttgcgatcattgtgctcctctttagtaccatcacagtgatgacatccttggtggccctctcattctacggtgctagccagattaagttccactgggtggaacgttacgacaagatccttgtcggctcggtcctgtgcctcgttggggttttgacatacgtattccatcaccatgacggcgacgaacactctctccatgaacacgtgcaccggaaactccttcgtcttcgtcgtcgacatcgatcaatggcgcccggcggcgacggcgactactaccggacgctggggatcgagcgcggcgccagcaaggccgaggtgaaggccgcgttctaccgcctcgcgccgctgcaccaccccgaccgccacgcggcctccgacgccgccgcccgcgccgccgccggcggccgcttccgccgggtgtacgacgcctacaccgtcctccacagcgacgccacccgcgccgcctacgaccacctccctcgcaccgccacctcgccgcccacgagccgcgggagcggcggcgccgccgcctcgggtagcagctacggccgctgcttctctcggcctcagccgccgtcgatgaagctgcccgtaatcttgttcttttcgctcgtaaccggcagcgccctgcttgtggctttgtcaagaggaaaaaacaaagcagcaaatgagctgaaaagttctgccgaaccggaaatcctacccgaggcgagattttcgtggtcgctgatcatgaatgacacactgcgattttgggagaggaaccggcgtagacagtctgggacgttggatcaaactgagatgatttccatcgttgaatttgataaa

SEQ ID NO: 37327 - DNA, 400 bp, Oryza sativa
  Clone ID: PAT_MRT4530_41066C.1
atgcctccttcgtctcgcctcccacgccgctcctcctcccgggcggcgcagaggcagggaggggtcggcgtggccaggggcgtggcggcgctagccccgccctggagcgtggtggacgggctcggcgtcgacctggccaaggcggagcttggcgtcatgacgcgcgtggcggcggagctcggcggcggccgggaggaaggcgcactcctccttggcgttcttggcggcggcgttcttgattttttttgttggtggggtggctcgccgcgcgtggtgcgcctgccggtggttttgtttgctgttcgtggatccagtggtgcagtttttggggcctactgccctgacgtggggccgcgcttcgccctccgtggtggcgggggtgccacgctggcttctcgtg

SEQ ID NO: 37328 - DNA, 424 bp, Oryza sativa
  Clone ID: PAT_MRT4530_41067C.1
agagaggtgggaggggaggaggtggggacggaagggagataatgcgtacgagagggctatggtaatattgaagggcttgcgtaagcaagttgaagatattccacacgaagtgcaagtggttgttggtggcccgagtcaagacgatccagcccgaagagtaccactcgttgaaatcagctgtcagccacctccaaagtcgcaaacaaagggaaggacccgtggaccggacgaggagattaagctaggtgccaagggtaagaagatgtgcacacgggagtgtggctggtgtggacttatggatggtcactacgcaaacacatgtccgacaaatcccgcaaactttgagaaaattaggaaggcttcaaatagggggaagggtaagaggggcagaccgcgaggatcagggcgggggcgcggccgagga

SEQ ID NO: 37329 - DNA, 504 bp, Oryza sativa
  Clone ID: PAT_MRT4530_41068C.1
atgtgggatgaggaccaggtctctcaatttgtcatcgagtccgaaattcgtccctggagcgcaaacctgttacaacgcatcccccaacttataaaaccattacaaacgaggtccttcacctactcgcgcggttggcctccgccatgcactacacaaccatccatcgtcgtgggggtcgtctccgcagccgtgcggaccaacgccaacaactgctcccgtgacaagggctcggggggctttggcgatgtcccccttatcgtgccgaagctccgaggagggcatctcctggtggtggttggtggtggtggcagtggcgtccgtgcaaatccaggctggcgccctctctgctgccgtccctcttctcgctgcagcccccctgctccaccaacgtcggccacacacctcgcaaagctcaaagaggaccatgccgcacacctcttcgtccataccagggatgcacttgaggccaaggcggcggagacggttcagcgtgttgctgagtga

SEQ ID NO: 37330 - DNA, 224 bp, Oryza sativa
  Clone ID: PAT_MRT4530_41069C.1
agccgaaacattagaacaggtccatttcaccaactaaagctactactgctactccactcacactactgtcaccaaccttatctacaaattaaaacgctgaaagcatcatattcctctaatcactaggtatatatatatagtttgtcccctaagaaagaacttttgattattctttgacatttgtgaattttttggtcagacaatggctcaggcgttgggattct

SEQ ID NO: 37331 - DNA, 555 bp, Oryza sativa
  Clone ID: PAT_MRT4530_4106C.1
atggcatcacaggccagatggctcattttgtgcactctgcagtctgcactgcgtttggtcatgcatccactcatcatgcatccacggatcaaccaatgcaaatttgaccgtgaattctgggttggaccatgcgttgacttaccagtggtcagcactcctcagagagaggatcacaagagcagagagaaagctttggcatcgcatgcacaaattgcagcagatcaccatgcacttgcaagctttgcattgcaggttgcagatttgcagcctgtttttatgtccttttgcatggacaaggaattaatggagggcacttttgggaacctgcttcgccaaaagccttctggaaactggcaaaagtcaaattcacctcctaccgtcgagtactacagtagaaatcctcatcaaaatagccatcacgatcacgagcagcatggagtactgaagtatctggatctgaataatctgtgcctcgtgattcgcgccccattgttcttgctccctgatctcctgttgcgcttgtgcatcgtcgctctccctctctgcctcggctaa

SEQ ID NO: 37332 - DNA, 270 bp, Oryza sativa
  Clone ID: PAT_MRT4530_41070C.1
atgggacctgggagtggcgcatccaacgtcctcggaggccaggcgcagcagagcctgatggatactacgtcggcggtcgccaagtgccgcgaatcgatggtggcgacatgcttgggaggcggcgaattaatggtcgtgggcctaggaagcagttcaatctaccacggtcgttgggaccggcgaaacgatgatgacctggcagttccgccagtcccgacagggcttgggggatccaaccacgacactagattgtcgtggcaacgacgatga

SEQ ID NO: 37333 - DNA, 377 bp, Oryza sativa
  Clone ID: PAT_MRT4530_41071C.1
attataaaaaaaaaaaaaattttttttatttttcttttttaaaaaattccccattatacaccatcttgttttttcatctaaaaaaaaaaaaaaggggagaatccccccttcttttttaaaaccccccaattaaaaccagcgggtatcttttttattcactaaacacacacacgattctgtcaccatttaaaacacaacaaaaaggggataaaaaatttttttaaaaaatttcaccccctttgtttaccccgcattattgccacactaccccaaccggataccccttatattattttttttgttaaaaaccacccccgtgataatacccaaaaatttttcccctgtgacaaaggttttccctcttaattttttaaaaa

SEQ ID NO: 37334 - DNA, 375 bp, Oryza sativa
  Clone ID: PAT_MRT4530_41072C.1
cctgcggcggtagacggcgccgatgccggcgagatcgtaagccgtggggagctccccctcggtcgccgcgccctcctcgaagaggtacccggagcacctggtgaacgcgtcctcgtcggagctaccaaacgctgtagatcgcggcggaggcggaggcggaggcgagcggaggaagaggaggccgccgacgacgacgacgacggcgaggcggtgggacccggacggcgggctcgaatcgcctcgccggagctggagcggggagcggacgcggatggagcagaagcatctggaaacgtggggatctcaggcactcgaaatttcgaatggggaatcgaggattgaagagtttgagagcggatgaaccgggcctcgtgc

SEQ ID NO: 37335 - DNA, 439 bp, Oryza sativa
  Clone ID: PAT_MRT4530_41073C.1
aattaatacatatttatatcatttcattgacagatcgcaatgaagctactatgatcatcgatcacctgagcagcaatagaacgaaagaattcaatatttggccgaaagccaaatcgattacctaatattacgaagtttagcgaattaatcaaagaacaccctatctaattcaggattaaggccatatccttcgcacgtgacgtcacggacaccaccacgcggcagccatgcgtgtaccgcgccgggcgcgcgccatggctgcactccaagctcgccacggcgccgtccatggccggagctagcgatcgatcagcttacgaacagctgcgggaaggccatgtgcgggtgcggcgacagcggcgagagcggcggcaggctgcagatccccttcagctcgtcccagatgtctccggctgccgccgccgccgacgacgacgac

SEQ ID NO: 37336 - DNA, 633 bp, Oryza sativa
  Clone ID: PAT_MRT4530_41074C.1
atggcgcgcgccatgtacggcgagtgggcgcagcagctcgtcgttctctccgtcttccaggccatcgtctggttcacgctgctgctgttcgtgctcgaggtcaggaaggccgccatcggaatgtacgtcgacggcgcctcgtcctccgaagagtcgtcggcggcgccggcggccagcaaagggcgtcacgaggccagcgctggcaccgccgcatccacgcctccacggtcattgtcgtcaccgcggcgagcggcgccggcaagccgtcgctgtggggcgctggtgaaagtggtggcgccgctccctcctcaccggtcgacgccgccgcgcgccgctccctcctctcccgccggcggtcatcgaggagaagggtggcggacggcggccatcggggacaagggcgacgagcgcgcggactccaagagaaatatgtgtatgacagcgtacccaccgccggcgatggcgccactgcagcagccgacggggcaggcgccgtacacggcgccgccgcagggcaactacgcgccgcctccgccgccgggatacccgggcaacttcgacgtgggcatgaacccgccgcagcccgcgcagacacagagccgcggtgacaaggccttcctggaaggatggtaa

SEQ ID NO: 37337 - DNA, 816 bp, Oryza sativa
  Clone ID: PAT_MRT4530_41075C.1
atgatcctcgggatctcctctaccttttctcctttggaatctttggctaaatcgctttggaaagcgtcggagtcgaccgtcgccgtcgctcgggaagaccgccgttgtgctcgtcaagtcgtcgccgtcctcgtccgccccttcgcagccgtcggaacccgccggagcatcgtcgccgtcgacaacccgaaggcaggagcacctcgccgctgcctcctcgtagccgacctcgccgctcgacttcgtgctgcccgcgcctcacccgaccccctcgccgccgctgccgagctcaagcctctcttggtggatcccgagggatctggatctagtcaggacgaacccgtcgccgtcatcggcgtctgggcacggttcatgagcaaaggcggctgcgccatcgctgctctggccaaggatttgtcagtgtctcagctctccgtcttccaggccatcgtctggttcacgctgctgctattcgtgctcaaggttaggaaggccgccatcggaatgtacgttgacggcacctcgtcctccaacgagtcgttgttgacgacgccggcggccagcgctggcgccgccacatccacggtcatcgtcgtcaccgcggcgagcggcgccggcaagccgtcgttgtggggcgctgggcggcggacggcggccatcggggacaagggcgacgaccgggcaccgccggtcgccgcggcgtcgggtggaggaggcaggtcaaagaggtggacagatatattcaccaagaagcaacaactagcgacggtggcggaggagaaggatcagccgaggcagaaggacgtgggagattag

SEQ ID NO: 37338 - DNA, 486 bp, Oryza sativa
  Clone ID: PAT_MRT4530_41076C.1
acaagcactctagcaatggcttctgaggttgtccgcgggagggacgcctagctactaaaggcacaagccgacatatggcggctcagcctctcctacctcacgcccctgtcactgaggtgcgccgtggagcttggcatccctacggcgatctaccgccatggcggggctgcctcagccgctgagctggtcacggcgctgtctctcccctccactaagctgccgttcctccgccgcctgctgcggctcctcgccgcgtcgggcgtgttcaccgtcgacaagcagagcacggaggaggagcggtaccgcatcagccccgtgtcctacctcctggtggacggcatccctcacgaggaccacatgaaccacaccgctctggtgctcacctgcacctcgacgcgctacatcgaggcggggatagggctggccgaatggttaagagggacctggtcacgtcaccgttcgaggagctgcacgggcgactctgtt

SEQ ID NO: 37339 - DNA, 429 bp, Oryza sativa
  Clone ID: PAT_MRT4530_41077C.1
atgcccctcctcgacccacacgtggtccgcggcgagctaggctcactttgcatccagggtcgtccgctcttccgccagggcttgaacttgggtgttcagcccctctcgtacagtggagtcagcggcggcgagcacctgcagaagtggctccatgctcgccggagtcggggaggaaaaggccgcgggggaatggctgtccctctcaccccccgcttcgggtcctcgggtagattcagcctcagcctcgacctcgggctcgggaccggcctcggcctcgacctcgggctcgagaccgacctcgggctcgggaccgacttcggcctcggcctcgagctcgggctcgggaccgccctcggcctcggccccaacctcgggctcgaggccacctccggctccggctctcgagccgcgtcttccttcaccccctga

SEQ ID NO: 37340 - DNA, 1680 bp, Oryza sativa
  Clone ID: PAT_MRT4530_41078C.1
ctcttgggccaaactggttttaacaatttgcactactggcccaggctagcaaaggatttcgagctgtttaaacacaactaatgctgccacacacgggcacagaaagctcagcattaggccatacaactatacaagagggctaccagctactttggttatcttacaattacaactgaccggcaatgaaaaataattagtgtttaaggcaaaacttctgcttcatcaaaaatgttcaatgcctaagagagatccaaatgcatgatttttgctgggtaaaattccaaatgcctttttccagcatccagacgataaggaattgaaacacaattttctgaattatctttaacttggcatccaaccaaatttatcagtgctctggtgcccaatagtgaagcatcctcatttctaaacaggaggggctaccagcctaccacaatactgagtttttccatcctcaaatcagcagagaacatttaaaacatggatgccatttaatttatgactgggctactggagcaaccatcgtcacagctccaatgcgatgcaatgtgtgattgctgacccctttggcatgtccttgaatacaatggtgtcccttgacaacaccttccccgttagccggccctcttcggctttcgtcaccgcaatggcagcccaatcaatcaccaccatgctccttgcttcgccctttcctttcgctttccctttccctttccacttcccttcccaaaccaagtagagcagttcaccgacattggcgagagtggcaccacacaagaacttgggcagctcctgctccaacccttccaccttgctccagcaatcggtgtccggatcatagcccttgacctgccccaagtaatcgtaggagtagaggattccaccgaccacagctgcacggcccttccaccccatgtcaaggatcggagaaaccggcgcccatgcctcagtaggcggcgcagccgggtcgtaggccaagccgccgcgatcggccaccgcgaggaccttcccggcgagcgaggcggagccgtgcatccacttctcccggaagtggggcgggctggggaccggagaccactttgcatccggggaggagaggttcagggactcagcccagaagggggaggaaggaacacaaccgccggcgacgaatagtacgccggagtgggcaacggcggcggcgaactcccgcggagaggagaggcgcgggccgactgaccaggatctggtgcgggggtccaagatctgcaccgacggggacggcactccggagacggacccgccgaagaggaacacccggttgccgtcgacggcgaccgaggaggaggaggagacggggacgggaggggacgggagaggcagcggtggccatccgggatgcgggaggaggaggaagaagagaggcgaggcggaggccggcgggcggagggagaggatgacgtgggggtcggagaggcggaggcggcggcgcgcggccaggaggggacccgggtcgcggcacagcaaggtgtggaaggcgcgggagacgagcgcgagggaggggtgcgcggcgcgcggcagcagggcgacgcagtggatggccaggtcgtcggggagagccgggatgaggctcccgcggatgaactccggcggctcaggcgacgaggtgggtgcggaggtggacatggctcgcactcgaag

SEQ ID NO: 37341 - DNA, 339 bp, Oryza sativa
  Clone ID: PAT_MRT4530_41079C.1
atggcatggttcctcgcatcgcactgccgaaagggccatgaaactgaaccatccttgctacaagaacaactgaatgattgtgatttggctactactaatcctactacccctataccacaagatgccacacaaatcctaattgttattgcaacttcagacaccctgatcatccctggtagtaacacctgtgccatggacaagtctttgcttaagactaaagtggacgttacactggacggtaccacaaatggcaccctgtttatcgaaactataattcggcaatatgaaaagggtaacgcacaagaaaaaagtggatgggttatgagactaagagtttag

SEQ ID NO: 37342 - DNA, 1943 bp, Oryza sativa
  Clone ID: PAT_MRT4530_4107C.1
atggataatactggtaacaaaggctatgggaatgatggatccgatgactcaagaacccaagccaatgggaatgagagaagcatcaacgaaacctcaccagagctaatccaaattgtggttaaccaaaccaacatgttggcaacagcctttcaactattacagaattggaacaacccagcaggggcaaccaacgttcaagtacctacagtccagcaacagtgcaagttatcagaatttctcaaaacggggcctccaacctttgccatggccgtcgatcctatggaagccagtgattggttgcgcacagtcgagaagaagctagggttgattcagtgcaccgaccaggagcgggttggcttcgcaactcatcagttggttggaccagcttcagagtggtgggatagctacgaagcatcacggccagaaggacataccatcacctggaacgagttttcctctgtattcaggagatcacatgttcccgcaggaatgatcacactaagaaaacgagagtttcgctacctgaagcaaggagatttgaccgtcacagagtacctgcacgagttctatcgtttggctcactatgcaccagaagatgtggaaacggatgaagacaaacaagagaagtttctccaggggttaaaagatgagcttgcagtgcaactacttctagaggattatgaagattttgagaaacttgtggacaaagccatgcaactcgaaagtgagcataatcggatgacgaactgcaagagaaggattgtcaacatcccagtaattccaggtggtaaccaaagacagcgcactgagccacttcagatcaccggatcttctgttgtgtatcaagagttcctgccccaagaagatgaacgcaatgcagacaacaacactagcaatactaatgctgatgataccaccaacaaccatggttcttgccccattagcgaccactcgaacaaagcgtgcaatgtcagtagcattcaccaagatgtcaacgatagtatcaatgttggaacccagaatgacaaccttagcaattttgactctgagaaagactccaatggtgatagcaataatggcaccactgatgccaatgttagcaaggatttccaaccaccaattccaactcctagtcagaacgatcgttcccagacggacaactcagcaaagaagacgttgatttgttacaactgcaaagaaccaggtcatttctccagagattgtccacagccgaagcgtaacctgcgtcatcactccggccattatgcaagaagaagacaagtcactcgccttgtggtcactggagcaaacgccgtacctgtttcacggaaaggcagcaagccaaaggacctcatcgtcaccagaagcatccacaactctcggagtgaagagtacttggttgacaaagttgactccaaagatatgaactatgcaaagttctggaactgaagccccatcttcaagtgccgcaacccagtcaaagtcagctaaaggttcaaccagggacaagtcagtctcttcctcctttgggccaagcccagcccaaaaatctccctttcctccctctttttctctccctctccttctctccctccttctcttgggctcccctttccctcggcccactccctcctccctctctctcccgggctgcctttcccccccctcttccctcccggcctgctcggcccaggccgctgtcacgtcctgataaattcatcccgaaaataaaaatcatcttctaaaaggaataatagaattaattaaaattcgaaaagaaattggcaaacactaaaatacgtacaaaaaaaattcaaatgtgacccggagaatttttgttaaattctccttggtctaaaaggagccctcaaattttaatggaattttcagagcacaaataataattgaaagaaataaacaaagttgaaaaggtttataaaaag

SEQ ID NO: 37343 - DNA, 3291 bp, Oryza sativa
  unsure (1)..(3291): unsure at all n locations
  Clone ID: PAT_MRT4530_41080C.1
atggaggcggcggggagcacgaggactgcttcggaagagggagcggcggcggcaatggaggcggcggggagcacgaggactgcttcggaagaggactctggggcttcggcgcgggtgactgccctcacgaacgatccagatactgatgagctcactgtcaagtggttacacgaaaacatggaacctctaaggggaggtgaccaagcgcggtatcgactaaaccagtttgcagatttaaaaaagacactttcagatactgcaaccaagacgatagaccgtcttggatttggttcatttcttggcatcaatatggaaatgcttcctgataaacagtttgccatatggacggcttctttgtgcaagcccgcaaaggtccagaataaagatgttgttgtgcttgatcttgaccccaagcatcctctggtgatatcacaagaagctttgcatattttaactggccttccaatgggtcaggaagatgtacctgagaatcttcctgcatcaactactacagtgaaggaggctctttctgctgcttctgggaagagcaataattttgttttagctgatgctataaaagcatctgaaaatgctagggacaataatgaccacatgctgcaagtgaagcttttcataggggttgtattcaactttgccatctttacaaccacttcattatattttacagccgaaagcatgacagctgtctctgagataaataagctagtgaagactaattggtgtgaaaagttaattgctcatatgaacaaatgtttgaaaaccttccattcaggtcagaaggtttccagcccggtgtcctttgttctttttttcttagaaaacataaactttactgcaacaactgaagaaaatgacatagagaccccgcggttgaatcactatacggaggaaaaggtgattagtatgattgatgcaattaagaaaggtgtcaagcttaaagattggaaagacacggtgtttggccagcaggaaattctagaagttcaagctaacgacattgaatatattgaaaattacaagcaatctgtaaagaagaggagagggaatgaggatcaggatcagggtccttggaagaagatctctaagggtcatttgaagaagacgacctctaaggatcagggtcttttgaagaaggggatcgctactaagaagaggaaagtggaggatcagggtcctttgaagaagacgatcagatcgaataaggagtccaatgatgagataaacattcgtgctgatgtaggcagggatgttcttcgtcatacaaggagcatgttctcgacagaactcaagaccaaaataaaaattaatatattggaccatgaagtttcagaacgtaattatgtagaatgtttcaagcagcaaggatacatgaacacttccataatgttcatacaatgtgcattatggaatcaagagtggaagggtcaagccatggacaaagttatattgtctcaaaaggcaatgtatgaattgttagacccagagcatggaacaagtacattagctgatgagcttggacagcaagctaatttgtgcaagatcattgtccacagaactgacaagatatttatacctgttcttcatgagaaacactggttcttgatcgtgatctcacgcaagaaggacaccatttatatcctcgattcattgccttgcaagtccagagaggcagtgatttgtggtattctagagacactgcagaagttgggaaaagaatcaattgctggatctcaatacatctgtgaagtactagacgtgcagcgtcaaggaaacaactatgattgcggttttcatgttctactgtatatcaaagaattcgatgatacacaggcagtgcagatatgtgaaattaacaaggatatggtggaaaaaatccgcattgaaactgccgtagaccttgtcaaccacaagcttaacaaaagagatgaggaagaaaaaatctcatatgatgatgatgatgatgttgagctcgtggatgaaaaattctcatatagcaattttgttctcagtagttttcttcacagggatcgggatgatgcgggtttggatgatgcgggtttcgatggtggagaaatttttggtggatcctcgagtccggttgttgatcccagtgaaaatcaacaagagagggctgcctctagagaagattccaaggctgacatgaatgaaaatcaacaagagagggctgcctcgagtccgggggctgcctctagagaaaattcccaggctggggcttcggctgtttattccacacccaaactggatggctctgggaattcggagcctgcctctggagaagctnccaangctgacatgaagaggactgccaagcctgataaactttattgtaggangcaaccaaaggagaaagcggaggaggagccagtttcctcagcagtgcaggaggaaccaaaggagaaaccggaggagttagtttcctcagcagtgcaaccatcttctacccagaggccacggagaactgctgacccttttggccattataaaccaacccgccagttgcttaagggcgaaatacttgaactggttcatcagctggccattggttgtaaggagcaggttatattggagtttgaagagatctcgatgactggttctcgattagaacagtccctccaaggaggtgcggatgccagggatcttattatattattaatgaaagtcctggataaatatccgtacaaccaacgtaaaagaatctttctctcaccagtagagaaggatggccaagatttggagaaaatgattgtggatgcactcccggttctgagatcaggtagcaggaccaccacgttaaaggaaacaactatttactgccctgttctcttccaaggagaatggattgttgcatgttgtgtgttttcaagctcaaaccaggtccatgttttttgccacaaagataccttggccagcgtgaaaccattttgtattgatctgggagccaaagcaaactcagctttaaaaagatgcggatacaaccaagtaaaatttcctgaccgcaaagtggcatatactggtaccaacataaaggtcaatgatagtgcgtttgcatcaatgtatttcatcgagaatttcgggacttctggagaaatacatttcaaccggtttttagagaagaatgatgaggtgaaggatgaattcattaaagatgtgaagttagggcttttgccgtacttattgaaccacaagaataatactggaactgtccctaatgaaatttctgaattgatcaagaaaaacaaaaggacctaa

SEQ ID NO: 37344 - DNA, 5187 bp, Oryza sativa
  Clone ID: PAT_MRT4530_41081C.1
atggcactagatgagggaaagaaactggggtgtgaatcctcaggctctcagtttgaagcaatctcagccatggaggtcttgcttctcataatgggaggtgaccaagcgcggtatcgactaaaccagtttgcagatttaaaaaagacactttcagatactgcaaccaagacgatagaccgtcttggatttggttcatttcttggcatcaatatggaaatgcttcctgataaacagtttgccatatggacggcttctttgtgcaagcccgcaaaggtccagaataaagatgttgttgtgcttgatcttgaccccaagcatcctctggtgatatcacaagaagctttgcatattttaactggccttccaatgggtcaggaagatgtacctgagaatcttcctgcatcaactactacagtgaaggaggctctttctgctgcttctgggaagagcaataattttgttttagctgatgctataaaagcatctgaaaatgctagggacaataatgaccacatgctgcaagtgaagcttttcataggggttgtattcaactttgccatctttacaaccacttcattatattttacagccgaaagcatgacagctgtctctgagataaataagctagtgaagactaattggtgtgaaaagttaattgctcatatgaacaaatgtttgaaaaccttccattcaggtcagaaggtttccagcccggtgtcctttgttctttttttcttagaaaacataaactttactgcaacaactgaagaaaatgacatagagaccccgcggttgaatcactatacggaggaaaaggtgattagtatgattgatgcaattaagaaaggtgtcaagcttaaagattggaaagacacggtgtttggccagcaggaaattctagaagttcaagctaacgacattgaatatattgaaaattacaagcaatctgtaaagaagaggagagggaatgaggatcaggatcagggtccttggaagaagatctctaagggtcatttgaagaagacgacctctaaggatcagggtcttttgaagaaggggatcgctactaagaagaggaaagtggaggatcagggtcctttgaagaagacgatcagatcgaataaggagtccaatgatgagataaacattcgtgctgatgtaggcagggatgttcttcgtcaatacaaggagcatgttctcgacagaactcaagacaaaataaaaattaatatattggaccatgaagtttcagaacgtaattatgtagaatgtttcaagcagcaaggatacatgaacacttccataatgttcatacaatgtgcattatggaatcaagagtggaagggtcaagccatggacaaagttatattgtctcaaaaggcaatgtatgaattgttagacccagagcatggaacaagtacattagctgatgagcttggacagcaagctaatttgtgcaagatcattgtccacagaactgacaagatatttatacctgttcttcatgagaaacactggttcttgatcgtgatctcacgcaagaaggacaccatttatatcctcgattcattgccttgcaagtccagagaggcagtgatttgtggtattctagagacactgcagaagttgggaaaagaatcaattgctggatctcaatacatctgtgaagtactagacgtgcagcgtcaaggaaacaactatgattgcggttttcatgttctactgtatatcaaagaattcgatgatacacaggcagtgcagatatgtgaaattaacaaggatatggtggaaaaaatccgcattgaaactgccgtagaccttgtcaaccacaagcttaacaaaagagatgaggaagaaaaaatctcatatgatgatgatgatgatgttgagctcgtggatgaaaaattctcatatagcaattttgttctcagtagttttcttcacagggatcgggatgatgcgggtttggatgatgcgggtttcgatggtggagaaatttttggtggatcctcgagtccggttgttgatcccagtgaaaatcaacaagagagggctgcctctagagaagattccaaggctgacatgaatgaaaatcaacaagagagggctgcctcgagtccgggggctgcctctagagaaaattcccaggctggggcttcggctgtttattccacacccaaactggatggctctgggaattcgggtgttgatcccctgcagaaaaacactgataatcaaaacaagaggcctgcctctggagaagctcccaaggctgacatgaagaggactgccaagcctgataaactttattgtaggaggcaaccaaaggagaaagcggaggaggagccagtttcctcagcagtgcaggaggaaccaaaggagaaaccggaggagttagtttcctcagcagtgcaaccatcttctacccagaggccacggagaactgctgacccttttggccattataaaccaacccgccagttgcttaagggcgaaatacttgaactggttcatcagctggccattggttgtaaggagcaggttatattggagtttgaagagatctcgatgactggttctcgattagaacagtccctccaaggaggtgcggatgccagggatcttattatattattaatgaaagtcctggataaatatccgtacaaccaacgtaaaagaatctttctctcaccagtagagaaggatggccaagatttggagaaaatgattgtggatgcactcccggttctgagatcaggtagcaggaccaccacgttaaaggaaacaactatttactgccctgttctcttccaaggagaatggattgttgcatgttgtgtgttttcaagctcaaaccaggtccatgttttttgccacaaagataccttggccagcgtgaaaccattttgtattgatctgggagccaaagcaaactcagctttaaaaagatgcggatacaaccaagtaaaatttcctgaccgcaaagtggcatatactggtaccaacataaaggtcaatgatagtgcgtttgcatcaatgtatttcatcgagaatttcgggacttctggagaaatacatttcaaccggtttttagagaagaatgatgaggtgaaggatgaattcattaaagatgtgaagttagggcttttgccggaggaatacctgcaaatgcacagttctcggcaacccagaaataaaaagtgtggcatccagaagagggtattcccgacctccctctcccccgcgtggagggggtgccgagtgcgcaacagatcattcgccagcgggccacaagcgaccagccgagcccgaggctgggcggaaaaagaagcggctccgaaagatagggcaaacggagccatgtcggggaagcttcatcgagcccccgaagtggaccttcaaccgccctccccagagattccttctcagggaatctcagggtctgacccctcgcatgggcaatctgggtccggccagtctaaggccacggggtcttcgcagcctcgcggtggggcccagaagtcacacactaggcccaatctcaagcgaccctcaggcggaacccgacctaccgccggcgtgaggagcggtgacgctcctcccgagggcggctctgggaccagggcccacgcggagcactacccaggatcagggggtgaaggaagacgcggctcgagagccggagccggaggtggcctcgagcccgaggttggggccgaggccgagggcggtcccgagcccgagctcgaggccgaggccgaagtcggtcccgagcccgaggtcggtctcgagcccgaggtcgaggccgaggccggtcccgagcccgaggtcgaggctgaggctgaatctacccgaggacccgaagcggggggtgagagggacagccattccccctggcgcttggggcgccctcgaggctggtctcacaaaaggggggccgagagcagccccgagtctcgcggaggatccagcagtaccccgtcgtcccgggggcggaccgcggccttttcctccccgactccggcgagcatggagccacttctgcaggtgctcgccgccgctgactccactgaggggcatcgcgctgtggacgacatggtgaaggtggggcgcaaaatgcgccaagcccaactagccaagatccaggcgcgcgaggaggtactggactccatcatgcgggagacggaggaggagcggcaggcggcgctgatcgcctcgagcgtcctgaacgaggcgctgggcgacatccgcctccaatatgaggctcacgccgaggacttggcgaagaggattagggacgcttgcggcgtccttgacgcagccgctgcccacgagcggcgggcatcggaggctgaggcctctctgcaggctcgaacgacggcgctcggggctgagcgcaaggccttggatgaccgtgctcgctccgcacaggagcttgaagccacaatccgtcggtggatcgaagtcctcgatcgaaaccagcgcgagcaaaaaacgtgcggcgaagaacagacggggcgggcccaggagctggaggagcgagcgcgcctgctagatcagcgggagtccaccttggccgctcacgagagaacggcggcgaaggtggaggcttcccttcgcctccgtgaagaggccgcggccgagcgtgaccggatcacccttgccgcgaaagcttccgcggatcgccgcgcggaagagctacggctgcgggaagaggcatgccgggaacaggacgctgcacttgccgagcgcgaagccgaggtgagccaccgcgatgtagcctcgttctggctgagcgagcaactcgcgagtcgcgaggaggccgtcgccgggtgcgaggctcgccatctggagagcgcccgcgctgagcgcgcggcgatagcggcgaaggcctctgagctggaggcccgggagaaggacttgacagcgagcgggccggacatgacgcggagttggcgagccagcttgccacagttcggagtaccctcgccgacctggagcgcctggtgcaggatcaggctggggagattgcggccctccgcctcaccaacgagctcgggcccaggcagctctccgacgcagtcaaccggctggagcgcgcggggcgtcgagtcggcatctccgcgcgccgggatagcaagcttccgcccacatagccggcactcgcgcttctgctggacgggctag

SEQ ID NO: 37345 - DNA, 179 bp, Oryza sativa
  Clone ID: PAT_MRT4530_41082C.1
agcacgcgtaggcggacgcttaggcgaacgcgcggaccgagacgcacagtcgttctgaccatgaaatctacgcggagcacgctgtttacatgaaaatgatcttgcagaccgaggaccaggatgcacaaaagctgtgcaactagatggtaaagacatttaactatgttactaaccacact

SEQ ID NO: 37346 - DNA, 357 bp, Oryza sativa
  Clone ID: PAT_MRT4530_41083C.1
ttagtggcgacataataagccatccgtgaagacgaggataccaatcggtggtgacgaaagcaagccaacggtgaagatgtagacacgcatcaaaggcaatgacgaaatccaccaatcatgaagatgaagaaaatagtcggcgacgacaaacgcaaccaacatgatgaagatgacgatgtcagtgatccagtcaatagcagtgtagcaaccaatgataatgacgaagacgctcatcagcgtttgcatagtagagatgtcagggccaatgaagtagaggtgctggtgatgaagtcagtgacaataatccatcaaattggtgttatagctgttgtagatgcttcacttggaggaaagtag

SEQ ID NO: 37347 - DNA, 407 bp, Oryza sativa
  unsure (1)..(407): unsure at all n locations
  Clone ID: PAT_MRT4530_41084C.1
ttcatcttgcgcggaggccaagcgcctccggcgccggcgccgcttcctcccggcggtgctgcctccaggcgccaccgacgcttcctccccacggcgctgccccaggtgccgcctcttcctccccacgctgcgccgaccttcttcgtgccaccgccgccgcctctccgcttcgcagcgccggcgccgactccacctcaatacgccatcaccagtcgccctagcccccacgttcaccttaacagccgacctagccccttcctccgccacccgcaccagccaccctagcccccagtcccccacctccgccacccccaccttcacctacaccaccccacacctncgatgcttgctcgagctcaagacagccccaaccccttcacccccaatcccttcctaaaaaatcaggg

SEQ ID NO: 37348 - DNA, 1424 bp, Oryza sativa
  Clone ID: PAT_MRT4530_41085C.1
ccacgcggccgcgtccccgggccgccgcctgcccccccgcccgccgccgccccgggccggcccccaccgcctccccgcccgcgatggagggcgcggaggcggaggagcggaggctggcggcgtcgctgacggcgcggtactcggactgggtggtggaggcgctggacgagctcccggggagcttcatcctcaccgacccggccatgccgggccaccccatcgtctacgcctccagggggctcgcctcgctcacggggtacccgccgcgggaggtgctcggccgcaacgcgaggctcttccagggcgccgacaccgaccgcgccgcggtggccggggtgcgggaggccgtgcgcgggcagcggccgcaccaggtctccatcctcaactaccgccgcgacggggaagcccactgggtgctgctccacctcgcgcccgtcttccacgcctccgacggccgggtgctccacttcctcgccgtgcaggtgcccatcgcgccgcccgcgtcccggcgccgcacgccgccgtgccgggccgcccgcccgttcgtggtgttcgcggcgtgccgcgaggaggccagggtggaggaggagtgcccctgcgcgagccacgcgggggaggtgttcgtggatgtggataagagagggcaggatgctgaggaaccgcgggtagctagcgaacatgagaaagaaaaagcactgagtacagctaacagcatcttctctgcgttgaaccgctacagcaaactcactggtctagtggtctgcgggaagagatgtgattctgttggcatcccagcactcagttcttcattaaatctttctctcggtagaatcaaacaaagctttgtattgactgacccccatttgcctgacatgccgatcatctatgctagtgatgcttttctatcactaacaggttactcaagagaagaaatcttgggctgtaactgcagattcttgaatggtcctggcactagtgtggaggttttagaacagataaatcaacatatttgttctgagcaagcttgcacggttcatctactaaactacaggaaaggtggaagctcgttccgtgatcttctacatatatctcctatacgaaatgcatcgggcaaggtagcatttcacgtgtgggttcaccttgatgagggtgcaaagtatgattttaatgggctgacccccgaggtatggcagcttggtgctgttggtgcggtcaggcgaacggtggcgtcaagaatgtcttgtcaagacggacacacgacgcggcgatcaatcaacatatcgattgcgccgttgggagagcagagaacagatatgacggatgagcaaaagctgccgaggcgagcgaacctcccctcaactcacgttcacgtcgtcgtcgcgccacccctgacgccgagggaggggaagatgatggggaagtaa

SEQ ID NO: 37349 - DNA, 1212 bp, Oryza sativa
  Clone ID: PAT_MRT4530_41086C.1
atggcgagtagggttcatccactcctcgtcgcgttcttggtggtgctcctcgtcggcacatgccaggcaaggccggctccgggaaaggcagcgtcgtcgtcgtcatcgggagtggtggacggcatcacggccatctacaacttcggggactccatctcggacaccggcaactacctccgagaaggagcggccgccggcgccatgatggagcacaccgtggcgcctccctacggcgcggccatcggcggcgccacggggcggtgctccgacgggtacctcatgatcgactacctcgccaaggacctcgggctgccgctgctcaacccgtacctcgacaagggcgccgacttcacccacggtgtcaacttcgccgtcaccggcgccaccgccctcgacgcggcggccctcgcgaggatcggcgtcgccgcgccgcacaccaacagctccctgagcgtccagctccagtggttcagggacttcatgagcgccaccaccaagtcgcccgccgaggtgcgcgacaagctggcgagctcgctggtgatggtgggcgagatcggcgggaacgactacaactacgccttcgccgcgaaccggccgcggccgggagggcgcagcgccgcggacgtcgggcgcatggtgaccggcgtggtggagtcggtggtgctcgtcccggaggtggtgcggtccgtggtgggcgcggcgagggaggtgctcgagatgggcgcgacgcgggtggtgatcccgggcaacttcccgctgggttgcgcgccgagctacctggcggcggtggacgagacggagcgcgcggcgtacgacgggaacgggtgcctcgtgggtctcaacctgttcgcgcagatgcacaacgtgctgctgcagcaggggatccgggagctgaggcggtcgtacccggaggccacggtcgcgtacgccgactacttcggcgcgtacgtgcggatgctggagcgcgcgcgcgagatggggttcgacggcacggcgctgaccaacgcgtgctgcggcgcgggcggcggcaagtacaacttcgagatggagcggatgtgcggcgcgggcgggacggcggtgtgcgcgaggcccgaggagcggatcagctgggatggcgtccacctgacgcagcgcgcgtacagcgtcatggccgagcttctgtaccacaagggcttcgcgtcccctgcacccgtcaagttcccgcatcagtag

SEQ ID NO: 37350 - DNA, 462 bp, Oryza sativa
  Clone ID: PAT_MRT4530_41087C.1
atggcgagtaggccggttcatccaatcctcgtcgcgttcttggcgctgctcctcgtcggcacttgccaggcaaggccggctccggggaaggccgcgtcgtcgtcgttgtcatcggcggcgaagggggcggtggtggacggcatcacggacatctacaacttcggggactccatctcggacaccggcaacttcctcgccttgatggagcacaccgtggcgcctccctacaggtggtgcggtcgcgtggtgagcgcggcgagggaggtgctcgagatgagcgcgacgcgggtggtgatcccgggcaacttcccgctgggttgcgcgccgagctacctggcggcggtggacgagacggagcgcgcggcgtacgacgggaacgggtgcctcgtgggtctcaacctgttcgcgcagatgcacaacgtgctgctgcagcaggggatccgggagctgaggcggtcataa

SEQ ID NO: 37351 - DNA, 373 bp, Oryza sativa
  unsure (1)..(373): unsure at all n locations
  Clone ID: PAT_MRT4530_41088C.1
gtccaaatatnnnnactgactcagcttatattaaagcaatttgtccaaatattattcctgactcagcttatattacagacattactaacaagggtagattagtcatttcgtgtgcctggtccatgctggcatgtatatgtggcactgaacagtgcagaaagcggcaaaaaattacaaaagcttctctctccagtggagaattcttaagtgcaaatctaagaagggtatttggttaattgccaaacctaaaagtggcaaatagttaaatttccaatccgttcctcccaatcgtttgggtccgagtctgtcttcaaaaaaaatccccgagctagattcccaacttaatcaataaaccgaacacccaaattaacac

SEQ ID NO: 37352 - DNA, 159 bp, Oryza sativa
  Clone ID: PAT_MRT4530_41089C.1
atggctttcaacaagatgagaggactactccaacaagtcgatccaactacgatatccggcgaggtgtggagaccgaaggataaacaaagcgaactcgagattgagaccaccaagaccagcttttatcgaaaagaaagtatgaccctgtggccctgctag

SEQ ID NO: 37353 - DNA, 840 bp, Oryza sativa
  Clone ID: PAT_MRT4530_4108C.1
atggcgaggcgacgacggcgcacgaccgccggcggtgaccggcggcgcggggagacggcggcgaccggcgcgaaggcggcggcggcagccgaagacgacgacgcacgcgcggagggcggcggcgctcacgggggagaggaaaggaaggaggaaagacgaagtaccgcctgccatatgtatcttgtgagaaggacgttgcaacctggcagcgatctctacaactgcatttgggatgatcagaccattcagaaattaatgaccgttggcatatgtaggtatatgacagaagtaatgagagacacacgaagcatctctgtcctagagttcgttgtcgaacggaccttatcacctggcaacggtctccacacctacactctggacgctcccgtcaagtggggagtcccagtggatttacttgccattgtaaggatttggcagtttttcatcgttcgtactcatccttcctccttaggtagtccgataatggttcgctgcatggatatgggcgtgccctgtcacgttgtggattcatcgtatcaacccactcaacgaagtcgcataaactatgcgagccaagccaagccgagcttcccttgcaccaagctttcacgagccgagccaagccaggctcgtctcggcttgtttccacccctacctgcgagtggatctctccgccagtctaaatgctcgcagaatggagcttccattgtgttgaacttgatgctgaagacaatgggaaatgtaaagaggaaaggacttgatgagctcttgtttggtcaagttgataaagttgaaaaatggggtggaccacaaagggacatgtgcaccgaaagtagatag

SEQ ID NO: 37354 - DNA, 729 bp, Oryza sativa
  Clone ID: PAT_MRT4530_41090C.1
atggctgccgctcgcccgtgcctatcctccccggcgccgacgccgccgcccccgcctctcctccccggcgccgacgccgccggccatggacgccgccgcccgcgccgctccttcccgccgccgccgccaccgcccgcgcctctcctccccggcgccgacgcggccggccgtggacgccgccgctcgcgccgctcctccccggcgccgacgccgccgcccccgcctctcctccccggcgctgacgccgccggccatggacgccgccgcccgcgccgctcctccccggcgccgccgcctcggctcctccccttgttcgctttctctcttgtccccaaagctcacgagcctaacgagctggctcgagctttcaaacgagccgagccgagctgggatgggggtgcggcgaggtcggcggatcccgtcgattcggcggcggcgcaggtgggcgcggcgctgtgcggcgaggtcggcggctcccgtcgacttggcggcggcgcagtggagatgctgccgtcggcgggtgagcagggtagggggaagccggaggaatggatgcgggatggaagggccgcgatgggtggggatgctggcggagggagcggatcaatgatgccatcagcacggcagtccgagtcccttatcccccctcgatggctccagcaagtacctgccctgctgctctccctcccttggtgcatgagcaatggagctgccgtcggcactgcctag

SEQ ID NO: 37355 - DNA, 417 bp, Oryza sativa
  Clone ID: PAT_MRT4530_41091C.1
atggctgccgctcgcccgtgcctatcctccccggcgccgacgccgccgcccccgcctctcctccccggcgccgacgccgccggccatggacgccgccgcccgcgccgctccttcccgccgccgccgccaccgcccgcgcctctcctccccggcgccgacgcggccggccgtggacgccgccgctcgcgccgctcctccccggcgttgacgcaaccaaccgtggacgccgccgcccgcgccggtcctccccggcgccgacaccgtcgtggacgccgctggccgcgccgctcctccccggcgcccctcctcggctcctccccttgttcactttctctcttgtccccaaagctcacgagcctaacgagctggctcgagctttcaaacgagccgagccgagctgggtttctagctcgttag

SEQ ID NO: 37356 - DNA, 424 bp, Oryza sativa
  unsure (1)..(424): unsure at all n locations
  Clone ID: PAT_MRT4530_41092C.1
cgcnggatagggacctctgcgctgcctcnagatgctgtgtctggcccnccctatgatcctgtgccaatacgggngcctctggcnggcaagctgcggcctagatccggaccaagggaatgcatgccatgctgcgtgacctgaccctgggctgtgcatgcggaccggatgccagtgccnatgccgatgccaatgcatgcatnccaagctgggccaagcttctgatcatctggatgcactatatacatgtgtgtatctgcaccatctgtgctacatgaactgatatgactatgaatgcgttacgtttggaacgctggaataattccatatatatgggtctgaattcccagtgttccaagccggcaatcgctacttaaattcaaggtacttgtgttgctgagctacttgtctctgatatacaaaaaaa

SEQ ID NO: 37357 - DNA, 634 bp, Oryza sativa
  Clone ID: PAT_MRT4530_41093C.1
gcgggcggcctcgtcctcgtcgggacgacggcagacaatggccgccgccgcgatgatcctcccattactattgctattgtgttggtttctgctgctgtctgtgggcgacgcgatgtgttggttcaacgacgacgcatcagcatcggcaccagcggggtggttggtgtcgtggaccaatgggatgggttggtacaaggggatgccgcgggagttcgtggacggccacaaccagctgcgcgcgcgctacgggctgcagccgatgaggtgggataacaagctggcgaggcaggcgcggcggtggtccgacgccatgcgcggcgactgccagatccgccactccaccggcaacagcttcgccgagagcctctacatcgggaggaacggctggaacgccagggcttccgacgccgtccgatgctggggcgacgaggagcacctctacgacagggacaccggcaaatgcaccgccggcgtcgacttccacgagtgcggccacttcgccttcatggtcaggcccaacttcaccaggatcggctgcgcccgcgccgagtgcttcaacggcggcgtcttcatcacctgcaactacttcaaagacgagcagcaccagccggctacccctcccacctactcctaa

SEQ ID NO: 37358 - DNA, 114 bp, Oryza sativa
  Clone ID: PAT_MRT4530_41094C.1
agaaacctgccccgcttttggtcgtgaaaaatgaatcacatcgagacattctcatcgtgaagttccttgtgattagccagtcgccacccatctttactggacatagccgcagcg

SEQ ID NO: 37359 - DNA, 266 bp, Oryza sativa
  Clone ID: PAT_MRT4530_41095C.1
gcaaaaccaaaatttcattgtcgacggatggagatatgctctaggcatcatattacatgcgtccgtgtgtctagccctagatcttgctttcacacagcactgactatgataaccgtcggatgatgatgatggtagctcgattagatagacaacaactgcaggtcggagcgcgtgagaacaaatacgttcagcttaacacgggcactctagttaccagtggtgccgtaaccaccgccgtatccggaactaaagcccttagttgccgt

SEQ ID NO: 37360 - DNA, 814 bp, Oryza sativa
  Clone ID: PAT_MRT4530_41096C.1
tggtcggccgcccgtggtgacctcagcggcttatggcagcaagcaaggaagcggttagaaggtggagagtttgttctctattgccggccaagcatcctcttctccgccggccgccccccctgccctcgcccgagtgcttcagttttggtcgtggggatggcggtgcgagccaggttgagctgcggggtggtggattgggcttggacgttgaagggttggcgcggtggtccagtgacggtcgtttcattgtgcatgatggttgtttggggctttgattgggaatcgttggcgaaagccttgctaggccatgggccatcttgacgacaacgacaccattaggtaccgttccgcttcttggaggcgttattatggcgttgagccctcctagcaccaagaaccttccgcgtgcaacggtgaccattggtggactcctgcaacggctccgaagctctataggcctagagagtttgacgaggccttcgtcgttggttttgtgtcttgctctgcggcaggtgaccatcatttttggttattgccgagtagaacaatggcgcactgcaatctctatatagggttgttggtgctagctgtgtgtgtagaagtggctccttggtagcttgggctgatgtccttcgttggtgtcgaatcggtttgttcattttggcgttcgggtaacatcgcagtgaagtcggagctgttgcgtcgcttgggtggcaagcttggcaacgataacacgtgtgggctactgtgtcgtctctatggcaagctcggtgctgatgcctcatgttgggctccatcgtggtagcttaggtta

SEQ ID NO: 37361 - DNA, 953 bp, Oryza sativa
  Clone ID: PAT_MRT4530_41097C.1
ccatccagggacgtctacaccttcgtggttgacccataacaacagggagctagtgctcagttactgcgtgaagacacctatgtggctgtgactgctcgacagtaaagccatgtatgacatgtgtgcgaggtcgctagacatggagcgccaaacctacaccaaccttactaggctcagtatcccagggcatactctgactgactgcctgcctgaggttggatgatgctctgaatgtggttgtaaacgaagtacagaccaacctggtgccctacctaaggatccaatatatgctgtcctgcctacgctcccgttgatcgcgatcgagatggtctaacatgtacatgtctacgtttgctgacatcataaactaaactcttcggtacgatttacatgatgtgcaatggttgcctttgtctcttttagatctggattgcatactctagagccaccgtgcgttgtgtatgtgagactccgcgttgatcttgattctcatatacatagattactttgtaggtgaattgtgtgtattaatatgttcgatatatgaattaataattcccttacgttcgcattccttttatgtgtctgtttttgatatgatgtaacttcactagcaatcctgatataatgagatttgggtctagtttgcatgatactggtcatatctaatagttttcatcttcattcaataaactgtttacatggttttcctcaaacatgcaaatcttttaccttgtactctatctattatgttccttaacataaagtgcgtactttagatcatacttcccaattgatagaattgcccgattcctgtataacaaatcgtttaacatcttattccatagcctcacagagtatgtgttagacgaatgggtagagtctctttcgttatatttttttctatgacgcacgatatggaatagtggaccatgttcgtatattacttgttt

SEQ ID NO: 37362 - DNA, 5454 bp, Oryza sativa
  Clone ID: PAT_MRT4530_41098C.1
atggagaagagtggccgccggccatctcgctcttgcacgcgctcgccggtaagactagggagctcgcctagctccttcccaccggtcgtcgcccttgtccccgatggctgccgtgtcagggactctccactgtcaactgttgagggtggtgccattggcgggaaggatctgaatgcagaagaggaggaggacgtccagacttctcaaagcgacatctccacaggcaatggtcatcggccggttcgggagcgtaggcccaacccaagagtgttaggccctgaatgggtggcgcgtaggcggcggcggctcgatcctgtcggatctgagaggaaataccacatagttgccacaatttcgcatatatctgagttgttcttgagagtccctaacaatctggtatcagagccattcgcgctgcaaaatcctcttggtttagccgtaaaatttccgggagagaggtgggatcctgctaccttggtggcgtgtgatccacaaaagcttcggctccctcaatctgagaatgaaaggaagagagaggaagcggaggtccgaaccagggcggagtacctggatctgaagaagtcggtggaatctcgtattccggcggtggagaagagggtagaagatctgggcgcctcgctgcagtcgctgagtaccaaggtcgagcacctcgagggcagtctgatgcgtcacaccaagttggagccagatgctagtactgccaagactgggggatctggaattatcaaggaagagcagaaccaacccaacacagatctgacttccccttctttcggtatgaatgaaaatttttctctatcccgtgctccttttggatttgaacctagaacaccttctcttgacagtggaattgctagttacaatttgagtagcactattcctcccatgacatgcccccagttttgtggtgacaacccacagatgtggaaggttaattgcgaacaatattttgatgtgtttggtatccagcaaattcattgggttaaaattgctactctcaatttttgtggtaatgccgcattttggttgcaatctgtccgaaatcagcttggtggtattacttgggtgggtctctgtgatttagtgtgttccagattctctaaggatagacaacaagctcttattagacaatggttccatatcagacaagatggttcagttgctgaatacgttgagaaattcgatagtctaatgcatcagctccttgcttatgataattctctattgccagtctattttgtcactaaatttgtggaagggcttagaagtgatatcagagttgtagtcctagttcagagaccccaggatatggactcagcttgtgctgtggccttacttcaggaagaggccttggagggtgttcagtctactcagtataaaaaacctgacacctcaatacctattcgcaatagtcacaagggtgctggggttcttccatccaccttgccacctaaacaattgttatcaccacaatctgaagataggaggggcactgaatcagcaagagcaagagatgataagctctctgctctaaaggcttacagacgatccaagggactctgttttacttgtggtgaaaggtggagtagagaccataagtgtagtactgctgtgcaattacatgtggtccaagaattgctagatgccttgcaagatgttaaaactgttgaggtgtctgatggggaacagtttctgcactgtgaggacaccagtgatttaatggctatctctcagcaggctatctggggtacagaatctcctaactcattcagattaagaggatgggtccagggtactgaattacttatgcttgtggactctggtagtacccattcctttatggaggaaagtattggtctcaaattggctggagttaaacccttgagaagcaagttatctgttaagttggctgatggcgaaactctttcttgctcatatgaagttaccaattgtaggtggtggatgcagggacataactttattaacaatttcaggctcctgaaccttggtggttatgatatcattctgggcatggattggctggaacaattcagtccaatgcaggttaactgggtggacaaatggatggatatcactatttctggacagcctgtcaggttgcaaggtattgtatcccaggtttctcattgctctcctatttccacagaacaatgtctgggtatggtcagacaaggatctctcatgtatttggttcaactcacttcttctgaccctgtgactaaggaacccattcctgctgctgtacagcaacttattgattcatttcaggcagtttttgctgaacccaatggactacctcctaaaagatattgtgatcataccattcctcttgtccctggagcagcccctgttaacttgagaccttacagatttaatccagctctcaaggatgaaattgaacaacagatttcagatatgcttaagtctggggttatccaaccaagtcatagtgccttttcttccccagcccttctagtcaaaaagaaagatggtacttggagattggtgattgattacagaaagctgaatgctatcactgtcaaaggtacttatcctatgcctgttatagatgagttgcttgatgaacttgctcatgctaaatggtttactaagcttgaccttagagctggataccaccaaattcgcatggctcctggtgaagagtataaaacagcttttcagactcatactggccattatgagtataccgttatgtcctttgggcttactggggcacctgccacttttcaaggggcaatgaatgagacattgagtcccgtgcttaggaagtttgcacttgtgttttttgatgatattcttatctatagccctgatttctcatctcacttggaccatattgctcaagttctctcactcctctccaagcatcagtggtatgtcaagttatccaagtgttcttttgcacagaaacaactgacatacttgggtcacactataagtgcagctggagttcatactgaccaaggtaagattcaggaggtagtgaactggaaggtgcccactactgtgaaaaaacttaggggttttctgggtcttgctggttactaccgcaaatttgttaagggatttggagttatcagtaagcctctgactaatctcttgcgaaaaggagttcctttcatttggactcctgaaactgatgctgctttccataaccttaaacaggctttggtttctgctcctgttctggcattacctgactttcaaaaggtgtttacagttgagactgatgcttctgattccggcattggagctgttctctctcaagatggacacccagttgcttatatcagtaaggctttaggtcccagaactaaaggtctttccacttatgaaaaagagtgcatggcagttttactggcagttgatcaatggagatcttatttgcaacttggtgactttattattctcactgatcatcatagtttaatgcatctctcggatcaacgtttgcatacaccatggcagcataaagcttttaccaaactcctgggtctatcttataagatttgttacagaagggggtctcataatggggcagctgatgctttatctaggaaatttcagcatgatgaggaagaattatgccacatttcagcctgtactccaacctggctccaggaagttaccacagggtatgccagtgattcttattccagtcagttgctcactgaattaactgtacagcccaatgcaagaaaacatttctctcttcatgctgggttgcttaaatataaaggaaggatatggattgggaataacagacagctccaattgaaattactaactgaagttcattccaatccaattggggggcattctggtttccctgttacttataggaaactaaagcaactttttgcttggcccagtatgaaaaaaatgactaaactatttgtgcagcagtgccagatatgtttacaggctaaacctgatagagctaaatatcctggtctccttcagcctttacctgttcctgagggtgcttggcaggtggtctctttggattttattgaagacggccaaacagaaagggttaatcaatgtctggagatctatctgaggtgctttgttcattcagctcctagcaagtgggcagcttggttacatcttgcagaatattggtataatacctcatatcactctgctgtccagtctactccctttgaagtgctctatggtcattccccttgtcattttggcatcagtttacaagattgtgccattcctgatttacatgtttggttaaaggaaaggcagttgatgcagaagcttgttcaacagcatcttcacagagcacagcagcagatgaagcattttgctgataagaaaaggagttttcgtacttttgctattggagactgggtgtacctcaaattacagccctatgttcaaacttctgtggctgtcagagctaatcacaaattggctttcaaatattttgggccatttcaaattacagcacagattggaactgttgcttataaattgcagttacctcccaccagttctatacacccagtttttcatgtgtctcaattgaaatctgctactggctttacaggacatgttcagtctcatctgccatcgtctatctctgccttgcaagttccttggcgcattctggacaggcggcttgctaagaagggtaattctactatctctcaagttttggtgcagtggtctgagtcccctccagaagatgccacttgggaagactatgaagaattgcatgctcgatttcctgctgcattggcttgggggcaagccaattctcaaggggtggggcttgtcagggactctccactgtcaactgttgagggtggtgccattggcgggaaggatctgaatgcagaagaggaggaggacgtccagacttctcaaagcgacatctccacaggcaatggtcatcggccggttcgggagcgtaggcccaacccaagagtgttaggccctgaatgggtggcagctgacaacgacaagttgctgcgcccactcgccgtacatggcgcgcgccatgggcacgccgacgacgagcgagttggtcagcgtggacagcgagaagctggtgatggaccagcgacggcgcagccgcctttgctcatgaaccgtgcccagacgccgatgacggcgatgggttcgtctggactagattcagatcccttgggatccaccaagagaggcttgagctcggcagaggcggcgagggggtcgggtgaggcgcgggcagcacgaagtcgagcggcgaggtcgggctacgaggaggcagcggcgaggtgctcctgccgctcgtggagctcgtcgcgggcggcgaggaggcggtcggagaggcctggggacgaggagagcggcgcgagcgccaaagcgagagaggaaaggggagagagatga

SEQ ID NO: 37363 - DNA, 529 bp, Oryza sativa
  unsure (1)..(529): unsure at all n locations
  Clone ID: PAT_MRT4530_41099C.1
gggagatgagtgcgtcttcgtccaccttccgccccccaccggcggctgctcactccgacggccgccgtccaggaaaagcccagctgctgccccctcgtcctcctgggcagatgtcgtcagggccccgcgcgcgggcccgcctaccttgtcgcagcgggacattgaagctggctggtgcgtggtgaagcgtcggagtaaaagctcttctgccggtccaaccaccgccatttctccgcctgcgagcgctcgtccgattccccgatggctccagggcagatgcttctgctgtctcggtctggggcaccttaaagcagcctgcaaggaaccccggcgctgctaccggtgttggtaccccggccatctggagagagactgcaaagagggttcgncctcccccaagcgagcggctncgggcactgcggcggcggnaacccttgcgaaagcggctncggnccagattgcgacggcgaagaagggaggcgcggnccccgncctgactncggcgcgtctggcggngaagaaggggggc

SEQ ID NO: 37364 - DNA, 414 bp, Oryza sativa
  Clone ID: PAT_MRT4530_4109C.1
atggacgacatgtatgccattcgaggcgaggcgatcgaccgatcaaaactgcggccgcgaccggacgtcgacgacgacgctgcaggtcgccggcgccgccgacttgttgaagaactcgacgcagtcggcgatggcctcgtcgtagtgcgggttcagcgggtgcaggttcgagctgcacgaccgcttcggcgcgtcgccgccgccgcctccacggtggtggtggtggtggttgtcgtcgacggaggaggaggagaaggtgaccgtcggcggccgcggcgggaaggagaagaggccgacgagcatcttccggaatccgtccatgatcctggacggccacctcatcttggccttgctgtgatgagaatgcgatgctttcctcctaaagctctttgcttgaagcctagacatgaatga

SEQ ID NO: 37365 - DNA, 1356 bp, Oryza sativa
  Clone ID: PAT_MRT4530_410C.1
ccggccgggatcccatccactcctcgatctcctcgtacgcctataaaatatacggcttcttgctctcttggcaatgcaagccaactgaacgaactcaagaacagattcaaacaattgtagctgattcctctctgcttctcgttgttcttggttggttgttgttgtagaagaagaagaagaagaagatgtcgacggtgactcgtgcctacttggatcagaagctcgcactcgccaagcgctgctccagagaggcgacgctcgccggagccaaggctgcggcggtggcgacggtggcatccgccgtcccaacgttggcgagcgtgaggatgctgccatgggcgaaggccaacatcaacccgacgggtcaggcgctgatcatctgcacggcggctgggatggcatacttcgtcgccgccgacaagaagatcctctcgctggcgaggaagcactcgttcgagggcgcaccggagcacctcaagaacacctccttccagggcaccggccgccctcacccagccttcttcaggccatgaggaacactgaactttcacagtgactgatggaagcctggataaactgctactgctgctgagttcatgcgtaatggttctataagttgtgatgtaattagttttgttgttgttgatgatgatgaaaatgaaaatgaaatcaatgagaactagtactttgtttttttaaaaaaaaaaaaaaaaaaaaaaaagagagtagggagacgagaggaggaagaagaggcgggcagcgaggagggaggagatcggcggcgagcggcgagaggggaggagaaggtaggttgcgatggcgtccgggtggggcatcaacgggaacaaggggcggtgctacgacttctggctggacttcagcgagtgtatgagccgctgccgccagcccaccgactgcggcctcctccgggaggactacctcgagtgcctccaccactccaaggagttccagcgcaggaacagaatctacaaggaggagcaacgtaagttaagagctgctattcgtcgtagggaggaggcggcaaaggagaaggctgagggagctcctgctgtttcagctcagcattagccactccgataaaattcatgtgtgctttttgtttgctgtcaaaactttgttctactgtgatgctaagagcaaggcaataattccccaccttcatgttggactacacaaactcttttcccctctcactccatgactttgatctgtatcaaggcgttgcataaaccatcatggtgatgaagttttcgtgcctgttttggataattttgcgataatgatggttggttcgatcatcatattttgcacgtttaaaaaaaaaaaaaaaaaaaa

SEQ ID NO: 37366 - DNA, 1125 bp, Oryza sativa
  Clone ID: PAT_MRT4530_41100C.1
atggatacctcgtcccgttcgcttaaacccttcgccgcctcgtccatcgacggcggcgtggcgtcgacgaagccggcggcggcgccggtggtggcgaggtttggcatgctgacgcggttccacgcggggtacttccggatcagcctggcgctgtcggggcaggcgctgctgtggcggacgctgagcgacgcgtcgacggacccgcgggcgctgggccccgtggtgcggtcgctgccgtcggcggcgttcgtcctcctctggtcgctggcgctgctcaccctggtggcgctgtgcgcgctctacgccgcgcggtgcctcctccggttccccgccgtgcgcgccgagttcaggcaccacgttgccatgaactacctcttcgcgccgtggatctcctggctgctgctgctgcaggcggcgccgccgctgctcctccgccccgacgcgcgcccctaccgcgcgctctggtgggcgttctcgctgcccatcctggcgctcgacgtcaaggtgtacgggcagtggttcacccgggggaggaagttcctgtccatggtggccaacccggccagccacatcacggtgatcgggaacctggtgacggcgagggcggcggcgaggatggggtggcacgagggcgccgtcgccatgttcgccgtgggcgccgcgcactacctcgtgctgttcgtcacgctgtaccagcggttcctcggctccgactcgctgccggcgatgctccgcccggtgttcttcctcttcttcgccgcgcccagcatggcgtcgctcgcctgggacgccatctcggcctccttcgacacctgctgcaagatgctcttcttcctctccctcttcctcttcgcctccctggtgtcgcggccgacactgtttaagagggcgatgcggcggttcagtgtggcgtggtgggcgtactcattcccgctaacggttctggcgctggcggcggcggagtacgcgcaggaggtgagggaggtggcggcgagcgtgctcatgctcgcgctcgccatcctctccgtagccgtcacgctcgctctcatggtattcaccgtgctccgcaccaacgacctactcccccacgacgaccccttctcctgcccccctctcgcccgctag

SEQ ID NO: 37367 - DNA, 561 bp, Oryza sativa
  unsure (1)..(561): unsure at all n locations
  Clone ID: PAT_MRT4530_41101C.1
acgcaccaaggtggcaggatcccacctctctcccggaaattttacggctaaaccaagaggattttgcagcgcgaatggctctgataccagattgttagggactctcaagaacaactcagatatatgcgaaattgtggcaactatgtggtatttcctctcagatccgacaggatcgagccgccgccgcctacgcctccagttgccaattcatcgttcatacaagtgttcatcgtttgatttaatacatccctctccctcacgtgacagctcacaggcgagctgggtgtcttacgccacccattcagggcctaacactcttgggttgggcctacgctcccgaaccggccgatgaccattgcctgtggagatgtcgctttgagaagtctggacgtcctcctcctcttctgcattcagatccttcccgccaatggcaccaccctnaacagttgacagtggagagtccctgacaagccccaccccttgagaattggcttgcccccaagccaatgcagcaggaaatcgagcatgcaattcttcatagtcttcccaagtggcatcttc

SEQ ID NO: 37368 - DNA, 1182 bp, Oryza sativa
  Clone ID: PAT_MRT4530_41102C.1
atgcatgcatcgatcttaattaaagaaatgaaaggtaacatcgaaagagaatttacgtgtgtctatgcccacgtgaaatacatagatgttaaatctgaaagttacttgttgggcccaaaagggaggtcgttatggcatcgccaacacgatcatggagtctttgagcatggccctagagcctttggcctgccacatcgttgtggcagaaactgtggctcggaggccctggaaatgggcatcaacactcgaggagactttctggagtctcccagccaaacaaaaggaataagttcatcaaaggcctctccgaccgcctcctcgccgcccgccacgagctcaaaagcggcaggagcacctcgccgctgcctcctcgtagccgacctcgccgctcgacttcgtgctgcccgcgccttacccgaccccctcgtcgccgctgccgagctcaagcctctcttggtggatcccgagggatctggatctagtcaggacgaacccgtcgccgtcatcggcgtctgggcacggttcatgagtaaaggcggctgcgccgtccgtcgctgctccatcaccagcttctcgctgtccacgctgaccaactcgctcgtcgtcggcgtgcgccatccactagctagccgcatgcacgaagctaactgccacacaaaaataatgctaacagttgtccagctctccgtcttccaggccatcgtctgtttcacgctgcacgctgctgctgttcgtgctcgaggtcaggaaggccgccatcggaatgtacgtcgacggcgcctcatcctccgacgagcaaaggacgtcgaggccagcgctggcgccgccgcatccacggtcatcgttgtcactgcggtgagcggcgccggcaagccgtcgctgtggggtgctggtgaaagtggtggcgccgctccctcctctcctgccggcggtcatcagggagaagggcagcggatggcggccatcggggacaagggcgacgaccggtgggaaggagctaggcgagctctctggtctaccggcgagcgcgtgcaagagcgagatggccggcggccactcttcgccatttccgccgccgccgtcgtcgcaagagagataaaaggaggggagatggggagagagaggaagcagaagaggatggggagacatgtggggccaacgtgggccccaccattcttttat

SEQ ID NO: 37369 - DNA, 528 bp, Oryza sativa
  Clone ID: PAT_MRT4530_41103C.1
atggaaactcctggaccggagccgaaggcggcgacgacggtggaggtttccgatgaggaggaagtgaaggcgatcgctgcagatgcgggatccgtcaccggggaggggaagcgtctcgacgcggcggcggcggcgacggcctccactgcaggtggagacggcggcgaggaggagaagcctcctgtcatggtgcagatgcctctgaacaccatcgccgccatcctctcactgaagagggagccgaggccgatgcccgaggacctggcgcgtctctcgccggaagagcgcgacgagcgcctggcgttcttcgattcatgggaggaggtcaacgacgagttcgaggagttccagaaggagatcctccgcgaggtgaaggagactggccgctacatggtccaccagagctacttcacggagcaggcggagatgcaggctcgtatggagaaagaatgggccgagatcgactggaccggcgtcaaattcggcgactgggactacgacgaccccacttgctgtcaaccactgtga

SEQ ID NO: 37370 - DNA, 231 bp, Oryza sativa
  Clone ID: PAT_MRT4530_41104C.1
agtatactgtttgtgttaaacaattttgtggggctaactgtcccaaacaagaactgtcaggaatttccgttaccaatttcattcctattgattaacgtatcacccctagttgcaccaataatgatgcaacttgcagttaagggcattgcaaaacctgagtgactttttacttctcttctaacatcatttgtacaaaaatttaaggcttacaaaccagggtgcaagtgaaaa

SEQ ID NO: 37371 - DNA, 275 bp, Oryza sativa
  Clone ID: PAT_MRT4530_41105C.1
cttataggcaaaaacaaatctgtttagacagtcccttgtggctccgatggaaactagatcaacgcgtcattgggttaagagaagttctgattgaagttcaatatgaatctttggggacttatcgtgagatttatgcccactatctagtagtgggaaatagaaaaaaggaaatccgggttgattgaattcgatattattgtggaataagcacatattattccaattaggactataatatctataacggatttcatagtgcgtttgcacatatttat

SEQ ID NO: 37372 - DNA, 363 bp, Oryza sativa
  Clone ID: PAT_MRT4530_41106C.1
atggtggctgatggttgccagtggcagcttgtggaggcggggaaggtaacaggtggcggagaagagaccgggggtgggtgtggacatggtgtcgacgacttgaaatgggcgacggcgactgcgagaggaggcacggacggccatgggcggctagctggggaggcgtggcagaagactgcatttggccggcgcggcagcgacgggaggagtgatcggaggccagctcggcgtgtagaggcgcgaccagtggcagcggaggccggcacggcgcgaggaggcgcggccggcgggggaggccggcttggctcgatgaggcacggccgacgttcatcttcctttgtttgccgaactgccggtgtctag

SEQ ID NO: 37373 - DNA, 1170 bp, Oryza sativa
  Clone ID: PAT_MRT4530_41107C.1
atggggcccacatgtcagtcctcttcctcctccctctctcccttctctctctttctctccatctctccccttcttcccattcggccggtgggcgagagggcagcgagagcgagcggccagcccagctcaacctcggtgggtaggcgacggcgcaccgctggggtccaccgacgatcgcaacggcgcacggacgaggggagcggcggcggccattggggcgcagtggaaccagagcggcggcggccatcggagcttcttgggcgccgccagcaccgagttggcggcggtcaagcagtggagcgacgcggcgcacatgagcaggacgaccctcggccttctccagcggcctcctcatcaccccccgtgccagtcgcttcgtcactaacgacgaccccgcgagccgtcagagaccacgccggtaaccgcgaggacggggatgacgagcggcggcaagtcgccgctgccgttcccctcgtcctcccactaccgcgagccaccgccgtcctagccgccgattgcctcccccgatccggttccgatgccgttagccgccctcttgcccgtcggccgaaggggaagaaggggaaagaaagagagagaagggagatagagaggaggaagaggactgacatgtgggccccacatgcgccacgtggcgccacgtcagcgaaactacctcccaaaaccggtgagggagtcaaattgcaccggttttgcaagtttggggggtcgagatttctggcggttgagggatacaatttagattcggtggccgacttatatgggccgcccggtgaagaaaaagcggaggaattagggattgtgatcagagtccacattggatcccttttaatgcttgggtctaacatccccaaaaggcagtcaagttctcattaccagtacctcatcatcgtcttaatctcactacccgtaccctaccacctcatccgatcccatctgctctcttcgcctgcatttcctctcaccatctaccgtcctactgctctgttattactcctgctaaacaccaccacgtcttactgtcctctttacctggagtactcctccttaatgattcttgagtcttcggcaaattctgctgcttatcgttggcttcatcaatgtggatggatgttaatagtagtaatacgtatcatcctttttggctgt

SEQ ID NO: 37374 - DNA, 945 bp, Oryza sativa
  Clone ID: PAT_MRT4530_41108C.1
atggcccgcgagctgctccccgacgagctccgcgccgcggcgcggctcgggtgggggagcagggagcgccgcacgctcgtggtgcggagccacgccggcggcggcggcggcggcggcggaggtggaggtggagaatacgaggacagcaacctcctgttcgacgccgcgcggacgtacctggcgtcgcggctcgacccgcgcgacgtgcgctgcctggggctcacggtgtccaaggccccgggaggaaggcgacggcggccgcgacgggtggagggcgcgcctgttcatcgagcccggcgactccaccaccgacgtgttcgacggcgtcgagttcacgtggcagtccgttcctctcgccgccgccacgggcggcgcggagaagaaggccaagggcggcgaccgcgagttcctgctggagctcagcttcgacgccgacgccgagcacacggccacggccatggacaggtacgtgccgttcgtgatggagacggcgagggagacgcagcggaattccacagcaagcacggatcagcaccaagcatcaaccacgatcattttcttgatcgatgcaaggtcacgctgtccgggctgctcaacctcatcgacgggctgtggtcggcgaccagcgacgagcgcgtcatcgtgttcaccaccaactacaaggagcgcctgctccggccggggaggatggacatgcacgtctacatgggctactgcggctgggaggcgttcaagacgctcgcccacaactacttcctcgtcgacgaccacccgctgttcccggagatacggcagctgctcgccggcgtggaggcgacgccggccgaggtgtcggagatgctgcttcgctgcgaggacgccggcgtcgcgctccggggcctcgccgagctcctcaaggagaagaagaagcaggaggcgaggcgcgacgggcagcagcagcagtaa

SEQ ID NO: 37375 - DNA, 130 bp, Oryza sativa
  unsure (1)..(130): unsure at all n locations
  Clone ID: PAT_MRT4530_41109C.1
aatgacatcttttgttgatggtactgtttgttttcnttagccttgcaaacatctcaaggtgtttatcttggtcctcaataacaggaccagggnaattcaattgtggcatgcgttttcaagaaaaaaaaaa

SEQ ID NO: 37376 - DNA, 357 bp, Oryza sativa
  Clone ID: PAT_MRT4530_4110C.1
atgaccttcggccagttctctccgctcaccgggaccgtttcccgccccggcgtcgcctcctccggcttcgccgcaccgtcgccgtcgccgtccaccccctcgtcgagctcgtcgaccgccgaagcgccgccgtccccgtggacccgagccgcgccgccgccttcctccgcttcggccgcctttttcgtcgtcgccgtagacctaggctccgccgtgcctatggccgccgccggcgaccataggggcgcaggcgcgccgcctcccgccgaccgcgccgacgtggctgccttcgggcgcgccgagcggctgccgcgtggggcccagccgtcagccgcccgcgcccttaggtgcggctga

SEQ ID NO: 37377 - DNA, 575 bp, Oryza sativa
  Clone ID: PAT_MRT4530_41110C.1
catccgcacatggccgatttatttcctgggttcgatctcaacgaacctgcggcagagcacggcaacggatttgatttgaacttaccactaagatgaatatggtgcatttgattttgatttcgtacaaaacatcgctgtgttttttttcctcttactagaaccaaaccatcgaaagaaagaaatgacagaagaagtcagaaaacaagtgtatcaagtattgctggctaaaagcaagaatgggacactaggcaatacagatacaagaattgttgctaatcaatttggattgcacattcggtcagtccaattgtggttgcaagtagaaagaagggtagatgtggccataaggcaatccctcttgatttgaaacaattgcgcaacattcctctcaagtaaagaatgaccatagaagatgtgtctagtaaacttggtataaacaaagctaggatacaaaggtatttgaaaaaaggtttgcttaggcgtcactctagtccagtgcgacctcgactgagtccagatccacctaaaaaagggcgaaaaaagaccgggcgaaaaaaaaaaaccaaaattgtccg

SEQ ID NO: 37378 - DNA, 1450 bp, Oryza sativa
  unsure (1)..(1450): unsure at all n locations
  Clone ID: PAT_MRT4530_41111C.1
atgttggtccctagcgtcctgtgtttgaagaggaataatcgcggaaaggggcttttttgtgatatgtggaagaagaggggcttttccgcaaaacagcatccactaacgcataccccccaaagccctagctgccgcctctccctctcccgcccccctcccgcgccgccgccgcctgcgcctaccctcgcgccgccgccgcctccgcctccccctccccctcgcnccgtccacgtcgccgagcgccgccgccgcctccactcccgccgcctgcgcctaccctcgcgccgccgcctccgccccccctccccctcgccccgtccacgtcgccgagcgccgcgccgccccctcacgcgccgcctccgcctccccctccccctcgccccgtccacgtcgccgagcgccgcctccgccccctcgcgccgccgcctccactcctgctgccgccgcagagcgccgccgccgctctccttgtcccgcgccgccaccgagtgcctgccatctcaccctctccctcttcttctcccgccgccgccgccgctgccgccgtcaccgagtgcagccgtctccacctccgccaccgccatcgccgtcgccgagcgccaccgctgccgctccttgctatccctttctcaccccgcctgcctccgtcgagtctcgtcgctgcgggaggatcccgccagtgcggccagtgtcaggtgcactcaccaccactcgtcgttcgagggcgggacggagagctcgagcatgcctgttggccgctgtagtaggctccgccgatgtgccctttgtccggcgcagtgttactgctcggcgttcgaggcgaacacggagagctcgaggatggcctccgtcagagcactgatgtgcttattgtcgcggtcaggtccgtgcgatacgttcgttactgttgtgctgctgttccctttaccatcagctcctgttcaggttgcggaccacatcttctgtgcccgcaaaaaaccttgccgtattgctcctgtctcttgcaacaagtttgacagtgattatgccaagtttttgagagagacttcaaaggataggtgtgattatggccctcctgagtatcgctgccgtttgtgcgctgctcagttctggtaccaggaacggtgcaagaaagattctgctattaccaagcgccgtcatatacgtcagtacaattcgctgtttactttcacttcgatgggtgcagatattgacgatagtttaaaccagggtggtggtccttatgtctttaaaataaatggccaggtctatcaccgtataggttcgctcttgcctaatgaagataatccaccaaaatttgctcagctgtatatttatgatactcaaaatgaggtccaaaacagaatgcttgctgttcttggtgaagagaatggtagctgtgatctagatcctgagatagctgctgaattgctagacatgctagacaatt

SEQ ID NO: 37379 - DNA, 375 bp, Oryza sativa
  unsure (1)..(375): unsure at all n locations
  Clone ID: PAT_MRT4530_41112C.1
caccatttcctttgcattgccttttggtgcccgttcgctgttcttcttgtcgtctgttctagcccattctccgctgttgtgctttcttcgtttgatcatggaccctggggggtgaacgcgtgtgctggtgcttattgtcgcggtcaggtccgtgcgatacgttcgttactgttgtgctgctgttccctttaccatcagctcctgttcaggttgcggaccacatcttctgtgcccgtacatgtcggctaagatggctnntcgattgctgtgtgacatatccncagcaagcagaggctggaagatccgtgcaaagatagcaagaatgtgggactacactggtacagctgacgatctgcctnctatacatgtngatct

SEQ ID NO: 37380 - DNA, 5609 bp, Oryza sativa
  Clone ID: PAT_MRT4530_41113C.1
atggcgaggcatgggtgggcgacggcgatgcaccggggctacggcatccaccctcggcgcggctccccttccctcccttctagatgtggccaaagagggaggggagggcggtggtggctgcggttccactacctcccagatccggccggagggaagggggagggcggcggcggcggttcccctccctccccaggtctggccagaagaaggggggagggcggcggcggttccccttcctcccaggcacgtgtctttgagtgtgtccgtggcagcttgggcggtgcatccgtgggtgcctgctcacaccactcaagatgctctgattgggccattgtggtgtatgccagtcgagtctcgtcgctgcgggagggtcccaccagtgcggccagtgtcaggtgcactcaccaccactcgtcgttcgagggcgggacagagaactcgagcatgcctagtcaatggcagccggtcatcggggctgcgaggtgcttattgtcgcggtcaggttgcggaccgcatctcctgtgcccgtacatgtcggctaagattttatatcttttcctgggtggaaagattaaatcgtctgttgcttgtttagcatcttcctctaattcagctgccagcgaatatgtttgggagactgttgctccaccccatcaggagacttcaaaggataggtgcgattatggccctcctgagtatcgctgccgtatgtgcgctgctcagttctggtaccaggaacagtgcaagaaagattctgctattaccaagcgccgtgtctgttacaacctttgttgcaaaggcgggaaaatttttgtccctccatttgcgcagccaccagaacctttgaattcacttcttaaatttgatggagatgctcgaagtaaacattttttgcaacacatacgtcagtacaattcgctgttttctttcacttcgatgggtgcagatattgacgatagtttaaaccagggtggtggtccttatgtctttaaaataaatggccaggtctatcaccgtataggttcgctcttgcctaatgaagataatccaccaaaatttgctcagctgtatatttatgatactcaaaatgaggtccaaaacagaatgcttgctgttcttggtgaagagaatggtagctgtgatctagatcctgagatagctgctgaattgctagacatgctagacaattgtaatcctttggttaagcagtttaggctcacgagagatcggctggctgaacacggtgatgaacaagtagcaattaagattagcattcctggtccactccatcatgtatctagcttgcatcctgcttacatggccttacaatacccactgttattcccatatggtgaacgtggttttcagcttggtataaatttgaggggggttgatttaaatcgcactgatatacgtactaaggcttccatgcaagaacattattgttactgttgccactatcgtcgagaccagttcaacccatatttatgttgcggtcgtttgtcctcccaaagtcaagttgatggttttgtgtgttttgaggagggtagattgacatttatagatgaacaccagggcgattttagatgcgaacacgttcaaggcattgcagatgcagtcgccaaaggttgtttagacggtaatagtgttggtaagcgacgaattctccctgcaagtttcactggcgggagaagatatatgtaccaaaattatcaggatgcggctgctatttgtcgtgtgtatggtgcccctgatgtgtttaccacttttacttgtaatccgaaatggcctgagattgaagaagcattgcgcattgagccagggcagcgttcgacagattgttctgacattgtttgtagagtttttaaaatgaaacttgatgagatggtttctgatattatggctggtgttccatttggtcgtcgtgatgcaccaagcactgacgccacaccatttgttgtggatacatacatcagcgctgaacttcctgatcctaatgaaaatgagcttgattacttacttgttgaggaatttatgatgcatggtccttgtggtgatgccaatagaaagtgtgcttgcatgaaaaatggggtttgttctaaaaagtatccaaaagattttgcttccgagacaactgtagatgataaaggtttcattgtttatagacggcgtgacaatggtagatttgcatataaaaacaatgtgaaacttgataatcgttcagttgttccgtacaatatagcgctgctgcgtaagtttgaggctcatatcaatgttgagtggtgcaacaaatctaaaatgatcaaatatctttttaaatatgtcacaaaagggtctgatcatgccaacataaagtttaccaaaagcgaagcatattttatgaggatgttgatcatgtacgtaaaaggcactagaagttatgaggatattagaacatatgacggcgttgtttatgatacgtttaaggaggcttgtgctgctagagggttgcttgttgatgatagagaatggtcgtatgcatttgatgaggctgatagttgggcatccagcggccagcttagatcgctttttgtgttgatgattgtcattgtgcaagccttaaataactcttcgtactctgttcctgatgctcagcttagaaatatggttttacaagaattgcatacattgtttgttcgcaacggtgtttctatgtcttcttttaatttgccaagcatcaattgtgatagctcctttcaatcagcaaatagattgattgacgatgaaatgtcttatgatatagataatttatgtgtgaatgctccattgctatatgaccagcttaacgttgatcaacgaaatgcatatgatcgtattgtgcaaagcgtcatgacgaaatcacctgctttttactttgtttctggctatggcggcactgggaaaacgtttctgtggaattgtattgttacctaccttagatctcaaaaaaaaattgttcttgctgttgcatcatcgggagttgctccattacttttgcccggcggtagaactgctcattcccggtttaaaattccaatagaggttgatgaatcaactatttgccatataaagcgagttgttgtgcttggtggggactttcgtcagattttacctgttgtggaagggggtattagatcaaaaacaattgatgctgcaatatcaaggtcccctctctggtcacatgtgtctattttagagctatcgataaatatgcgtttgcgttcaagctctctaagccctgaggtacaacatgaaatcgctgactttagtgattggattctttgtatcggcgatggtacaacagctgcaagtgctcgtgatactgacactgaaccaacatgggttgatatcccacacgatctcttagtcatggataatgatgataagattggagctattatatctgcagtctatactgattttgctgaacattatagtgatcctatatatctacaagatcgtgctattgtttcacctacaaatgatatatgtggcactattaattctcgtgtactagagcttgtccctgacgagatgaaagaatacctaaactttgattcccttgcaaaaacaaatgagaaatgtgatgatttagatgttttgtatccaatcgaatttttgaactcaattaaagttaacaattatcctgatcatcaattgtgcttaaaaaaaggtgtgcccataatgcttttgagaaatctagatcagagtgctggcctttgcaatggaacgagaatgattgttacaaatctaggtgaccgagtaatagaggcgcgtatcataactggttccaatattggtcagactgtttatatcccaagaataactctatctgcaaacaataagaaatggccttttacattacagcgccgtcagtttcctgttcgtgtgtgctatgctatgactataaataaaagtcaaggacagagtctatgttcagttggcatttacttgaaaagcccaatattttcccatggtcagctatacgttgctctttctcgtgtcacttcccgtgcaggcttgaaaatggctttcgatttgctgtgtgacatatccctagcaagcagaggctggaagatccgtgcaaggatagcaagaatgtgggactacactggtacagctaacgatgtgcctcctatgcatgttgatctggtgcttgttgatgagaagggaaatgcaatgtatgctgaaattccaggcgttgaggctgataagttcagaccacttcttcaggaatcgaaagtctacacttttagcaagttccttgttttgcctagcaaacctgcatacaagcccttccctaacaagtatatgatcaagcttactccatggacaaacgtggaacaggtcaatgaagttcctgctgatttcccatcccatgtgtttaatttggttcaattctcagatctaagccagcgcgttgggatgcaagagtacttcactgatgtgatcggtatgatcattggggtatcaaagctagcctatgtccgaatggcgtctaaaacgtcagacacacctaagagggtcattgctctaagggatcttgcgaactgtgaggttaaacttgtcctatggggagagcatgctctcgactttgatgctgatgctgttcatagtgttggccaagataatgttgtcgttggtatctttgttggtactcttatgaaagcatataataaaactcttagtggaggatcagcctgcaaatggtatttaaatgaggacataccagagataaaccagttctttgatagcctgggtgatagtgctccaaagatccagtggatatcagccggagcaaagtcctttggttcgtcacaacgcccagcacagttggagcataaatctgttgctgaccttaaaaagattgatccatgggaagctgcgaaatttacctttgctgtctctgtcactgagcggagccttatgcataggaatatatcttttcaagttaatggaattgagactttctttggaagacagggttctattccgcagcctagggaacagggtccatctgcaggcccttctactcctttggctcttgttgcttctggtatgaataaggatgacgcctctcaatctcatgagttaaccccggtcaattcatctacttcgactgctgatccagtcgatgaacttcctggtgacagcaagaagcggaaatccattgtccgtcatcctctagcagcacagaaaaaattgacctttgaaacagctccatccagcaaagaaaacaccagcccggttgaccctcctgctagttcttctcgcactgatgaccaagctgctgataagcaacatgctgtgcctcatgaggttgatgtttctcagattgcagctgcctctgctgaaccaaatactcaggtcaaagatatcctgccaactgaagccaaaaagaaaagtgttgatccaggctctacaggcacacgcaagactaagcctcctgtaccgaaagggaactaagggctccagagaatcagattcatgtaagattggcactagctagcatccatggagaaaattctctacgtgctcttgagaattttgccgatccttatatgtccatgaatttttatctaatgtattat

SEQ ID NO: 37381 - DNA, 330 bp, Oryza sativa
  unsure (1)..(330): unsure at all n locations
  Clone ID: PAT_MRT4530_41114C.1
gaaaaggcctggcncgattgggggccaaaaaaaaaaaaaacccattctttcctgaaaanttctctgcttttttggtctttctttttttttccctccctggcagtgtgcacgaattggcgctgtgtttgttctatcttttcgcaaaaaaagtttttctttttctctttggtcataaggattctttattggtgtgtatagattagtcacaattttagtgttagtaggtgaggattagggacgacagtgtatttattgatgttttcttcatgcgttcagacactgcaaagatgagattttttaaaaaaaaaaaaaaaaaaaaaaaaaaaaaaa

SEQ ID NO: 37382 - DNA, 5409 bp, Oryza sativa
  Clone ID: PAT_MRT4530_41115C.1
atgtggttcatttgtatttttgagtctttccttaagtgcatctctgtgcttattgtcgcggtcaggtccgtgcgatacgttcgttactgttgtgctgctgttccctttaccatcagctcctgttcaggttgcggaccacatcttctgtgcccgtacatgtcggctaagattttatatcttttcctgggtggaaagattaaatcgtctgttgcttgtttagcatcttcctctaattcagctgccagcgaatatgtttgggagactgttgctccaccccgtcaggagacttcaaaggataggtgtgattatggccctcctgagtatcgctgccgtttgtgcgctgctcagttctggtaccaggaacggtgcaagaaagattctgctattaccaagcgccgtgtctgttacaacctttgttgcaaaggtgggaaaatttttgtccctccatttgcgcagccaccagaacctttgaattcacttcttaaatttgatggagatgctcgaagtaaacattttttgcagcatatacgtcagtacaattcgctgtttactttcacttcgatgggtgcagatattgacgatagtttaaaccagggtggtggtccttatgtctttaaaataaatggccaggtctatcaccgtataggttcgctcttgcctaatgaagataatccaccaaaatttgctcagctgtatatttatgatactcaaaatgaggtccaaaacagaatgcttgctgttcttggtgaagagaatggtagctgtgatctagatcctgagatagctgctgaattgctagacatgctagacaattgtaatcctttggttaagcagtttaggctcgcgagagatcggctggctgaacacggtgatgaacaattagcaattaagattgtaggaggaagggcctgttcaagcattcctggtccactccatcatgtatctagcttgcatcctgcttacatggccttacaatacccactgttattcccatatggtgaacgtggttttcagcttggtataaatttgaggggggttgatttaaatcgcactgatatacgtactaaggcttccatgcaagaacattattgttactgttgccactatcgtcgagaccagttcaacccatatttatgttgcggtcgtttgtcctcccaaagtcaagttgatggttttgcgtgtgttgacgagggtagattgacatttatagatgaacaccagggcgattttagatgcgaacacgttcaaggcattgcagatgcagtcgccaaaggttgtttagacggtaatagtgttggtaagcgacgaattctccctgcaagcttcactggcgggagaagatatatgtaccaaaattatcaggatgcggttgctatttgtcgtgtgtatggcgcccctgatgtgtttaccacttttacttgtaatccgaaatggcctgagattgaagaagcattgcgctttgagccagggcagcgttcgacagatcgttctgacattgtttgtagagtttttaaaatgaaacttgatgagatggtttctgatattatggctggtgttccatttggtcgttactttatagcgtggaatttcagaagaggggccttccccacgtgcatatactggtggcgtgatgcaccaagcacagacgccacaccatctgttgtggatacatacatcagcgctgaacttcctgatcctaatgaaaatgagcttgattacttacttgttgaagaatttatgatgcatggtccttgtggtgatgccaatagaaagtgtgcttgcatgaaaaatggggtttgttctaaaaaatatccaaaagattttgcttccgagacaactgtagatgataagggtttcattgtttatagacggcgtgacaatggtagatttgcatataaaaacaatgtgaaacttgataatcgttcagttgttccgtacaatatagcgctgctgcgtaagtttgaggctcatataaatgttgagtggtgcaacaaatctaaaatgatcaaatatctttttaaatatgtcacaaaagggtctgatcatgccaacataaagtttaccaaagtgagaaaaaggaagttagggcgtgttgcagttgacgatagtggtacaccaagctctagcaaaaagatgcgtggtgctgatttcactgttaagccgccaagggatgagatggctgagtttattgcgtgtcgatatttatgtgataagcaatctatgtggagattatatgcatatgatattcattttagaaacccttctgttgaacgcgaaggatattttatgaggatgttgctcatgtacgtaaaaggcgctagaagttatgaggatattagaacatatgacggcgttgtttatgatacgtttaaggaggcttgtgctgctagagggttgcttggtgatgatagagaatggtcgtatgcatttgatgaggctgatagttgggcatccggcggccagcttagatcgctttttgtgttgatgattgttcattgtggtattgctgatgagagtgcgttttttgagaagcattggcatgcgatggttgatgatattctgtttaatctgcagcaagccttaaataactcttcgtactctgttcctgatactcaacttagaaatatggttctacaagaattgcatacattgtttgttcgcaacggtgtttctatgtcttcttttaatttgccaagcatcaattgtgatagctcctttcaatcagcaaatagattgattgacgatgaaatgtcttatgatatagatgatttatatgtgaatgctccattgctatatgaccagcttaatgttgatcaacgaaatgcatatgatcgtattgtgcaaagcgtcatgacggaatcacctgctttttactttgtttctggctatggcggcactgggaaaacaactgctcattcccggtttaaaattccaatagaggttgatgaatcaactatttgccatataaagcgaggtacaatgctagctgatcttattaagtccacttcacttattatatgggatgaagctctgatgactcaccgtcgatgttttgaggccttagataggacattgcgtgatatctttgctgaggatgatccttctgctgcatcattaccctttggtggtatggttgttgtgcttggtggggactttcgtcagattttacctgttgtggaagggggtgttagatcaaaaacaattgatgctgcaatatcaaggtcccctctctggtcacatgtgtctattttagagctatcgatcaatatgcgtttgcgttctagctctctaagccctgaggtacaacatgaaatcgctgactttagtgattggattctttctatcggcgatggtacaacagctgcaagtgctcgtgatactgacactgaaccaacttgggttgatatcccacacgatctcttagtcatggataatgatgataaaattggagctattatatccgcagtctatactgattttgctgaacattatagtgatcctatatatctacaagatcgtgctattgtttcacctacaaatgatatatgtggcactattaattctcgtgtactagagcttgtccctgacgagatgaaagaatacctaagctttgattcccttgcaaaaacaaatgagaaatgtgatgatttagatgttttgtatccaatcgaatttttgaactcaattaaagttaacaattatcctgatcatcaattgtgcttaaaaaaaggtgaccgagtaatagaggcgcgtatcataactggttccaatattggtcagactatttatatcccaagaataactctatctgcaaacaataagaaatggccttttacattacagcgccgtcagtttcctgttcgtgtgtgctatgctatgactataaataaaagtcaaggacagagtctacgttcagttggcatttacttgaaaagcccagtattttcccatggtcagctatacgttgctctttctcgtgtcacttcccgtgcaggcttgaaaatggctttcgatttgctgtgtgacatatccccagcaagcagaggctggaagatccgtgcaaagatagcaagaatgtgggactacactggtacagctgacgatctgcctcctatacatgttgatctggtgcttattgatgagaagggaaatgcaatgtatgctgaaattccaggcgttgaggctgataagttcagaccacttcttcaggaatcgaaagtctacacttttagcaagttccttattttgcctagcaaacctgcatacaagcccttccctaacaagtatatgatcaagcttactccatggacaaacgtggaacaggtcaatgaagttcctgctgatttcccatcccatgtgtttaatttggttcaattctcatatctaagcctgcgcgttgggatgcaagagtacttcactgatgtgatcggtatgatcattggggtatcaaagctagcctatgtccgaatggcgtctaaaacgtcagacacacctaagagggtcattgctctaagggatcttgcgaactgtgaggttaaacttgtcctatggggagagcatgctcccgactttgatgctgatgctgttcatagtgttggccaagataatgctgtcgttggtatctttgttgatactcttatgaaagcatataataatgaagaaactcttagtggaggatcagcctgcaaatggtatttaaatgaggacataccagagataaaccagttctttgatagcctgggtgatagtgctccaaagatccagtggatatcaaccggagcagagtcctttggttcgtcacaacgcccagcacggttggagcataaatctgttgctgaccttaaaaagattgatccatgggaagctgcgggcagatcagacaatattcctaaagaaattgctgctgttgtttcacagaaatttacctttgctgtctctgtcactgagcggagccttatgcacaggaatatatcttttcaagttaatggaatcgagactttctttggaagacagggcccttctactcctttggctcttgctgcttctggtatggataaggatgacgcctctcaatctcatgagtcaaccccggtcgattcatctacttcgactgctgatccagtcgatgaacttcctggtgacagcaagaagcggaaatccattgtccgtcatcctctagcagcacagaaaaaattgacctttgaaacagctccatccagcaaagaaaacaccagcccggttgaccctcctactagttcttctcgcactgatgaccaagctgctgataagcaacatgttgtgcctcatgaggtcaaagatatcctaccaactgaagccaaaaagaaaagtgttgatccaggctctacaggcacacgcaagactaagcctcctgtaccgaaagggaactaa

SEQ ID NO: 37383 - DNA, 1216 bp, Oryza sativa
  Clone ID: PAT_MRT4530_41116C.1
gaacctcgcatccatccatggccaccaccgccctctgatccgatcgatactgatcagccagtagctatgctgggttcggaccagctcgagcaccgcccggcgccgtcggctccccgcgccgagccggacgatgtcgccgacgacgtggaggtggaggcgttccgggacatccacccggagccgtcgcctccgcatctaccgccgccgccgctcaggcagccgtcgtgggacgccgcgagccaccgctcgctgtcgtcctccggcgcgggcggcggcggcgacgtcgagctgttcgccaccatgagccgcgagttcaccgccatggtggcggccgggtcgtcgtccgcgcccagccccgacgttcccggcgacgcccccgccgccgccgacctgaacctgctgcagctggcgcgcatcggcgagaacgagccggcggccgaggcgaacgcgctcgccatcgtgccggcggcggcgggcagcggcccgccggcgccggtggagcaggtgaagaaggaggaggtggaggcgaaggtggcggcgtggcaggcggaggaggtggccaagatcaacaacaagttcaagcgcgaggaggtcgtcatcaatggctgggagagccagcaagtcgacaaggccaccgcctggctcgccaagatcgagaggaagctggaggaggagcgggcgaaggcgacggagaaggctcgcaacgaggcggcggcggcgcggcggaaggcggaggagcggcgggcgtcggcggaggcgcggcgcgggaggaagacggcagaggtgctcgaccgtgccaacttctgcaaggccgccggcagggtgccatccaagcgctccttcttctccttctaaagttctaaccaaagctagctagccttgctcaattatatcatctctagctagctaattatgattattacttgttttctacttaattgatcaatcaatttccaccatccatccttcttcctttgccatactggccttgatcaagtagctctattgcttctatataatccatgatatatgttgtatatatatgtgttacttaattctgtagaaatgtgtgcttagttttgtattgtaaacattcagagttcagaggagtgttcgcaaagtagtgatttgtactgaccttatagaacataatgctaatgcttaattacttaaaaaaaaaaaaataaaaaactcgagactagttctctctctctcc

SEQ ID NO: 37384 - DNA, 161 bp, Oryza sativa
  Clone ID: PAT_MRT4530_41117C.1
gtataaatggagccaggcgggcagcctgtttgtgcccttgagcaaatgcatttcatttatacaagtggaaggcacttaaatcagccaccacatgaacacacacatgttccatcatcgatcgaactacacatgcatgacccggtcatgcacttacaaacaaa

SEQ ID NO: 37385 - DNA, 2861 bp, Oryza sativa
  Clone ID: PAT_MRT4530_41118C.1
atggcgaggcatgggtgggcgacggcgatgcaccggggctacggcatccaccctcggcgcggctccccttccctcccttctagatgtggccaaagagggaggggagggcggtggtggctgcggttccactacctcccagatccggccggagggaagggggagggcggcggcggcggttcccctccctccccaggtctggccagaagaaggggggagggcggcggcggttccccttcctcccaggcacgtgtctttgagtgtgtccgtggcagcttgggcggtgcatccgtgggtgcctgctcacaccactcaagatgctctgattgggccattgtggtgtatgccagtcgagtctcgtcgctgcgggagggtcccaccagtgcggccagtgtcaggtgcactcaccaccactcgtcgttcgagggcgggacagagaactcgagcatgcctagtcaatggcagccggtcatcggggctgcgaggtgcttattgtcgcggtcaggttgcggaccgcatctcctgtgcccgtacatgtcggctaagattttatatcttttcctgggtggaaagattaaatcgtctgttgcttgtttagcatcttcctctaattcagctgccagcgaatatgtttgggagactgttgctccaccccatcaggagacttcaaaggataggtgcgattatggccctcctgagtatcgctgccgtatgtgcgctgctcagttctggtaccaggaacagtgcaagaaagattctgctattaccaagcgccgtgtctgttacaacctttgttgcaaaggcgggaaaatttttgtccctccatttgcgcagccaccagaacctttgaattcacttcttaaatttgatggagatgctcgaagtaaacattttttgcaacacatacgtcagtacaattcgctgttttctttcacttcgatgggtgcagatattgacgatagtttaaaccagggtggtggtccttatgtctttaaaataaatggccaggtctatcaccgtataggttcgctcttgcctaatgaagataatccaccaaaatttgctcagctgtatatttatgatactcaaaatgaggtccaaaacagaatgcttgctgttcttggtgaagagaatggtagctgtgatctagatcctgagatagctgctgaattgctagacatgctagacaattgtaatcctttggttaagcagtttaggctcacgagagatcggctggctgaacacggtgatgaacaattagcaattaagattagcattcctggtccactccatcatgtatctagcttgcatcctgcttacatggccttacaatacccactgttattcccatatggtgaacgtggttttcagcttggtataaatttgaggggggttgatttaaatcgcactgatatacgtactaaggcttccatgcaagaacattattgttactgttgccactatcgtcgagaccagttcaacccatatttatgttgcggtcgtttgtcctcccaaagtcaagttgatggttttgtgtgttttgaggagggtagattgacatttatagatgaacaccagggcgattttagatgcgaacacgttcaaggcattgcagatgcagtcgccaaaggttgtttagacggtaatagtgttggtaagcgacgaattctccctgcaagtttcactggcgggagaagatatatgtaccaaaattatcaggatgcggctgctatttgtcgtgtgtatggtgcccctgatgtgtttaccacttttacttgtaatccgaaatggcctgagattgaagaagcattgcgcattgagccagggcagcgttcgacagattgttctgacattgtttgtagagtttttaaaatgaaacttgatgagatggtttctgatattatggctggtgttccatttggtcgtcgtgatgcaccaagcactgacgccacaccatttgttgtggatacatacatcagcgctgaacttcctgatcctaatgaaaatgagcttgattacttacttgttgaggaatttatgatgcatggtccttgtggtgatgccaatagaaagtgtgcttgcatgaaaaatggggtttgttctaaaaagtatccaaaagattttgcttccgagacaactgtagatgataaaggtttcattgtttatagacggcgtgacaatggtagatttgcatataaaaacaatgtgaaacttgataatcgttcagttgttccgtacaatatagcgctgctgcgtaagtttgaggctcatatcaatgttgagtggtgcaacaaatctaaaatgatcaaatatctttttaaatatgtcacaaaagggtctgatcatgccaacataaagtttaccaaagtgagaaaaaggaagttagggcgtgttgcagttgacgatagtggtacaccaagctctagcaaaaagatgcgtggtgctgatttcactgttaagccgccaagggatgagatagctgagtttattgcgtgtcgatatttatgtgataagcaatctatgtggagattatatgcatatgatattcattttagaaacccttctgttgaacgtttagcatgccatttaccgaacatgaacgtggtctcttttagattagacacaaatttagcatctatggtttcaaatacatttttacaaaaaacaacattgactgagtggtttgtcgctaatgatctgttcccgcaaggccgtcacctaacatactgcaaatatcctacgatgtttacttgggaagatgatttaaaaagttggaaaataaggcagcacggctataagattggtaggatgtattacatccatccttctgcggccgaagcatattttatgaggatgttgatcat

SEQ ID NO: 37386 - DNA, 722 bp, Oryza sativa
  Clone ID: PAT_MRT4530_41119C.1
acactttcaacctagatttgaaaactttcaagtcaaatttaaaaactttcaattcaaaatttgaaaactttcaagtcaaatttgaaaactttcaagtcaaagttaaaaattttcaattctatatttgtaaagaggtatgcgaaagattagaaaaaaaataggaagaaaaaaaaacacatcggaaaaaaattacaaaaaaaagaaaaaagaaacgacaactggtggttctacggcatgctcacgttggccatggcggaggcgctggtgctctgcaccgtcttcaaggatgaggtacgattgccgtggtgggcgctcctctgcgccatggccgtggccttcttcttcacgctccccatcggtgtcatctttggacactaattagatgggactaaaaatttttagtccgtatcacataagatgtttgtgggatccaaataccaccttagctgtaaatttggaaatttggagatactggagcatgaaccaggccgtctccttcatcacagacttcaaacttggccactacataaaggcccctccaagatccatgtttctattccaggttatttcaagtactatgaataagacggtgaacatgtcagtggcgtggtggctgttgtcgacagtgctgcacatctgcgaatcccaatccctcccggacgggagtccgtggacgtgcccgggctccagcgtgttcttcgacgcgtcgctgatttggggcc

SEQ ID NO: 37387 - DNA, 6275 bp, Oryza sativa
  Clone ID: PAT_MRT4530_4111C.1
tacatagaatttacgtagttggtcaatgttccaagaatttgctaattcacgaccgtcgccgtctgcgattttgaatgcgcttggccgcaagacttgtgtgatcgtgtaagttccttcccatttaggtgagagtttgtttcgccctgcttggctttgaactcatcggaggacatagtcgccgatcgaaagtatgcgtgcacggatgcgcttctcgtgataacagcggagggtctgttgatagctggctgctcagacggcaactcgttcccgatgctcctcgagaagatttacatcgatatctcgctgctcctcctggttctcgtcggagtacttctgtactcgtgtactctgatgttgtagctcgcctgggagcatggcctcagagccgtacacgaggaagaagggtgtttccttattagacgttgtcggtgtggtgcgtacggcccatagtatggttttcatcccttgtagtactatgccgtttgccctctcgatttgtccgttgctttgagggtgagagaccgaggcgaagcatactttgacccccagcccgatatagtagtcctggaaatcagcgctgatgaactgggagccgttatcagttatgatgcggtgtggtagtccgtatctgcaaaatatccctttgatgaatttgatggcgttgtcggccttgatttcccccgtgggtactgcttcgatccatttggtgaatttatcgatcgccacgaataggaatctgtagccgccctgtcctcatgggaatggcccaagtatatctagcccctagcacgagaatggccaagtcagagggatagtctggagcgcttgcgcaggtagctttgtgtgtttacatgtcacatgcatctttaagggcggttggccagaaaaagccttgtcgaaaagctttgccgaccaatgttcgaccggtggcgtgtgacccacatatgccttcatgtatgtcgaggaggaggtgtctgtcatcgtcggtcgagacgcatttgagaagtaccccgtttagcgctttcttgtatagatcgttgctgaccatagagtagatctttgctttacgggttattttctcggcttctgtatcgtcctcgggcaactcctcgctgctgatgaatttgattagtgggacgcgccagtcgtctgtggtttcgatgtcggcaacggcgcgttctgcctcggtgacctccgagctaatgtcgggggtgttcgggctgacttcgccgctaacctctttcaccgatggcttcatcaagatatcgagaaaagtgccgggctcgagcgattttcgtctggatgcacgtcgtgctaggtcgtctggctcgatgttgtccttactgtagacgtgtcggacctcgatcccatcgaactttttctctagcttcctgacttctgtgagatacttagataactcggaattagagcatttataatctttgtgtacctggttcgcgactagttcagagtcccctttgacgattagtcgcttggccccaagtgtggttgcagctcgtatcccggcgagtagtccttcgtattctgcagtgttattggtcgccctgaagttgaggtggattgcgtgcttgaattgatcttcggagggagacgtcaagataaatcctgccctagttccttggctgttgagtgcctcatcgaacgccattgtccatgtttcattgtcgccttggttgtctgatttgttatctggcatagtccaattggcaacgaagtcagcgagtacctgggacttgatggctgttcgtggcacaaagtggacatcaaactggctcagctcgattacccatctcgcaatgcggccgacaacgtctttgtttctcacaacttcaccgagaggggaagaggagacaactatgactctgtgggcttgaaaatagtggcgtagcttccttgatgtcatgatgattgcgtaaagcagcttttggatctgtgggtatcttgtctttgcgtcgtggagagcttcgctgacgtaataaactggtcgctgtactttctctctctcgacaacaatgacagtgctaacggagtgtggcgtggcggcaatatagaggaataattcttcattagtttggggagcaacaagtacaggggggtttgataggtagcgcttgagtgcaatgaatgcctcttcggcttcccgtgtccatacaaatttgtcttgtttcttcaacagagcgaagaaaggttgtcctcgttctcccatcctagcgacgaatctgcttagtgctgccatgcatccggttagcttttgtacctccttgagtcttgtaagcgacttcatattgtcgattgccttgatcttctcagggtttgcttctatccctctgccagagacaaggaatccgagcagcttgcccgacggtactccgaacgtgcacttctcaggattgagcatgaggcgatatcgtcggaggttgtcgaacatttcctgcagatcgtcaatcaatgagtcgcctgtcttggttttgacaacgatgtcgtcgacgtaagcctcgacattgttgccaaactggttgctaagtgcgccctggaccgtgcgctggaaagtattcccagctgttatcagtccgaatggcattttaacatagcaaaataccccgaaaggcgtgatgaatgttgtcttctcttcgtcctcttttgccatgctgatttggtggtagccagagtaagcgtcgaggaagctcaataattcgcaaccggctgttgaatccaccaattggtctattcgaggaagtggaaagtgatccttggggcacgccttgttgaggtcggtgaagtcgacacacattctccattttccgttggccttccgtaccatgactggattggctagccactctggatgaagtacttctctgatgaagccagctttgagaagtttgtcgagctcttctcgtatggcttgttttcggtctggtgcaaatctccgcagtctttgctttattggcttggcatcaggtcgcaccatgagtttgtgctcaatcacctccctagggacccccggcatgtcggatggctgccaagcgaacacatcggcattgtcgcggaggaaggtgatgagcgtgagttcggtcttatcggggttggcactagagagtggaacaatcttgatgacgccatctggtttcggcgtcttgtttgtcttggtcactttcttgggtggctcagtcgtggcgtgtgggctgggcgtttgctcgaccatgtcgaggctccgcttgtcgcattccactgctagctttgcgttcccctgaatagtgattgttcccttcggtcccggcatcttaagcacttgatatgcgtagtgagatgcagccatgaacttcgcaagtgcagttctcccaatgatggcgttgtaagctgtatcgaattcagcaacatcaaaggtgatctgttctgttcggaagttgttggcttggccgaaagtcacgggcaacgtaatcttgcccaaaggtctggacgatgattggggagtaattccatggaagggttgattagttggtgtcaactcgttttgcggaattcccctcgcgtccaaagtgctggcgaaaagaagattgattaagctgccatcgtcaatgagaactcgcgctaccttgatgttccgaatagcgggttcgaccacgatcggatatcgtcgttgtggaactgccgaagatgtgtgagacgtggaggtcggagtctggatacgctgagtccggttcgtgaggagccgtctcttcgttcgtctcgacaacgcgtactcgcttgcctttttcaaatgccatgtgcttctcgagcgactttttgaaaacaaggcaatcttccagagaatgtctgtccgtcttgtgtatggagcaccatgatttctttatgtcgctgctttgtgggtctgggcgtttgggagggttcgcgtattctactgcgaggacttccgcttgagctttccttttccgtttttgcgatttttcttcttgcttgactcagatgtgtccgtggctggtttcttctctcccccggtctttggcctatcgttcttgcgtcttagcgcatcatcagcgtgggcgcatcgctcaacgatcttgaataatctccgagtggttgtgatgcatcttgtcgccaactcctgggtagtgtagcgatctctgacaccggatttgaaggcgtgaattacagaagcattgatttcaggaattgtgtttctgcactcgttaaaacgtcgaacgtattccctcaatgattcacccaagttctgtgtcaacgcgtgtaggtcgtcttcgatcgtgtggcgcttgtatgttccttggaaattggcgatgaattgttgccacaggtctgcccacgaagagattgagtagggaggaagatgcatcagccatgaacgtgtagaacccttcaacgcggttggtaaatagtttgctaacgcattgtcgtctgctccggcagcatagagtactgtggagtagacttgaaggaactcctttgggtcggtgctcccatcatatttttctattgctccgggtcggaatctctcaggccatcggacatcacgtagggaacgaccgaaagccctacacccagcgttgggggcagtgggttgccggcggtcgtgtgtccttcgtggatgtctgtctgacgatgaggaggacgcggatgatgacgatgacgataggtcgcttggttccggtgtacgattacgaggatgacggcctggatcccgggaatcctgtcgtcgtcttccgctgttgtctcggcgccgatctccatcgtcgtcgtcgatacggcggcgaccatgaccagtattgtctggcacccgtcgttcgcgatcgttgtgatcgtggtggttgtcgtggtcccggtcctcgtttgagcgatctcctcgatttccgttatcatggcgccgtgaagagacatgactccgagagcgattcacgttgtctcgtgtgcgtcgtgcttcccggcggccgttgatttgatctcgaagatcgccagtgccgcgaggtagaggggtagcttgttgaggtgattccctccgttcgggtgttacaccattggcctctccagttggtggctgctcctggtgtgctgcggtagcagcttctttaaatgcgttgctgaggttagtcaccgattcccgtagtcgttctgtccaacgctcaaggtcaaggttcagaacgggatcgtaaggagtttccctcagtatcgcttgaacggccctgatgtgctggactggagtagtcgattggttccccgcttctgtgttggcgtgcgctgacgtgccaacgtcatcgatagccaatacctcccgcggcgcgctcgttgtcgatgacccatagtcctcaaggagatgtaagaccgatggttcgtgagggtcgatatcgattaccccaatgaatcgatctgaagttggagtcgctccttgttccttgccgttatccctgatggggatatatgacttaggagactgagctttcatggcgccgagaaagactttgcagctcaagaggtcgtgattctttgtcttgtaaataggacaatagacatcccgagttggagaagtacgctgaattccacgttctttgcaggcccgaattttagcacggacgttgaggaaaacccagcaatcttgcagggtgtgtttcttggttttgtggataagacaccaagaccttgtggcttcggaagtcatctttgtcagctcgtggttcatgtcggaaggacaaggtttggccgtatcaaaatccttcttgagcttggatgtcgtcgatattccgttctccgtctcgacggggggatttttcgacatggaatcgccctggttcgtagccactacgttctcgtctccggtcattggaggaccggttgagatcggcgtcgtggtgtaaaccgggaagacgatttcgccgacttgagtccataccagcattgttgaagcagggagtacttggctgaggctggtgctgacgttgttgtcgacgaagctggatgacatagtagtagaaccttgagtaccaaggcctctacctggcgcgccactgtcaacgggtgatacccgtagaccggatatagagggtattggggtacgttggtacaaggatacattaacgacccaatcttatccgagtaggattcttcccatccatagactctgtgaaggatttccttacagtacgcgggaaacatctgtatgcgtgtaggtataccaaaccgatatgtgacgtatatcgaagggtaaagggtatgtctaacccgtaaccgtgacattgtcggtgcca

SEQ ID NO: 37388 - DNA, 1114 bp, Oryza sativa
  Clone ID: PAT_MRT4530_41120C.1
atgacccggaagcccaagcggaagcctccgccctcgccggagccgtaccacgaccacccctccccttcccccgcccaatgcctcgccgtccgcgacgccctcctcgccttccacggcttccccgacgagttcgcgcccttccgccgccgccgccgccgcctcggcctcgacacatccccggacccggaggaggacacggatggcgatccgtctccgccgcccaccgtcctcgacggcctcgtcacgaccctcctctctcagaacaccaccgacgccatctcgcgccgcgccttcgccgccctcaaggccgcgttccccacctgggaccaggtggtggatgaggaggaggggaagaggctggaggacgccatccggtgcggggggcttgcggcgacgaaggcggcgaggataagggcgatgctgaggggcgtccgggagaggcgaggcaagatttgcctcgagtatttgcgggatctgtccgtggatgaggtgaagactgagctatctcggttcaaagggatcgggccaaagactgtggcgtgtgtgctgatgttctatcttcagaaggatgattttccagtagatactcatgtactccgtattacaaacgctattggttgggttcctgcaacagctagcagagagagggcatatcttcatctgaacagcaaaattcctgatgatctaaaatttgatctgaattgtctatttgtaactcatggaaagctctgtcaatcatgttccaaaaagttaggaggccagaaaaccaccggttcaaattctatgtgccccctagcaagttattgttgcactgaagaaaagatgaagcaataggccaatagccaaggaattgtttgtggttattgatattttctgaaggtggtgtcataacctcccaacaatgctaatggtaaaaggatttatgcgctgaaatgtctcatctgatggaaacctcaggttcggtttcttgttttatcagtagagactagagagcttccaggcttcagttgtatgatatgaactcatttctaccatgtaagtgacactagctagggaatttagtttggaactttggatgagaagcaaaacactgggggaatatcgacttaatcgg

SEQ ID NO: 37389 - DNA, 514 bp, Oryza sativa
  Clone ID: PAT_MRT4530_41121C.1
atcccaaaaaatgacaaaatggattttttcccacaaaagtgacaaagtggatcccggaaaggattgatttgggaaaaaacctgcaataacaatcttcctagtttatttcccactttttaatcctttggataaaaaaattttggtttataacaaggaaattacctccttttgaaatgataaaaccaaccccttacttttgggaaaacaaaatctaaaacctcaaattaaaggaccaacttggaggagggcattttgcatgtgccccttttcatccaaggaacaaaaaaagttaacttaaaaaaaaggggaaaaaaaatcttttccttctttacaaaaatgactagtttaccctggactgatcaatcaaagctcgacaatcgggtccattttcctcgtaaatactcttccagggaagtgttcccaacgataaaatctttgctgctgacaaaggcaaaatcgtcttccacctccaatgcaaaattgatgtaggactggatgttgcggtttttctctg

SEQ ID NO: 37390 - DNA, 300 bp, Oryza sativa
  Clone ID: PAT_MRT4530_41122C.1
atgagcgcgcgcgagctccgccaaacacggccgcgtgtgccaggaacgcccggtctcccgctgaacctccatgcgccacaccgccacaccttcgccgagcgcgcccaacacaaggagcaccccgcgctgccgtcgccggcgagcgtgcgcgcgccgcgcgcgagtggtggataccttggctggatgggcgaggagaagtggcgcagattgggagaaacggtgcggtggatttgggaggagaagtgtcaaatttggggagagaagcggcagatctgggaggagaagcgcgtggtgtggtga

SEQ ID NO: 37391 - DNA, 322 bp, Oryza sativa
  unsure (1)..(322): unsure at all n locations
  Clone ID: PAT_MRT4530_41123C.1
gttggtcgtggttggtgaggcgtcgagtcgtcggtgtccaagagattcgttggtgccttctctttgttttcgagtcttttagtttgttggaatcggattcccgtactgaacctgcttttactgcaagttaattgtttggttggttggttgccttcctgtcactccaccttgaccgcgaaggtattactgtactgcagcataaaggtccccaccttgaccaccatcttcaccatctatctatacattttattttcacanantaaaaacaaaaaaaaaaaaaaaaaaaactaaaaaaaaaaaataaaaatcaaaaactcaaaaa

SEQ ID NO: 37392 - DNA, 1425 bp, Oryza sativa
  Clone ID: PAT_MRT4530_41124C.1
acaaggatcaatgagaattactcgaaccttgcaaaagagaatcattcgcaccacatcgatcaacacaagaatcacgcccatcagagtgaatctttcgttgaaagtttaaccacagagtgaaatttgcaagaggaagagacgtgcagatcgatagttaagaaaagagttcgtcgtttcagctcttgttcacaacagccagcatccccaagtacaaacccccattgattttcctacagagatcgagtttaaatcatttcgctatgaacattgtggttggttgattagaaagaggccgaagtagttcgtcgcagctgctgcttcggctccggctggggcacaatctgcattactggttccagcttctgcgtcaagaatgctttcaggaaatcgacgcagctagggaatgttgagaaatcagcaacagccttgtgctccctgaggcgctggttctcctcctccaaccgcgagatcttgttctcgagctcgttcgtgtatgcctgcttccgtgctcgggaccgcgccgccgactcgcggttcttgatcatgcgcttctgcctccgctccaccgtcttctccaccacgccgtccacgccgccgccgcgcttccgccccgccacgcccacctgcgagaggaaccccgcgacgccgtgcccgtccacgcggttatacacgccgtccaccaccgccccggagccgcccacgtactgcagcgtcgtcgtcgtcggcggcggcggcggcgggtagtgcccacgcagccaatgcgcgccggcggcggaggcggcaccgtcgacggcgacgccggcgcgcgagaggaagtcctcgagcgtcatctcgcccatgggcgtcgcgtggtgccggccggtgctggcgccctggatgtcgcgccacacctcgtccaccgtcttcctccccgccgtctccgccgccgccgccgcggcggggagcaccgtgcgcaggaggtcgtccaggttcatgctccgcagcggctcgcccaggtggctctccacctcgttcagcgtcaggctgtacaccgacccctgccgcgacagtgccccttcgccgccaccgccgccgccgccgtggcacgacatgcacgacattgcgtggactcccatccacacacgcacacacactcaccctacccacgtgcgatcagctagctgagcaagcaaagcaggggaaggaagggaccagatgagaagagaatctggagagagaagcaggggaggaagaagaggaggagatggtgatgatgaggaggaggacattaataatctagggttgccacccacaaagagggtttgggcagtgaaagctactgatgtggggggaggagtcctgaaagggaaggggaggaggaagaaagaagaagaggagcaagcaacttgagctgagaaaatgcttcctcgtgccgaattcctgcag

SEQ ID NO: 37393 - DNA, 200 bp, Oryza sativa
  unsure (1)..(200): unsure at all n locations
  Clone ID: PAT_MRT4530_41125C.1
gccacgccgcgcagatccacctctntccgacctggattccgcgganaggagncggtcaagncgtcgccgncgccgacgggccgnatccgataccgtacgtnctgctcgaggactctganantcanaaggtcntgtacnngttncatcnggtggntgtnaacctggttcccaanttcagcaacttntnttgagttccggan

SEQ ID NO: 37394 - DNA, 683 bp, Oryza sativa
  Clone ID: PAT_MRT4530_41127C.1
tgctgcattcgggggttggatgaatccatgggcaagtaagaaggcacatcaggttattttacatatatgatgtcctcctcatctggctcatctgcatcccagtcaccttcttcttcttctgatagatttgcaccttctccatcttcctcttcttcatttccttcttgttgctccctttcctcctttaatttgtccagtatagcaagaatcctgcttccccgctccatggactcatcctcgatgaaccgtatctcaggcgtgaggcgcagcttcatccgcttgcctatttggctcctgacgtacttagtcttagccttgagcccagcaatggccaccttcttccccctctcgtccccaaacacggagacatacaccttgcacacctggaggtcgttggagagctcgacgtcggcgatggtggtgagggaggagaggtactggtcggcgccgagcgcggcctcggggaggacggcgcgctggaggacggggtcgcgggtgagcatgtccgcgagctcccgctggatctgcttcgccaccatccgcacccgccgctccttcgccatgcaccgcaccacgcgcagcgacgacgccgacgagggaggcggccgcgcgggcgccagaggggacgcgacggcgaggcgccgcggcagcggaggggacaccagcggccggcaggtgaacat

SEQ ID NO: 37395 - DNA, 214 bp, Oryza sativa
  Clone ID: PAT_MRT4530_41128C.1
cactgttttcatctcgccattcctccgatccccacgtccgcctatggcgctctccatctccacgccgccgacctcctcctacctcctgccggcctccctccaggtcggcaggcggagctcgtcggcggcgatggcggccaggcctgtggcctttagcctacggaggccggttcttgcggcccgtgcatgctgcgctggcaacctgccgaagagc

SEQ ID NO: 37396 - DNA, 629 bp, Oryza sativa
  unsure (1)..(629): unsure at all n locations
  Clone ID: PAT_MRT4530_41129C.1
cccccccccccccccccgaaattttttatttttgttttatttaatttttcctctcctctcctctctccgaactagtgcagaggagagagatgtgcaacttttttatttttattttatttttttgatattgggcggcgccagcatggctgactgcatcaaangccctggacttggcatagctgcaagatatatgttcacaatggcagttggacgttcgctgcggactgtaacatttcttgctacgattctaccatccgcgaggccttggtgtgctgaagctcgatatcaaatacctgatcatcctcatccttgggcacagaaatactatgctccatatgcctctgatccagatgcgatccgtagggtcatacaagaggatatgccatatggtcagcccattcaactttatagtgagtatagacctaaggggggacatatagccttcttatgaaacctttttgagggccactgtggaaaagggggccctatgggttcttttttttaaaaaggccaagggtggctgcccgtgatctatttataggggccccatccctgttgtttgcctcccccgcttgggcggacccgggaggccatggcgttttgggttcccaaaggggccagcgacccca

SEQ ID NO: 37397 - DNA, 1160 bp, Oryza sativa
  Clone ID: PAT_MRT4530_4112C.1
atgagtagagtgtccactagttggggttttgttggttctagggtgaacaagccgggagagaggagcgcgcggaccgggtccacgggagtggggcccacgtggcagcctcacggtccacggtggaccgggtgcacgcggcttacgccggccggcgccgtgggtcccacgcgtcagccgcacccgagggcgcgggcggctgacggccgggccccacatggcagccgcggggcgcgcccgaaggcggccacgccggcagagccgacgggaggcggcgcgcccgcgccccgatggtcgccgccggcgaccaccggcgcggcggagcggcgcccgagagaagggagggaagggggaagcgaaacggcggtccacggctcaccccgggtcgacggcgacaacggaaacggcgaccgaagcggagagaggcggcggcgcggctcgggtcgacggggacggcggcgttccggcggtcggcgggcgaaacggggggggggggggggggtgacgaggtcgccgaggtcgcggcggagccgaaggaggcgacgccgaaacgggagagggtccggggcgacgacggcggcggaccggagctcggcggcgacggcggagagagagaacgacggcgcgagctcgattccgacggggagagagagcggcgagtggcggaaacggtggagggaggcacggggagcgtttaaatagtgttgggagggggagagaacggacggatgagggggaatcggccgcggaagatccggccgccattgatgcgccggcgaagtttgcgggagtgtttccaaacgaatccgagggagagagagagggaaaagtggggggaaagggagagggaatcacggggagtgatttccccctctttattgcgcgcgggggcggcaggatgcggcggaatccgcggcggcggcggcgctagggcacgggcgaggcggcggttgcggcgcgaggtaggggatgacgggtgggccccacccgtcagcgagggtggcgggcgggcccgcccgtcagcggcgcgcgcgcgggggaaggccggatgggccgcgggggagaggagagagagggagggagctgggccgagccggcccaagagggggaaggggggagggaaaaagactttttagggtttttttctttttataaaacctttt

SEQ ID NO: 37398 - DNA, 439 bp, Oryza sativa
  Clone ID: PAT_MRT4530_41130C.1
gagtacaaagaggccaagaaccaataattcaaacaagagaaaagaaacaaggaattacagggggtgcaatccttcctggccagtgaccaccggctgcaccaccatctacattttacatcctcatcatcagtcactacacaaaaacattacattgcgggttacggatatatatatattacacttgatatttagcattttacttctccaggcatatgccacacccaaaactcctcgctttggcctggacgtctcctaacgaccttctggggtgaacgcattttactttgcctaagttttccaccatccctctcaccgggccttctccttgctgttctttccctttctcacagcattatcctcccttaccggggctatgggtgccaccgactcatcagagacatcatcggtgacattgaggaggggctctaggtctttcacg

SEQ ID NO: 37399 - DNA, 1026 bp, Oryza sativa
  Clone ID: PAT_MRT4530_41132C.1
ttactcaccgcatgtcgccggctgcaggcggccaccggggcagaagcacccgaacgccatggcgccggcgtcgtagcggcactccccgccgctgccgttgcacgccgcgcagtcgcccggcaccgccgcccactcgagcagaaacccgcgcctcacgaaccccgcgtagtctcccgccgatctcagctccgaccatggcagcacgggcaccaccgagtacaggcaacccaccgtgtccaccgcccgcttggggccaccgggatcatacatccggttcagggacatgaaccactcgccgccgccgctgaaaccggtgcagttcaccggaagcgaccccgtcggcggcgtccgcgagcagttcgcggagaagaggagctccgagttggcgcggctgacggcgagcagcgagagcacgaggatgctggacatgttgaaccgggtggcggcgcatgctgagctgtcgaccaggttggcatggaaggccattacggagctgttgccgtagtggatggcgaggacgcggaggtaggagccgttcaggctgggcggcgtcgcggtcgcgccggtggggtcgtcgtcgcaggtgacggcgaaggtagggtggccacagtatgcaggctgccggccgcgcagccagaacgggtacttgatggtcaggccgccgcatgccgccggcgcgcagctctcgccgaccaccggcgcgccggtcccgcgggctgggtgagcgctgcaacgctcccgcatgccggatgtgcgggaccggcgctcccacatgccgccagccatctcggttcccgaattggatccaatctcctcgggacagcctcggtcccgcgccgctgttctgcggcaccgactcgctatcccgtgggctccatcgctcccgcgcaatggcgtcgcggtaccgactcggtcccgcagtccagtagtgcgggaccggctcggtcgcgcatcccggttccgcgtgaccggctcgggttccgctcccgcatcctcagtctgcggttcgtcctcgctcccgcgcat

SEQ ID NO: 37400 - DNA, 1935 bp, Oryza sativa
  Clone ID: PAT_MRT4530_41133C.1
atgtcaccaaacttctctcggcgcgcccggggtgaactccaatctacccgggatcctaactcgccaccaaacctcctcgtcgttcttcttttaccgcggccggacacggagcaggagcacgcacgcacgtacggcgcgcgctcgcctcactgcatttctatcccggccatcggtccggccgtcacgatgcgccgccgcgtcgctctgtgcctcgtgcttttcgccttcgccggcctgcacgcggcggcggtggaggccgtgacgctgtcgacgtcgtcgcggtggatcgtggacgacgaggccggcgggcggcgggtgaagctggcgtgcgtcaactggccgtcgcacctggagccggtggtgacggaggggctcgggatgcagcccgtggacgccatctccaagaaggtggcgtcgctcgggttcaactgcgtcaggctgacgtaccccatcgcgctggccaccaacgcgtcgctgtcgtcgctcaccgtgcggcgctcgctcctcgcccacggcctcgccggcgcggtcgccggcgtcgaggccaacaaccccgggctcctcgacctcacgctgatcgagtcgttcagggccgtggtcgacagcctcggggagagcggcgtcatggtgatcctggacaaccacgtgagccggcccggctggtgctgcgccgacgacgacggcaatggcttcttcggcgaccggcacttcgaccccgacgcctgggtgcgcgggctcggcgccatggccgcgctgttcgccggcgtccccaacgtcgtcggcatgagcctccgcaacgagctgcgtgggccgaggcagaacgccgacgactggtacaggtacatgcagatgggggcggaggcggtgcacgcggcgaacccggcggcgctggtgatcatgggcgggctcgggtacgacaccgacctgtcgttcctcgccgcgaggcccgtggacgtgagcttcgcggcggcggagcgggggaagctggtgttcgagctgcactggtacagcttcgccgacgcgcgcgcctgggagtccgaggacgccaacgaggtgtgcggccgcgtggcgcggggcgtcgcgcggcggggcgggttcctgctcgacgccgggttcccgctcttcctcagcgagttcggcgccgacacacgcggcggctcgcgcaaggacgaccggtacctcccctgcgccgccgccgtcgccgccgagctcgacctcgactgggcgctctgggcgctgcaggggagctacgcgctgcggcagggcgtcgccggggccgacgaggtgtacggcgtcctcgactggtcgtggagcaagccccgcaacgcgaccgcgctctcgaggatccagtcgctgcagcgcccgctccgagggcctggctacgacgaggcgaggccgtacaccgtgctgttccacccgctgacggggcgctgcgtggtgaggcgcgcggcggatgacgcggcggcggcggcggcgacgctggagctgggccggtgcgaggacacggacgcgtgggcctacacgcagccggcgtcgacgctggcgatgcggggcgcggggcggggctcgccgccgctctgcctgagagccgaggggagcggccggccggcgcggctcgccaccagcgacgccggcggctgccgcggcgacgccctgtcgacgtggcgcctcgtgtcgggctcgacgatgcacgtggccgtcaacgcgacgacgacgacgacgccatctcgggacggcggcggcgggctgctgtgcctggacgtcggcgacgacggccggagcgtggtgacgaacccgtgcaggtgcctcgacgacgccgccgccggcgagtgcgacccagagacccagtggttcaagctcgtcaccagcacgaggtccccggccaccggcgccgccgcggcggccaccgtggcgcgagggctaattgctgcgtga

SEQ ID NO: 37401 - DNA, 452 bp, Oryza sativa
  unsure (1)..(452): unsure at all n locations
  Clone ID: PAT_MRT4530_41134C.1
ggaaaaatagctagtcatatataatctcaagtgacataatatgccaaccactatggaatctcaaacgaaaccacaaaaaattcagtttgaaaacttaagcatcgatacaattgactcgagaaaacatagactaatgatgcagctgctaagatagaaatctcgaaatcatgtattgcctgtctagcttttctgcaaaatttccatgccaattcaactaaggttttcattcctctatgtgtgatgcatggtgaacacacatgcgccatgtgccatcaaccttctcgaagacgtttgtggcgacttgcttcccccatgttcttcctttggtcttaaccacttccaagcatgtgacgtaaccaaggtcaccatgcacatgaacctctnacattttcagatcaatgtttagtgggaactcataatctgcgccacataccatcttccagctttgcatg

SEQ ID NO: 37402 - DNA, 243 bp, Oryza sativa
  Clone ID: PAT_MRT4530_41135C.1
ggcacgaggtgtaatgaatgcgatgaagcaaaagaagcggtttcaagaagttctagccgtgacaatttatctgttgatttgaatactgtttctgaacaactaccagacaatttccaacgccatttctcatcatctaactatgattccggagttgatatcgaaaatgcgttgtcagcttcggagttattcagctcatcagcatttggaaggcagcaagcatctagatcatttagaagacattct

SEQ ID NO: 37403 - DNA, 251 bp, Oryza sativa
  unsure (1)..(251): unsure at all n locations
  Clone ID: PAT_MRT4530_41136C.1
cggacgcgtgggtccccccaaaccctcgccggcgncgccgncgncgnctncatgccgttcaccccgggccctactccgggcgtagcaccctcgcctcgtgctagggcgtncgcgctcggcgtcggcgtcgctacggcgccgtaagctctcctcctcaagcgacaaacctacaaaaaggaggcggcaatgcgcatactgaggcaggaacgcgggggaactccacggaggatgcataaatctattgacccctc

SEQ ID NO: 37404 - DNA, 228 bp, Oryza sativa
  Clone ID: PAT_MRT4530_41137C.1
atggctgaacgtggagagcccatgtcgttaatgggtgagagacgaggaggaaatggaggtgtggaggagccatttttgaaggaagcaatggcaatgcgcaagcctgactctgccacaacggtgatgcatggtgccgcccctccgcccaaggtgcccaatggtcatcccgtccgtgcccctccactccgctatacgcacaacatgcggctaggtggcgacccttgttga

SEQ ID NO: 37405 - DNA, 328 bp, Oryza sativa
  Clone ID: PAT_MRT4530_41138C.1
ggaaataatgttttttgttttttttcttgtcatagtgtgaatagcttgtcttggtgggtagaaagaacgactgaacaatagggatatgggagggtcttaaaccgggtcacatagataggaggggaatggctggctacccgaatcacacaagatgggcggttgaatggttatgtaaactgaaggaggaaatgaactacagcaaaaaatgggaagcgaacaaaatccgggggggagaaagctgaggagaccaaccatggaacacaagggaggtgggggaactccatacccgatgacggtgcacaacgaggtatttgtggggggaagttca

SEQ ID NO: 37406 - DNA, 141 bp, Oryza sativa
  Clone ID: PAT_MRT4530_41139C.1
ccgctccccgccatcgtcacctacaggtcagaaccccggccctctcccgctcttgctaccctaccgtacgtcgtgctctctcaggcagctaccgcgcaccgcgcgctggactggtttgatacaggatttgcgtccatttag

SEQ ID NO: 37407 - DNA, 2775 bp, Oryza sativa
  Clone ID: PAT_MRT4530_4113C.1
ggttttttttttttttttttttgaccatcttaattctgcacattaatttcaaatttgtatgcactgtacaaaattcaatccagagaaaaagaggagcaaaaaacaatattttttagatattagtttctcatgcggaaaacggaggaaaaaaaaaaggtgacctaacgaactcgatgcagcattggacttgtgctgcttcaactatcctctcctttctgtagagaactcagatgcctttaaggcaactgacttaccaacttattgtttgctgtagattaacattaacagggagaacaaaaataagaaggcgaccaacagtcttcagtattcgtcatgagccaccaagcatcgatttgagcaacttcttcagcgtgtccacgatgctcgaaaacgacggtcgctgccttggatcatcatcccagcaggattcaacaagagcagctagctcagggactgtctcttgtggaattgggagccttctgttctggaatgcaactgctcctactacttgtgcagggcttaggccattccatggttgctgcattgtcatgagctcccataagatcactccaaagctgtacacgtcgcacttttcgtttgatggctcgccacgaagaaattctggtgccatccattctggtgttccagcaactgatttggaggatatgaaggtattcgccttaaatctggacaagccaaagtcacctaccttcacggaccagttcttgtccaccagcatgtttggcgttttcaaatcccaatgtacaattggaggattcaggcaatggagatagttgatgcctttcgcaacatctaacgccatgcgcaaacgacgccttaaatcgagcatttctccagcagatgccttgttgatgagacggaagaggctccctctgggcagatactctgttactatcgacaaatgtgggcattttgtcactgcacccatgaataacaccacattcggatggcgaacacgcttcatgattgcaatctctctaaggaattctttcagttgagcttcgccgacatcctggtcagtaagcaccttcactgcaacatcagagccgtgccagtcagcacgatacacagttccaaacgaaccggcgcctacgcgttcctttagctcgatctcgtcccatgaaatctcgagccaatcggcgcagaaagacggctcgatgctcagccgtttcagaggcgtagcactggagatgttgtccttatcgccactctcagaactgatctccatcgccttcatctgcttcgacacttcgaacactgccatactgttcttgttgcagttgccgttctgcgtgatctgaccgcattttggcagcatggcttctttggtggctacctgaacagagctcttctcctcggcaacacagtacttagcaactgaatactgaggatttgacagtatcgagttgcgacgatctccagatatcgcgcgattccacgaagcagccggtgttgcatagtttgcagaactcattgtacatgaggtcttgaaaggtgaaggcacggaggagagcaactggccattgatagacgagtctggactgctgagtcttcccggctcaacgacgaggtcgacgacgtactcccttacaaaccttctctcgttgtcgatcttgacgaggcaggacgagcggtgcggcgcggagcagtacttgcagccctgcgcgatccggcagggaaggccgatgaagtcggcgaggctcttgaagaggatggcgcggtggcggcagaagccgatggagaggctgccgatggggacgacgacgcacctgtgccgcttcctcagctgcttgctcaccgccttccaccgcatgaacaggtccccgtcctccgaccgcaacgcgccccccatgtggtcggagacgaggacggcgaggtggcggacgaggtcgagggagacgccggcggcgcggtagaggtcgagggcccggcgctcgaggtcggcgagcgctgggtcgccgcacttgtcgacgagcaccacctccagcaccgacgactcgccgctgtccaccgcccggagcgccaccagcgtcggcagccgccggccgtcctccgccgcagcgttgcacatcgcccacacgtgcgggtccacccccaggatgttgtagaacccgtgcgcgatcttgtccccccacgacaagcacccgttcacccagagccggtaggagacagcggcggcatcggccgcgacgtcggcgtggttctcggcttcgccgccgccgccgcagccgatgaggagctcgggcgggacgccggcgaggaaggcctcggaggttaggcggatggcgagggagagctggaggtagtagccctccctggcgcggcggacccacgtctccctccctcctcctccggcggtcgccgccgtcaggttcgacgccgatcccggcgccgtggcggtggacgccgtcgtggcggtggtggcggtggccgggtcggtggagatgccggtgaacccgctcccggcgctccactccgcggacgccggcgccgccgcggcgtcgccctgcagcagcgcgtagtcggcgagcagcggcagccgcgtgtcgtcgacggcgaggaggtggtggtggaagccggccggagcagcagccggcggcggcggcagtgacggcgccgggttaagcaggcgtcgtcggtgaggcatggccgccggtggagctagcgccgacgcatggagatcaagctcgctcgctagcaccaccaccgctcgtcggaattagggttcggagaagaggaggaggaggtggtgat

SEQ ID NO: 37408 - DNA, 356 bp, Oryza sativa
  Clone ID: PAT_MRT4530_41140C.1
caaaaaaattcttcggaagggttgatccttttttttaaaccacgggtaacaatttacagagcacctattccccttgtccttaatacacaagggcacctttttatttttagcttcggtccaagcccatttaaccttttatttcaaatcctactaaaaatcaacgcaccacctaggcttcctaaaacactactactactacacaaaatttattccttccttccactgattccaaatccaccgccgccgccttggcgggaaagggtaaaaatctatttgtcatcgcccccggccgccgctttggccctgccgccggcctttttgggaaggaccaggttgtgaatgttggccataacccc

SEQ ID NO: 37409 - DNA, 1818 bp, Oryza sativa
  Clone ID: PAT_MRT4530_41141C.1
tttttttttttttttaaccacaagcatcatgtacagttgtatctgatatgtatttaaacaacagtttgtatggatatagtttccaaaaacaaaaggatgtttgtatttatcttttcctgccacatatactgattaactgatgctccaggtgcaatggaggcatacagtttacaactacaaatcaaaacaagagtaccttaatcatacaggtttatttcatatagctttccattttctggtataaaggcccccataggcaggggcttaagcaaagcaaaacatatgtgaaatacacattaacatatcactgtatcttttctgatctttatcttctgtccaaattaccaaaccacttccatggtgtacctttttctctccaagataggcattactcataaactgctaatagctgcttcttctctgccataggcatatacaaagaccaatagcttttgctggaatgtaggtaggtagcttcaagctgctgcacagtccaaagagattatttcatagcccctgctgaatcttgcttgtgccttctgtatacatcttccacactaagtttattgttctcttcgcccgcttggaggattgcacaactgctgaggaccacctggaggcagcgggtgaacgtcgagttcttgttgaggaagatccagcagcacgagaagatggtccagagcctcttgatgatgacccagcataacgagaaccggttaataatgtcattgagttcaccaagcctgtgcctgtcaaagcaggtacaaagctctccacaaacatgccagaagatatgatattttcaccagaaggaatatcaacgtagcaaaccgtcccatccaaaatatcaatatagatgaatctcttttggctccccagaaagagcttgctcttgtacatgaaaaatggcttcgtgcccaaaacagagggatgggcaatattgtgcaagtgaacccagaattgccgggttgagtctgccagccaaatctctgattctgtatatgctgcccctttacaaggcatagaccataaatgaagtttcccttccccctcgactaattccaaatcacggtctcttacactgtctgggacatcaagatatgaaaacttctcatctgtcaagttgaatgagaggatttttcgagtaaagtgagatgattcatcatcaagaagtagccaatgcatttcatcattaacaacaaccggctttgttgtcttcaggagttcttcctcttcagatccacgtaccgtcctccatgacaacgtgccaatagtgcagacttcaaatgtcaagtgctttatccaatggcggagagcgactaccttatactcttttgtagagtgcacatatccaagaaaatattccgaatattgagcctgatatacactttctgaagctggcagcgtcaaatgcttccttgttgttggattcaaaacttcagcagcaccttttaaatcataggcgcacaccatgccgttgcagggttgtgacatgtgaaacctagatgagaacacaggctctgttcttttgaagttcactgtgatgggatcaaacatgtacatctggacaagaccgttatcaactgaggtgaagcaggcaatggcctggcggaagcggagagcacagttgaggtggtgatccacaaaagcaggttctacaatgcagtctctccagaacttgcacacactgcagaacttgagaacagtcctaccgggtaggaaaccaataataatccgctgaatatcttgaggaagagaaacttgggattgcacttcttcattttgcccatcaagaatttcatcattattgtcttccat

SEQ ID NO: 37410 - DNA, 390 bp, Oryza sativa
  Clone ID: PAT_MRT4530_41142C.1
atggccttgcgggcgacgggcaagagcggcagccacggggacgcgggtgagtgcagtggcgcgaacgatggggaagagcggcagctacggtggatgccactggcgaggatgagggagatgcagcgcgcgatggtggcagcggcgtacggcacggaagtagccgaggtggctagcgggcacagagccgcgcaggcgatgacggcggatgctgaggcgggcgggtggcacagactaccggcgggcgtggtaacgcgcaggcgacggcggcgaatgctgaggcgagtaggcgaccggattggaagcggcggcaacggctacagcgagcgggcgcagaagtggctgcggcagccagcgggcgacgacaatgacgaaggggaggttgatccgtaa

SEQ ID NO: 37411 - DNA, 2266 bp, Oryza sativa
  Clone ID: PAT_MRT4530_41143C.1
atggcggccatgtcgtcgcgctgtgcggcttcctcgtcctcatccgcgttcctcagagctccgcttcccggcggcaggcaccaccagggctcttgcggcttcgtcgccgccggcggcggtgctaagacgacggtgagggttgcggcggcgctcgacacggaggccacggcgaaggctggcaagtcgtcctcccgggcgcggcgggcgaggaaggacggcggcgagcccggtggctcctcctccaccgcgctgcttgctcctacccatcccgacggcggcggcggcggcggcgtggcgctcgacgacgtgatcgtgaacccggtggggctggggcggcggtcccggcagatcttcgacgaggtgtggcgcaagttctcgcggctcgggcagatgtcgacggtggcgtcgccggagcaggaggagcaggagggcgtcctcttccgcggcggcggcccgatgtgcgacttcgccgtccccggcgcgcaggacaccaccgtcctcgtcgtcggcgccaccagccgcatcggccgcatcgtcgtccgcaagctcatgctccgtggctacaacgtcaaggctctggtcagaaggaatgatcaagaagtgatcgacatgcttccaagatctgtggacattgtggttggtgatgttggcgatgcttcttcagttcaagctgccgtgtcaggctgcaacaaggtaatctactgcgcaactgcacggtcaacgattaccggtgatctcaacagagttgataaccaaggcgtgaggaatgtcaccaaggccttccaggattactacaatcagttggctcagtcaagggctggtaaaagcagcaagagcaaactgtcgattgccaagttcaaatctgccaaatctcttcaaggatgggaagtgaatcagggatcatactttcaggatatttatccttctagattcgatgaaggcaccgatgcatcgtttgaaatatctgaaaatggacaggctgttttctcagggtttgttttcacaagaggtggatatgttgaagtgtcgaaacggctttcgctcccactaggttccaccctagacagatacgacggcttacttctatccgtgggtggaaatggaagatcatatgttatcatccttgagactggtccactagctgacacctcacagagcaagaaatattttgctcggatgaacactaaagtagggttttgcagggtgagagtgccgttctcagatttcaggccagtgaacccacaggaccctcctcttgacccttttcttgtgcacacattaaccataaggtttgaacccaaaaaacagagacctggtgactcgtctcaaggagctagtgacccaagaaatttccagcttataatggaatttataaaagctctacctactggtcaagaaacagacattgttttggtttcatgcacaggctctggaatcgaacctaacagaagagaacaagtcctcaaagcaaagaaggctggagaggatgcactgaggagatccggcctcggatatacaattgtatgcccaggtcctctgcaggaagaacctggcggtcagcgtgctctgatctttgatcaagggaacagaatctctcagggtatcagctgtgccgacgtagcagatatctgtgtcaaggcattgcacgattcaacagcaagaaacaaaagctttgatgtgtgctatgaacatgtctcaaagcaaggggatgagttgtatgaacttgtggctcatttgcctgacaaggcgaacaattacctggcaccagctctctctgttcttgagaagaacacctgattgatcaaatgatcagtgacccatcaaattttatgtcattctgggtcagattattgtccatgtgtatatgattcatcttgtaaaggttttccttttctcatagaaaccgtgtggagtccacttgtgccatgatgaccgtctccagcacaaaagtgaaggagttgttgacaaaaaaaatccatggtcctactactttcccatctctgtaaaacttgtagaattttcataacaattgggcatgaattagggtgtgtttagttcacactaaaattgaaagtttggttgaaattagaacaatgtgacggaaaagttggaagtttgtgtatgtaggaaagttttaatgtgatgaaaaagttggaagtttgaagaaaaaatttgtaactaaactcggccttaggcccatcctatatagccattttgagaactttgaagaagtaatgagcatgaggaaaaaaaaaaaaaaaaaaaa

SEQ ID NO: 37412 - DNA, 378 bp, Oryza sativa
  Clone ID: PAT_MRT4530_41144C.1
tgtgtgcgtcgcgaacggttataattaggacggtgcaaaacgcgcctccacgctgtggcgcccacgaccccccgcgactccgcggatgattacacaactggccaccaccgtaacgggcaacgcccacaagcgtgcgcctccccctacctccgagggcgagatcggaacaaggcccccacccaaccaccgccgccgccggcacctgaaatcgccggagaccgccgggccacgggaggcgccctgccctcctggccattgaagaggaccttgtctcctgctcgcattaggaggatatcgggaggaggagtagcttctaactgaaaaggggtgctgtttgccaaggccgaccctcccgacgcctgacgcggggactacggc

SEQ ID NO: 37413 - DNA, 1908 bp, Oryza sativa
  Clone ID: PAT_MRT4530_41145C.1
atggcttcctccaaggaagcctaccgcgtcgagctccgagccgccgcccgccagctcggtgagcgcggcctctactccgccgccaaatgggcggccgagctgctcgtcggcatcgaccccgacgcgacgccggccccgtcgtcggcgatggacaccccttcctcgtcgggctccggggggcacctgctgcacctccaccgcagcggcgggtccagcttccgccgccgcctccgcccgggcgcggccggggaggccgggacgccgctcggcggcgtctcgtacgtcagcactcccatccccgacgacgacgacgcgttcgatgtcggggctgatagattggaaacattatattctaatattgagatgaacgggcagtataaggttttaacttatagtagtaacacgattgcccttatgcaacaaggagggctgaggatccaggctggagagaaacggaaagaggaagaaacagtcgagcttgagggatctttgggcaaaagcaatgctgttaatcaggaactagttgcattggagagagagctcgcaacacatcggagaactggtgctattgattcattttgtttgtacttgtatggcattgttctacgtgataaaggcagtgaagctctagctagaacagttctggtggaatctgtcaacagctacccgtggaactggagtgcttggttagaattacaatctctctgcactagcagtgacattttgaacaacttaaatctcaagaatcactggatgaaagatttcttccttgctagtgcacatcttgaactaaaaatgcatgaagaagctttgaaaagatatgagcgcttaatgggggtcttccgttgcagtgactacattcaggctcaaatagctactgtgcagtatagtatgagagatctggatgaagctgacatgatttttgaagaactccttaggactgatccttttcgtgtggattctatggacgtttactcaaatttattgagagctgttgatataaatcccagagattaccgtgcttggtatggtcttggtcagatctatgagatgatgggaatgccgttttatgcagtttattacttccgtaaatcgtcatacctacaacctaatgatgcccggctttggaatgctatggctcagtgctatgaaagcgatcaactccagatgattgaagaagccatcaagtgctatgagagatctgcaaataataatgacactgaaggaatagcacttcatcagctagcaaagttacatggtatgcttggacaatctgaggaggcagcattttactacaagaaggatttagagagaatggaagttgaggaaaggcagggccagaattttgttgaagctctgcttttccttgctaagcactgtaagagcataggcaggtttgaggaggcagagcactattgcacaaggctcttggattacaccggtccagaaagggagactgcaaaaagtattttgcaagggctaaaaagatcacaatcggtacttccgttgatggatatcgaccattttgcaatgaggttcaaacaggtgatccttatcgtttgtatccttgccagaagactccatagtgctggagatgttgactttgtgtgcgtgatgatcgcttccagttgctgaagcttggtaaattagtaacactattcgccggcatgggcaaaaattaagcttcttcgggatattaaggttcgctagctcaagtatcggcattgctgcttgctttctgctaggttctgtttctatggcttttcttcactagattgctttggtctgtgttgcactcaaagttccatggagttgcttgcatatataagcttcttggaagacttgccttgtctggattccagttctcatattcttgcttgttaaaataattgttgatgctttcctttc

SEQ ID NO: 37414 - DNA, 2221 bp, Oryza sativa
  Clone ID: PAT_MRT4530_41146C.1
gcgcggcgcctagggcggcggccgcccctcccgccgcgccgcgcccgccctgcccggccagaccggccgcatggcttcctccaacgaaagctaccgcgtcgagctccgagccgccgcccgccagctcggcgagcgcggcctctactccgccgccaaatgggcggccgagctgctcgtcggaatcgagcccgacgcgacgccggccccgtcgtcggtgatggacaccccttcctcgtcgggctccgccgcatccgggggccgcctcctgcacctccaccgcagcggcgggtccagcttccgccgccgcctccgcccgggcgcggccgaggccgggacgccgctcggcggcgtctcgtacgtcagcacgcccatccccgacgacgacgcgttcgacgtggggggtgataggtacctgctcgccaagacctacttcgactgccgcgagtaccgccgcgccgcgcacgtcctgcgcggccagaccggccgcaaggccgtgttccttcggtgctatgccctgtacacggctggagagaaacggaaagaggaagaaacagtcgagcttgagggatctctgggcaaaagcaatgctgttaatcaggaactagttgcattggagagagagctcgcaacacatcggagaactggtgctattgattcattttgtttgtacttgtatggcattgttctacgtgataaaggcagtgaagctctagcttgaacagttgtatcggtttccataaaaagctatccttggagatggagtgattggttagagtaacaatatctctgtactagcagtgaaattttgaacaattgaaatattaataatcactggatgaaaaatttcttccgtgctagtgcacatcacgaattactaatgcaagaagaagctttgaaaagatatgagcgcttaatgggggttttccgttgcagtgactacattcaggctcaaatagctaccgtgcagtatagtatgagagacctggatgaagctgacatgatttttgaagaactccttaggactgatcctttccgtgtggattctatggacgtttactcaaatttattgtatgcaaaagaaagctcgactgctttgagtttccttgctcacagagtatttttgacagataaatatcgcccagaatcttgctgcataattgcaaattactacagtttgaaggggcagcatgaaaaatcagttctgtactttcaaagagcgctgaagcttaatcgaaagtatctttcagcttggactcttatgggacatgagtttgttgagctaaaaaatacacctgctgcgattgatgcctacaggagagctgttgatataaatcccagagattaccgtgcttggtatggtcttggtcagatctatgagatgatgggaatgccgttttatgcagtttattacttccgtaagtcatcatacctacaacctaatgatgcccggctttggaatgctatggctcagtgctatgaaagtgatcaactccagatgattgaagaagccatcaagtgctatgagagatctgcaaataataatgacaccgaaggaatagcacttcatcagctagcaaagttacatggtatgcttggacaatcagaggaggcagcattttactacaagaaggatctagagagaatggaagttgaggaaaggcagggccagaattttgttgaagctctgcttttccttgctaagcattgcaagagcataggcaggtttgaggaggcagagcactattgcacaaggctcttggattacaccggtccggaaagggagactgcaaaaagtattttgcaagggctaaaaagagcacaatcggtacttccgttgatggatatcgaccattttgcaataaaactccatattgctggagatgttgaccttgtgtgcatgatgatctcttccagttgctgaagcttggtaattagtaacactaatcgccggcatggggcaaaaatgagcgtcatcgggatgatgaagatcgctagctcaagtatcggcattgctgcttgctttctgctaggttctgtttctatggcttttcttcactagattgctttggtctgtgttgcactcaaagttccatggagttgcttgcatatataagcttcttggaagacttgccttgtctggattccagttctcatattcttgcttgttaaaataattgttgatgctttcctttccaataattccagttttgtcaatttttat

SEQ ID NO: 37415 - DNA, 333 bp, Oryza sativa
  Clone ID: PAT_MRT4530_41147C.1
atgcgaccttcctcctctcctttctcgccttgctccatggccgccggctgctcgcttctgctcgcaagctcgccgcctccctcggcgcgggttcagctcgaccatagatctagggaagcctctccaccaccagcccaccaccctcatccccatctcttgcccgcggcctcccctgcacgagagtcaccctgctaccggcgtgcctcgacgacgacggcggcggaggcggcgccctcgtcgaactcttcggccacatcctcagcagagcactatcatgggccacaccacgacaggaggaaggcactggctgctgcattttctagaggaggctaa

SEQ ID NO: 37416 - DNA, 1680 bp, Oryza sativa
  Clone ID: PAT_MRT4530_41148C.1
ctctgccctctatctccaatgcctattcggctgcatatctttgtcaattctgcaaggcatgccatcaactcgtcggcattcatttgtcggttcatcgcataccatcttagcccgcttttgattcacctatcctattttcttatcattgatgtacttggttttgttgccttggtggtgctcaggccaagcaaccacaagtacaatcctcgctatgtcgatatgtttttcctatcgacatctgcagttacagtcacaggattagccaccacacaaatggaggatctttccagctctcagatagctatcctgactctcttgatgttcttagacagtaagatgttcctttcctttcttggccttgtccttgagtcaagcaagcaaaacaagcatgatcctgaaaaccgtagagtcagttcagttactgtgtgcaagcaatcacagctagaagaggcgactccccaaactccatccatgaactccattgatatcaagaagagatgcctcaaatacttagtgtttgtggtgctggcatacatgatcattattcttgtcactggttctctattggtgttcatgtacatagctcatgtttcaagtgctagagatgtgctaacaaggaaaagcatcaacaaagctctcttctcgatatcggtcacagtctcctcattcacaaatggagggttattgccgacaaatgagagtatggttgtattctcctcaaacaatggcctcctgttgctactcattggccagattcttgcaggcagcacactgttccctgtgtttctgaggttggtgatatgggcattgagaggactaagattagcaaaagctgaagagcctgacttcatgatgaacaacagcagcgcagtaggtttcagtcacctgctgcctaacttgcagacaatatttcttgcagttgtggaggttgcttttgtagccatgacagtcatcctcttctgctgcttgaactgggattctgtagtgtttgcagggctcagctccctccagaagataaccaatgcattgttcatggcagtgaatgcaaggcaggcaggagaaaattccattgattgttcccttgttgcgccagcggctttagtactattcatggtcatgatgtacactccatccttgacaaagttgttctcagcatgtcaagatcacaaacgaatcggcccagaaagcgacgatagaacaagcaaggggaaaccattcctgaagatgatggcattttcaccactcggcttcaacaccacagtgataatgctggtctgcatcactgaaaggagatcactctccactgaccctctcaatttatccacatttaacatcatctttgaggtgataagtgcctacgggaacattgggttgtccactggctacagctgctcgaggcagctgcagcaccaggaggggattgcctgccatgagaaggcgtacaacttctcggggtggtggagtgaaccagggaaactgattcttgttcttgcaatgctctgcgggaggctcaactcaaaggattccacaagcgcacgaactagccaggatcatgttgcatgcaagtatctagacgatgaacaggggaacatgttctcaaatgaattgatagatgagagaacaggtccgagtatcacaaaccaagttgagcttcttgccaagatcccagaaatctcataa

SEQ ID NO: 37417 - DNA, 1383 bp, Oryza sativa
  Clone ID: PAT_MRT4530_41149C.1
atggagaaggccacgcgttgcctcgcgcgcgccacgggcctcgccgccgccgccgccgccggcgacgggccgcggaagcgcctcgccgtggcaatggtggactgcctcgcgcggcgcctcctccgccccgtccaggccatcaccgacgcgctcatcgacccctccgtctacctcgaccggcgttccgtcagggcggcgcgccgcgggttctttgaactcagtcccttccccaaggtggcgttcgtcgtcggcaaccgcgccatcgtcgaggcggtggagaacgagagcttagtccatgtcgtcggcatgtccggtccatttacccagccatgccagtggatccagctcctgcacgagcttcgccgtcgcccggaaggcccgccacgtgtcgttcggctcaccgtcgtccacgacgacggggagttgcttgccaagatggaagagttggtctccgacgaagccgaagagctcggcatggagttccagttccatggcgtcgtcggccagctcgaggatctggacttcagtaaccttcgcaatgtccttgagataaaatccggcgaggcgctcgtcgtcagctgcactctgcaactgcatcgtcttcttgctgctgatgacgatgcgatgtatagctctcgctctgcccatctcaaccaaatggcgagcatcgcgcagctccagcacatggcggtgaattcgtgcccgtcgagtagcggcggcggaagcgtgcagtacaaagacgatgacccttaccgaagcccggccacaccgctgacgttcgtctcgccaccggtgtcaacccctcacttccagacgccggcggcgctggcgagcttcctgtcggcggtgcgcgcgctgtccccgaagatcctggtggtggcggagcaggacgcggaccacaacggcgtctccttccggaagcgcttctgcgaggcgctccaccactacgccgccgtgttcgacagcctcgacgccgcggccgccaccacctcggcggcgtcgcgcctgtggtctcccgacgaacgcgcgcaggtggagcgcgtcgtggtgggcgaggagatcaagggcgtcctactccgggatggcgcgcaccggcgggaatggcacgaccggctgcggcaatgggcggcgcgcatggagatggccgggttcaccggcgtgccgctcagctacgccgccatcaagaaggggaacgacatggtgaggcgatgcggattgagacgctgcgagaacaaggaatgcggcggctgcctcctgctgtgctggagctcgaggcctctctactcgatctcggcatggcggccggcggcgagcagaggatctgggtcaggttcagagagaagcgagtacgtacatgtcggtgccgagccagatgatcgatga

SEQ ID NO: 37418 - DNA, 825 bp, Oryza sativa
  Clone ID: PAT_MRT4530_4114C.1
atctggtcgaccgcccataaccgcgggcacggctattcgaatagttttactctgatcagaggtgtacaactgcccacaagacacagccccacgacatgttaccgtgcgctgacatgccaccacgacataccggaaagaggccatgacaggacctttcgcataaccccctctaaccaagcacaccacaccttaggtttcaaccccactcctcgcaaggcagcgggcagtcccctctcgtgcctaggtgaatccggaagctgcataggccgtcgcagggcccatccaaactccatcacgcctacccttgcctggatgcgttagctagaggaaagctacactacaagcccagccgttgcccacgctgacttggggtaagtacgctgaattcttccagggtttcccgcgaaccggtccttaactgccatgggtgtgattagcaaagccatgcacccacagcccaccatacagtcgcattttagttggataattacgaccatgaagcatggccagatgtctcgagcacgcagctcattctgatactaaaaaggtctaatactgtaattatcatatcaactgagctagttccagcgccgacaggtgggccccaggcatcagcggctcaagggggcggcccacggtggacacggtccaccgcgacctcgggtgcgcccaccgccgcctcaaccaacatcgccgatccggtctcccgttgctgtccctcggccgctgaagtctcctcggactccatctcaaccggcatcactgccgccgccgctgtccctccgctaccaaaatcgtcacgcatcgccggtctcctccgacaaa

SEQ ID NO: 37419 - DNA, 318 bp, Oryza sativa
  Clone ID: PAT_MRT4530_41150C.1
atggcgacgcgctatctccgccctgtagtcgccgcgcttcgtcgtcctgcggttgccgcctctcgatccctctccgccaacgccacccagggagttggcaggaccggaaccacagggatcacatcctccttgaaggctgggaagaatgtcgatgaggaaatacggctgctacttgtagaagtagctaagcttgaagttgcaagccggagaatggaggagacaataaggaacagcaggttccacagaaggaaggtcctcagggagtatattgctggcttggagatccaacagaagtatacaccgcctacacctaactga

SEQ ID NO: 37420 - DNA, 171 bp, Oryza sativa
  Clone ID: PAT_MRT4530_41151C.1
atggagccgaaactgaaactgcttttgctccttgtgatgcggcaggcaggggttaggttggagaaggagacaggagagaagaaaagagatgtggcacattcgagactgtcagatacacctaccactcccaaagtcccaaaccgctgcaactcaagaaaaaatgagacctaa

SEQ ID NO: 37421 - DNA, 547 bp, Oryza sativa
  Clone ID: PAT_MRT4530_41152C.1
actagtggatcccccgggctgcaggctgagcgtcaacaagaagcacctgaatcttcttcaacaccagaagtacctacactgaggtaaatggttttgaaagctgctttaccatgcagccatggaattaatattgttcataactaacatggaagtcgggctttatcttgtgattttaagttcaggaaaaaaactgagggttatcgtattatttgtcttttcaccttttatgctttttacttgttccctaaaagtaagtttggatgatttaaactaggactgaagcacttgtataatttcatttctattaagatcaatttgtgggagattgataggatgctacctaacaaaacacctataacattttgtatggatttacgacaaagtatggatgtataaaaagattaagatcaattgcatccctttccatagcttgacttcatttaccttcaaaaactcagcttatcctttccgtggccttgtcaagcaactgcatgtaattccctctttaatattaaagttgccttttctaaggaaggtataaatcaca

SEQ ID NO: 37422 - DNA, 390 bp, Oryza sativa
  Clone ID: PAT_MRT4530_41153C.1
atggcggcgccgccgagcttgccatatccgccctcggacggcagcgccgctgagcttgccagatccgttctcgctatcttcgtctctcccaggctgctaacgccgccccgtcgagctcgggtagtggactcgccggcgacgaccgccgcccccttgcatggggtgtgtgggggcatcgcatgggggcttgtcctctccggcgatgctctcctctatttggcggcgtcgggcggtggaagtgaggagggcagcgtcggcgtcacgtgtcgcagagtgtgggcccacctgcgcaaaactgacgaggaacttgtagccaaagatggctacgcgaacctgaggaggccgaacggtttgagtacgtggacacgaatattcggttcgtgggagtga

SEQ ID NO: 37423 - DNA, 580 bp, Oryza sativa
  unsure (1)..(580): unsure at all n locations
  Clone ID: PAT_MRT4530_41154C.1
acctggacatgtttgaggattctgagtaagttttactgaatgtgtaatgaagtggtggtttcatttttaattgacagttttctaaaacaaaattcatgctcacatgggtgtcataatacaaagtagtgacatttccctatatattttcatattaatctaattgaccattcgacattacaaattaaatccagcgtcttaatcggtatgatgtgaagaaccatagctaaagttaaccatcttatttctatttaattctgttatgaacaagcatcgcacatggtagctacttcctccgttttacaatgtaagactttctagcattgcccacattcattaacatctatatatatgtgggcaatgctaaaaagtcttacattgtgaaacggagggagtagtagatattctctttatctattttcagcaatggaggaaccataactgaagtttattgggatactggaggatgatattggctacctgtccatccacttgcgacatactctctccgtcccaaaaaaaanccaatcctgggttttgaacctggacacacatgcgttcaggtccaaacccaggattgagt

SEQ ID NO: 37424 - DNA, 534 bp, Oryza sativa
  Clone ID: PAT_MRT4530_41155C.1
cccacgcgtcctgaaaaaaaaaaaaaaaaaaaaaaaaaaaaaaaaaaaaaaaataaaaaaaaaaaaaaaaaaaaaaaaaaaaaaaaaaaaaaaaaaaaaaaaaaaaaaaaaaaaaaaaaaagcgaaaaaataaaaaaaaaaaaaaattaaataaaaaaaaaataaataaaatataaaaaattaataaagtttaaaataaaaaaaaattgttataaccataaaatttattaagttttaatatgataaaatacattaaaataatttaagcttaatagctattaaagcaatatagcgattaacctaatctaacattacaaacagaaatgaatggttaaaattaacatttgttaaaagcttgtgtataatatgaatgaagatatggtagattatcgtaaattacccacatatagactcttaaacttcctagagcccttatccttacacttttttacttttttttctttttatgtcgaaaatttccccttttttccctttaaatctttaaatctttgtaggctttctatttattgattt

SEQ ID NO: 37425 - DNA, 720 bp, Oryza sativa
  unsure (1)..(720): unsure at all n locations
  Clone ID: PAT_MRT4530_41156C.1
ctactcgctgaaaaggacatcagacctggtattcctggttagagaagcaaaacggctttgttcgatcattaggagaaaggatcccccactcctgacccctatttctcctgattccgacagttcactttcggcgaggtcccgcaggagggatcgccaattcgccatgagaagagagctgatggcccatcctctcgtacttatttcgtcgaacatctttcgtgcattccggtggccggggcatttcatcgagcaccaaagcccccgggactcgatccccacggcaagcgcagctcccgtcgagctgagcagcagccgcgcgctctgctcaatgccgccaccgcgtttccgtacatcttcccacccggccaccaccgctgccacatgatgtttgcgcctcgagatcataccgctcaccagggtggccggtggatagggatggaggaggtggtacctagcattcagatctgcgcatccccggcctcgtggaggtcggatccggcgggtagcgcggttggtggtggaggtgagggaggcgtcagtggcgttggcggccgggaagcagggggaggcgtcggtggaggtggaggcctaagtggcggccggctaacgcgggcggaggcgcgaaggnttgttgaaaccctcacccccacaaatgcgcgtactcgttcaccatcgtccccccccctgcccctncttttggtccccgctgacgcgaaattt

SEQ ID NO: 37426 - DNA, 2732 bp, Oryza sativa
  Clone ID: PAT_MRT4530_41157C.1
gtcccgtctcctcgcccgccgccctcgactcccgtctcctcgcctgccgctggcgccgatctccatcctgctagcagaggtggcgccggcgtcctcctcctgctcccgccgcattcgctcaccggtgagcattctaatccatcccatccggcctcggcctcggcctcgaatttcgtctcctcgcccgccgcttgcgccgatccccatcctgcgagcagaggtggcgcccggcgtcctccttctagcttccaccgcatcgtcgctcgccgcccctttgtcccgagacccgacgcaaagtggaaaagctctcccgatactacctcctttccttttcctccgctcggcgcgacccatctccgatggcgattccggcggaggtgcgccgctactggctgcccatcctcctcgccgccgtcgggttcctcttccagctcctcgtcctgcccatctccttcccgcccacccactactacgcgcttgggatcgagaggttcgcgccggtggagagggtggtggaggcctacgagcagctctccaaggagtggctcgctgagacgaatcagcaaacaactgttgatattataaagattcgttatgcatatgagctgttgacaaatccaattttgaaaagggattatgatctttttggtctggaccatcataaggatgtccttgagaaagtcaaagaacagtatcaaaaggaacactttttgaaaatagatctccccttgttaaaggattcttcagttcaatcaactgattacgccttcaacgtactgggctacgagtcattcatgcatactattgctgacgaacacccactgctcataatggtgtattcaaagggtagtcctcggtgtgctcaatttattgaaaaatggaagcaaatcggcagccgactggatggtgtagcaaacactgctatggtagaacttggtgatgtgcaactgactggtcattttgcagaacaaaggttctctaaacagccatttttccgtaatggtctacccactcttgttgcataccctgcagactgcagaagtccatcctgttacatgaggtacccaggtgagctttttgtggattctgttgttgactgggtggcaacgtcagttgttggtttacctcgtatcttgtactattccaaggagacattggggcctgagttcattgggaagagcggccatcataaggtcaaggttatctttttctcaagtaccggggaacgtgctgctccattccttcgccaagctgcccaagagtattcgacctatgcatcatttgcatttgtcttatggaaagaagatgaatctcagatttggtggaattcgttaggagtggaatcagctccatcacttgttttcttgaagggaccaggtgccaagcccattgtataccatggaacttttaccaagtcagagtttacaaagataatggaggagcataagcaccaagaactcccacagctaagaagcgatacatctttggagctgggttgtgatgccagaggttattcacgtgctggaaatgatatagcaatttggtattgtgtaattgttgctggtcgtcctggtatagagctaagtaaaaggagacagattttgcggaaggcccaagaccaactatttagtgatgtcgatgcaagtacttccgagaatgtggatagttcagttgtggtatcaagtgccgcggctgccttaaaagatgacaggttgacctttgtttggttggatggagaagtgcagaagaaactttgtgccttctaccttgcaactgattacagtggagcctgtggtcctggaggttttggagatgataatgataaatctgaactgtttattgttcgtttccaaagaaatgcaacatttgaggcgttgaaagctgagaaaacaaataatcttatggaggctctccaaagacagcataccgctgatgcctcccagctagtggcaaggtataaaggcccggacgaaatagaggagataaacaaatggatctctcagattatcaaagatggagatactagggaaataccttactttacttcaaaggtaccagatcttgtgcctgaggaaacaagtaaggaatggataaaaagtaccaaaagtatccgctcagcaggaaacagtgtaaaacagaggatccagagcagtggatttcatttcggagattacctgactgacccaaggatcggcccagctttgcttatgtctgcatgcatttcaatgggaataatatggtacaagagcaaccaacgaactcaaactacggaggatggagcacctcctaaagacaaaactaagaagcgtcgtcctcgtccgaagcttagcacgtcactgtttggccagcccgagtatcccgctgacgctgatcctgaacccaaagatgctcgtcagtgggagatgactgactctgattcggactagcgagttaaactctctataatcaatccaccaataggactagagataggactaggtaaaatgctaatgccaccaatatctgcaatctttttttttttagaattccaatatatgcaatctggaaaaacttcgagcagttcatctgtctgttcattcatgtatctacccaactgcttggaagcggacaagcatgatatagacctctcacgcagtaatatactgtatgactgtataaacgtacgtgtacttgtctgattttgttaatggtcgcctgccggaactgtggaaaacagcataacagttttgttg

SEQ ID NO: 37427 - DNA, 1054 bp, Oryza sativa
  Clone ID: PAT_MRT4530_41158C.1
ctagactgcgagcggaagtaaactcctgtcatcgcgccatttcccccagccgaactcacaaaagggggtctcacgaccaccggttttccaccggatttcaaaaatttcgaattccaccggtgtccgaaacgaaagagcatgtcggaatcgtataccccgcccgtctcctcttcggccgtctttgctcgaccggagcggagcgcagcgcaggccaacggcgtggacgacgcgcgccccctctggatcgccgctcccccgcgcgccacagcttccatccggcgactgcaaggccgcccaagccaagagggtttctttgcaagctttagccgctcgacgttcattgacagaacatgcctaaaataaagacaagccgtgtcaaatatcctggaggatgggagcttattgaaccaactatccgtgagttggatgccaaaatgagggaagctgaaaatgacacacatgatgggaagagaaagtgcgaagccctctggccaattttccgtatttcccatcaaagaagtcgctacatatatgatctttattacagaaggaaggagatatcaaaagagttgtatgagttttgcctggaccagggttatgcagaccgtaatctgattgcaaagtggaaaaagccgggttatgagcgcctttgctgtcttcgatgcatacagacacgagaccacaactttgcaactacatgcgtctgccgggtccccaagcatctcagagaggagaaggttatagaatgtgttcactgtggatgcagaggctgtgccagcggtgattgagatatcgtcattatcttgtttgaatctgtcaaactaagcagacataatgtttcttgagcgaaatttcggctaaaaacgtttacgaaaacgttttgtaaaccccgcctaccgggtatgacgttatttaagtacctgagattgtggttacggtctgcattaatctgccgcatggtcattgcttgatcatcggcctcaacaccctgcatatgtgtattctaaagttttttaatggaaacatctgttactcgaaaaaaaaaaaaaaaaaa

SEQ ID NO: 37428 - DNA, 1616 bp, Oryza sativa
  Clone ID: PAT_MRT4530_41159C.1
cattattggagagagaatttggcatatttacatttcacttagctgtctttatcaaagtgatatttcgggtgaaactgcaggatgaagtactgtacaatagtaataaacgtggcttcccttaaaaaaagaaaaaaaaacatggcctgttaacatccctaatgtcaatgttcttagtgtacaatacaactatacatgcataattctcagtcgctccagttatcctcatcgactacaaaatccatttgcctcttgccatcatcttccatttcagtaaatgctggagttgatggagaccacacaagaatttgcctgtcattgctgccagtataaagctcttgttcttgtgcactatagtagcagcaattaacaggttcatagtgcccacggaatgtttgaaatgtcataccagaccataaattgtacgccttaatgcttgccatgcatgggatgaatacaagtgatggatcctcagtgacagctaattgtagtggtttgctagtctgtaatcgcatagcttcaaaattgaccaaagtattacagcctgaatcaatatcccaaagtcttaagcgagaatcagaactcttgcctgtcctctgctgtgcagagtaaatctttgaagaagatgaaggttgtaaagagttcaaaggatccttatctgaggtgccctcaagaaaaggaggccgccttcctagttgagaccgtgattgatcaagaacaagaaagcatccagctcgtcttatgtcccaaaatcgtattgctccatcacaaccaccgctcatcaaaatccactcacttgaagtagaccactgaacatctgcacttccagtagcgatcagcatatgtgttgttgcaattggggacattgctgcactgtacacttttccaggcatcttaaaatccattacgacttgagtcgaattagtatcccacactttgacatactgatcaaaagaagctgtcacaaacagcccagtgtccacaggataccatacggccatagataccgcgaacttgtggccattttcatgctgcttgtccacaaggagaatgctcctatgcttggcaatgaacccagcttcgtattcgatcgcattctgcacatcaaatatagcggctgatccatccgatgcgcccgagagcaggtaccgccgctctatcaaatcaacctggagagagttgacggcgccgttgtgcggggtggtgaactccttgcggttggagagtgcgagtgaggcggtgcggcgcgcccgggcggcggtctcgaagcgccgtgccccaagctccccgcgttccctccgcctcaccgcctcacaccacatccactcggccgcgcacgacagttgtgtccctcttctcagcggtgacagcgggcgatagaaacggtgcggtgtgccagtgagggatgagcggcgcggccgagcgggagctatgctgaccggagatggagaaggattcggcggcacatccactcggacgcgcacggcagctgtgtccctcttctcggcggcgacggcgagcggtggaggacggtgcggtgtgccggtgagggatgagcggcgcggccgagcgggagctatgctgaccggagatggaggattcggcggatatggcctcat

SEQ ID NO: 37429 - DNA, 220 bp, Oryza sativa
  Clone ID: PAT_MRT4530_4115C.1
tgttgttgaagatgttgcctggcacctgaaagatgaaaacctatttggatctgcctggggatgactgcaagctgatgatgtgggacttgcgtactaataaaccaggacaatctatagtagcacaccaaaaagaagtaaactctctgtgcttcaatccgtttaatgagtggatcttggcttcagcatctggagatgcaactattaagctatttgacttgcg

SEQ ID NO: 37430 - DNA, 3818 bp, Oryza sativa
  Clone ID: PAT_MRT4530_41160C.1
gtcccgtctcctcgccctccgccctcgactcccgtctcctcgcctgccgctggcgccgatctccatcctgctagcagaggtggcgccggcgtccttctgctcccgccgcattcgctcaccggtgagcatcctaatccatcccatccggcctcggcctcgaatttcgtctcctcgcccgccgcttgcgccgatccccatcctgcgagcagaggtggcgcccggcgtcctcctccttccaccgcatcgtcgctcgccgcacagttggtgtcccgttttgattcttgaggcccatgtagcaaatactactcctaccagaggagaaaaccgtgaaaccggcatagctcctctcaaaaaacaaaaaggaggggaaaaagaatcacgacatatagctgatagctccggtccaaactccaaacccggccgtctttgctcgaccggagcggagcgcagcgcagcgcagaccagcggcgcggacgacgcgcgccccctctggatcgccgctcccccgcgcgccacagcttccatccggcgactgcaaggccgcccaagccaagagggtttctttgcaagctttagcccctcgacgttcattgagagaacatgcctaaaataaagacaagccgtgtcaaatatcctggaggatgggagcttattgaaccaactatccgtgagttggatgccaaaatgagggaagctgaaaatgacacgcatgatgggaagagaaagtgcgaagccctctggccaattttccgtatttcccatcaaagaagtcgctacatatataatctttattacagaaggaaggagatatcaaaagagttgtatgagttttgcctggaccagggttatgcagaccgtaatctgattgcaaagtggaaaaagccaggctatgagcgcctttgctgtcttcgatgcatacagacacgagaccacaactttgcaactacatgtgtctgccgggtccccaagcatctcagagaggagaaggtagcgtactccctggccttggctgtcggtgcgccgtgcgcccgcggccgcgactacgacgcgcgctgcgtgtgcgccgtgcgcggctcacgggaaaccaagccgtttttaatacccgcgccggtcaagccacaccgccggcatgtgacacagcgtcactcgcggctcgggctcggggagtgcgtgagcgccagcaacacagcgcgcgcatgcatggcggactccacggccatgaccgtcgacttcctccgcgcgcggctgctctccgagcggtccgtctcccgcgccgccaaggagcgcgccgaccagctcgccaagagggttgcggagctggaggagcaggtccaggcggtgacggcgcagaggcggcaggcggagcgggcggcgacggaggtgctgggtattctggagtcacatggcttcggcggcaacctctcagacgtgctcgactcgggctccgaacacgatggcgaggaggatgacgacccacgcgacgggaggagcgacggcgacacggcaggctcccgcggggaggagcagccgccggcgcagtgcgaagcggcggaggacgcgctgtccgggacggccgagcccggcggcgggctgtcgtggaaaggccgcagccccaagtaccggatggggcagtcctgccgcaagaacaagcgcaaggagctcagtcagaaggggcagcaagatggatcggattgcaccgacgacggccaggcggacatggacggcgaggatactggtggtcagtatgtgatcaggtacgagaaggacggcgagatggagagggtgctcgagaggcaggccgagctgatcggccagtatgaggcggaggaagaagctcagaggcagtgggagaagcagttcaacgagaatcggagctcagccaaggttcatgttgaggcagagaataaggcgtgccagatagaaaatggttgggagcagagcaaggagcatgctaggctcgcggatcaagcggtacattgcaacgaagaggcaaaaccaggcgttaaaaatcaccccagcgccagcaacaaccgctctgctggccttctgttgaatgattcccttcctgaatcacacgcatcaggacaagaagctgctgccgaccaacgtgacgcgcacgaggagcatcacgaccactgtcatgcacagtctcaaggaagctctaatgtcgccggcacaatgacagggaagaatcaagaacaaggaaacgagaatccggatggatgttcaagctactgtgacatcaaagcgccatcagatggaagcccgtcaatgagtgatgccaccctgaacagcaaggtctctgactggagctcatcaagcttccatgaccatggcgacaaccaggtcgatgcagggccagatcaacagccaacaagcaacatggacatagagagtgttcttcaggcacttcagcttgccaggatttccctgagtcagaagctgagcaagccagttccacccagccaggtgacgctggcgcttcctgcaccaggggacgatgaacattcagaagacgacggctactcccccgtcgacgacgagttcacttctgcaagagatgagctctgcagctcaagccaatctcctgagcaggagatactggctctccctgcaccagaggactaccatgacagggagaatttgcctgtcaatgacgacgctaccatttcactgacagaggaacagaccagttcaagcccacaccggcaggagatcctggctctcccggctccggtagatgattaccacagagagatagtggatgacatcaagatacctatctgcattgccgggttgtttcggttgccaacagactcatttccaaaggacgagacgctctcaacttgcagcatttgcttgatatccttgcataaaccggaggaagatcggattatacacgttctcttggattcgatacctttggaatactccgtaggggaagtgctacatcggtatattcgtgcgcttgtggattttatctgtgattgtaagaaataccaacagcgccctactcgtcgtcgctcccggtcgctgcgaacccatcacccaatgccacagctgcccccaccgccgcctacatgcccaggtgcggtacccgttgcctggtcaggctgggggatgacgttggagaacgacccttcatcggtgttgtggtggccgtgtcggcatcctccgcgacatccttgtcattgctcctggtcgctgcggacctgtcacccggtgtcgcggccaaccccaccgccacctccatgcccaagcatcgcatcaagccgctagccagtgcactgcatctagccacttccttttccccttttgcagctgcccatggagggagcagcgcaaccttggcctcgtcccctgcgagccgcggcagtgacaccacccggagagcagcgccctcagcctcgtcgagcagcgggagaggcgacagcctcagcaccggtgcgagcagcagccccgacgagtagcgacctcggcctcgtcgagcgggagaggcaatggcctcggcacaggcggcggcgactccggtgagcagcggcctcagcgcgacggcggtggcgctcctccggatccatgctctcaggcgcaacgacagtgagcagggagggagcagctcgtccattgcggcagatcggcagtgacctcgatggatcggcaatggatgtacgttgaccggcggtccaaagagtttatcgagggcgtgcattattttttgagagtggccgaagctaacaagcgtaacggttttatttgttgtccatgcaataagtgtaagaatcagaaggagtattctgtatccaggactattcatttcc

SEQ ID NO: 37431 - DNA, 147 bp, Oryza sativa
  Clone ID: PAT_MRT4530_41162C.1
atggagatagagggccctggtcatttcctaggaattgttacagaggaagtgaagaagttgctgcaagttttctcctgcagtcgacagaaagactgtggatggatgagagacaggagaatgttccggggaggccgcaggaaggtctaa

SEQ ID NO: 37432 - DNA, 1642 bp, Oryza sativa
  Clone ID: PAT_MRT4530_41163C.1
ctacgaagggagaagccttgcgagaatgccgacgatgggcgcgacggtgacggtggacggctcggcctgccggaaattctgccgggaatcgtcgtaccggtcatcggcatccggccctccgacgatggcgccggcgatcacattgggatccggtgagcccttgttgaggtagtcgaacccacccttgcaggtgaccttcgccgggctggacttgatcgacggcaacgacgccgcccggtggtgcacctccgccgggtacctgctgccgtacccgaccatgtagctcatcgtctcggggttcgagccgaggatgtagtccacctgcgaccgcacgaacgcggtgagctgcgctggcgaccgcgaggcgccaccgccgcactggagggaggccgacctcgccgccgtcaggtggtcggcgtgcacggcgagtacgagggacgccagggtcacgtactgcatgttgttccatgagtcccaccacagcatgccgccggggctgagcctggctcccccgccgccgccgccattgccgccggagtgctgcacgaggttgcagatgaactgctccaggtttgtcttcatctcggcgtggctgccatcggccggcagcttcccctggaggacaagcaatgcctgcgctccgacgaacttgtcgtcccagctgaacatggagcgcacgccgccgacgttggtggcgccggcgatgtaggcgctgtactcttcctcgccgccggtggcgatgtagagccaggctgccgcccagagcagctcgtcctcatcgccactgctagcgtagaactttgcagctgatggtacactgttgtggtacaagccacgatgattcttggcaaactcaaacaactgtttggcgtgcagcaggagcgtggaggagaagttggcgtcggcggcggaggcgagcgcggcggccgtctcggcggcgatgtcggagccggggctggaggcgttcaccatgtacgccgtgcggggcgtgtccatgttctcggggcgctgccagcacgagtggtcggagtcgccgtcgccgacctgcacgtacagcgcctcgccgccgccggccgacgcgtgcgccctggtgaggtagtcggcgccccaccgcacggcgtcgagcgcgtggcccagctcgcccgccgcgtcgagccggtcgccgtactccacgacgctccacgacagcgccgccaccgtgaacgccatggggaacccgaacttgacgttgtcgccggagtcgtagtagccgccggtgaggtccacctgcatatcgcattgcattgcgtcagtgcgcgcacacacggacacgttcgaggacggcggcgaggcgaggtcaggtacgcggtggtcggcaccgtcggcgagggcggagtcggcgcgccactggacgcgctgggcgggagggaggcggccggagcgctggccctcgaagtagagcagcgacatggcgagcgcggcgcggtagtcgtggccatgggcgtcgcgcaccatgcagctcgtcgcgatcaccaccaactctatcgcagccgcaagcatcgcccagcttatgtttcttgttcttttgcttcctactcgattcacttcgtggattctctgcgtgcttatcttttaatttaatacttgctgcgagtgttggtct

SEQ ID NO: 37433 - DNA, 524 bp, Oryza sativa
  Clone ID: PAT_MRT4530_41164C.1
aaaaaaccacagcagccaaaagcggggggattcacttccccaaacaaaaaaatctgggctgcaaaagggggaaaaaaacccaggggggggggcaaaaaaaaaaaccggggctcatcccccacatggggcggctatgaacccagatttattaaccccccgaaagaaaaaacaatcaagcattggtctctgcataacacggccccccccggggggagctttttgggctccaaaacatgcctgagcagctagcccggccaaaaacctgggggcccctttgggccatctccatgcttgcccagggcgagggctgaggaaattgccccccggaaccatcctgggtttctagggcatcacagggatcatcgccactgcccctgcagggcgggagggcaaacaaaggaaaggggctgcaggttagggggcaaactaactttgaaaagacagctgcaacacgggggccccttatttctgctttgctgaaaggggcgggggagccaacaaaccgggggtttagcatgcatgga

SEQ ID NO: 37434 - DNA, 979 bp, Oryza sativa
  unsure (1)..(979): unsure at all n locations
  Clone ID: PAT_MRT4530_41165C.1
cctcatgggtgctctaccaggcaacatcttgtaatcagaaaaccttggaaatctgcgggataaatacttccatttcacatcaaccggccgggataaggttgaagagaaaagtgagcttagatttgtatcaaaagagagatcattcttggttggcctgatcgatcgaagaggagaagctagccaagatgtacaaccctccggcgcagcaggacatgtcctactacgatcactgcaccaagcggcatgaggagaagggctgcctctacgcatgcatcttcactgcactgtgctgcttctgctgctacgagacctgcgagtgctgcctcgactgcctctgctgctgctgcaactaggctgccatatcaagccatagcaagaacatgatcaagatgaggatggagatcgcctccatctctcttacccctgagatttcataatttatcagcccgttgtcatcatgtaaaattaataaacatgtagtagatggaaactttgtcagaatcgagcatttgtgttctgaaaaagaggactattgtaagaaacccagaatactgttatctgaagtgctttctatgcgtgtgaaaaaaaaaaaaaaaaaagcggtatttggtaaaaaaaaaaaaaaaaaaaaaaatttgaaccacttcggagagtgaggccagaagccccccccccagaggactttgatgccaacaatgaacaattccagtgcacaggtacgtttgacctccgacgtgtctttgagcctcaaggccttctggcacctcgataccgcaatactcctgccatgatctacatcatccaagggagaggttctatgcgattaactttccccggctgcccagcctcctaccaacaaccataccnacaactcttgcctgaaccccacagccagatccaccacatttcacgtatgacccccccaagacccaccattttacaccgaggaacctcgttcccctgcccacctgccgcttcc

SEQ ID NO: 37435 - DNA, 1719 bp, Oryza sativa
  Clone ID: PAT_MRT4530_41166C.1
atggagctggagggggatccgaggctggtcggcgttgcgttgggggagtacttgacggatggggaggaggtgatggtggtgggaggggcgggggaggtggccgtggcggcccgtgtggtgaaggtggatggggggaaggttgtggtggccatggatgaggatgccgctgcaggaggtggcgtcggagtcggagtggtgagcgatttgctgtacgcgacgggatcggcggcagtgggtgaaggatacgggggtgagtgtactgacaacatgcaggagctgctggatggaggtggtgcagaggagaggatgttgggagtggaactcggtggctttcgtggtgaggcagggtggacgcttatgccggtaggagatgctgctatagagacttcagaggaaatgtctgatcctgtcacactgcaatactctgaaacagggctcacaggggatgatcagcgtgccaaataccgcctccctcctcttgacggatatggttttcgagcatctggtcttgtgtggagtaaattgaaaggtcatccttggtggcctggtgagatatttgatacttcagatgcatctgagttggcactgaaacaccagaagaagaagggcagtcatttggtagcatatttcggtagcaatacttttgcatggtgtgatgaatcccagttgaagcctttcatgtcaaactattctcaaatggcgaatcagagcaattctgatgccttcattagttcagttaaccttgctcttgaagaaatctcaaggcggatattgtcagggatgtgttgcttttgtcttccagaagatctctctgacaattgcatgtcttacatggttgagaattctgggctcagggatggagttacttgctctaaagttacacggtcagagatcttggaatgtttcaatgcagaaaattttctaagttatctcaggtcattggctctgttccctggtcaaggaggtgagctgctggatttagtgatagcatgctctcaacttacatctttctttcaatctaagggatgccatgaacttgcatcatttggaagtggcagtgagttggttgatgatggcatggactcttcttccaccaagaatgtcttgttgccagaagctgtcacctatgaacagaaacctagtgaaggtaagcccaaaagacgtaggataaaaacttgtgttaaaaaacctcagaatgatttagagttgacagaggaaaatcccatatccagtttgaacaatgagtgcacttttgttgattgcatgggcttgaacatcattgggaaagttaaagggaagagaagtgaaaagaggagaaaatatgtgccttctcctgagagaattgatgagatcatgccctccgcacttgttttgagttttggcagatcagctgctcttccctcaaaattggatcttattaggttgttcagtcgctatggacctctgaaagaaaatgagactgaagttcaccagaacacgaatactgttaaagttgccttcaagagacgttttgatgctgcaaacgctttcagtgttgttggcaagtatagctattttggaccttcgctttgtagttttcggcttgtaaatttgccattttccctatccaagttaagccctgaagatcctggcacggaggttcctgcttgtagggagtctggagtggatattgtgcatgttggcatcatcagcaaagttgataaagctcaaaatctgtag

SEQ ID NO: 37436 - DNA, 552 bp, Oryza sativa
  Clone ID: PAT_MRT4530_41167C.1
ggattgacgacgacggagagcctgccaagagatcgatgggaaggcgttgcggcggcggcggaggcggccatggttggcagctcggcctgtactactgcctggtggtcgcgtgttcatgtgttgtagcaactcaggctcaggctcaccaggcaccgagaactgatcctgtcgaaggtatatgctatgtactaccccatcccataatgttttgatctaaccaacatcataaaaaaagaaatggagagatatgtacatacaagtgctgcaaacatgtcagcttctctcttcttttttttttttgtttctttgagtcttcagagagatgggaacagatcagagacgtgttttgatgtttgttttcttgttttgtcttttcgccggaacggagactgaacgcttatcgattcattaagattaaaaaacaaattagctgagaataaagcgcctgctaccaggcagaaaagcagaggccgccgcgtttgatgtttgtttcttgcgtctagcagtttgaagacagattctcctagacaagtttaaagacaaattagcacc

SEQ ID NO: 37437 - DNA, 384 bp, Oryza sativa
  Clone ID: PAT_MRT4530_41168C.1
atggatcggcgcgtcagccggccgacgaccgccagcagtggagcagctcctcaggcctggatccccgcactcgacctccaccagccgcttcgggaggtggcggccggaggtgctgagcagcaagagatgctctgtgcccggtgccctgatgcgctgcggtggcgagcttgttgccggggctcgggaggagatgcgccgcgggcgtgcgtgcaggggttgtttgagatccgtgagttggtcgacaaggcaggcgacggtgtcctagcggtggagatcgggggcggcgcggaggatgggaggagacaaccgaggcgggcgacgaggagtggagacgggcaacggtgtctggcggtggagatcaggcaggcggagcggcaggggtga

SEQ ID NO: 37438 - DNA, 171 bp, Oryza sativa
  Clone ID: PAT_MRT4530_41169C.1
atgacgaggaagggcaagatctggccgccgctgcagtcgtcctcgtggttagggggcaccagatccggcctctccgaggtcgggggtggtgaactgcaagtgtttagagtttcgttgtctttggtgatgttgctagaaaattggaatctgaacattgcagttctcaagtag

SEQ ID NO: 37439 - DNA, 909 bp, Oryza sativa
  Clone ID: PAT_MRT4530_4116C.1
atggatatttcttccttgatgaatgccaacagggatgatgcatggactgattgcagccgagaaaacttctctggacttttggtatctttcatgattgatatcctcaaatctaaagcgggcccgcccgccgctctcgctgacgggtgggacccacctgtcatctccctcctcccgccgcgccgccgccgcgcccgtgccctagcgccgccgccgccgcggattgcgccgcatcccgccgtccccgcgcgcatcaaagagaggggaattactccccgcgtttccctctcccgattccccctcttttccctctctctctccctcggatttgtccggattcatcccgcgaagttcgccggcgtcttcaatggcgcccgagatctccgcgcgcggtttcctctctccccggccgcgctctccccctcccgttgctatatattcgatccccgtgcttcgctcttccgtttccgccgctcgccgctcgctctcgccgtcggattcgtgctcgcgccgtgctcctctctctccgccgtcgccgtcgaccttcggttcgccgccgacgtcgctccggtcctccgcccgactcggcgccacccccaccggcttcgccgcgttgtcgccgaccccgtccgccgctccgcttcgcccgccgactgccggagcaccgtcgccctcggcatcccgaaccgcgccgtcgccttcctccgctccggttcgccgccgccgtcgctccggtcttcctcccggctcggcgccacctccctcggcatcgccgcatcgccgtcgacctcgtccgcgcctccgtttcgctcgccgaccgtcggagcgccgccgtcatcgtcatcccgagccgcgccgccgtcttcctccgctccgtccgccgtttccgccgccttcgctgcctcggggtga

SEQ ID NO: 37440 - DNA, 729 bp, Oryza sativa
  unsure (1)..(729): unsure at all n locations
  Clone ID: PAT_MRT4530_41170C.1
ctgggttcttatttctttctttgcttactaacttctggatccctatatcttctgacttttttttttgcagcagtcgagcctttgggctgccttcctcttccccatttttctttactagtgagcgtgcacgtgcaaggcacgtcatcacgtcgatacctattgaatggaatcaaattagaaggagactgctgagtcttgatactaataaacatatacttactcataaatatgtgtttactccatatagctctaaaaagaaaaatacgtactcataaatatgtgattatttcatatagctctaaaaataagttggataattcgtcacgattgctttcaattgatcaaacacgttggagtctccaatttgaacaaaattctttctaaacttgaactcaaattcctttacaatggaaccgacgtcaaacatcaactttcaagtatcctttcattattttacaaatattacaatttaggcaggctgaaaagaaaattagagaccatttatctataatatgcttgttttgtgagaaaaaaatcaaccgattttcaattgatctacaccgcgcttctgagttcttacatgtatatcctaacggcatagattggccgatggcangcatagcatacaaaaggacatatacccactatattacactaaataaatggcataacatgaacctatttttttttgatttaataagaataaacagtctcatttccagcatgtgc

SEQ ID NO: 37441 - DNA, 937 bp, Oryza sativa
  Clone ID: PAT_MRT4530_41171C.1
atggaggtcttgattgtgcttaagaacagcttcttctcttacatcaccagcaacgcgacgcttttgccgagcggaacgctggagtgctgcgtcgaccaccagcacgttctcaacctcaaccccctgtgcaagcccagcgaggtcgcctacaccctcatcccaacagtgttctacttcgagttcctcctcatcaactccggcaacgacgtcgccaccccggagcccgaccactgtgacctcgtcgacgtcaagctcggacacgagtacgagctcgtcgtcaccacctactccggcctgtaccgctactgcgtgggcgacgagacgtcctcccaattcggcgggcccttctcgtactgcctctcgccgacgagcggcggcactgggttcctcgccctcggcgcgcccaacggtagcaacacagcagccggcttctcgttcacgccgatgcgctgcatcccctcggtgccgacgttctacgtcatgacgctcaccggcatcagcgtcggcggggcaccgctcgccatcccgccgtcggcgttctcgagcggcatggtcatcgactctggcacgctcatcacagggctcctgacgacggcctacgcggcggtcacggcagcgtcggacgcggcggcgacatcggacctcctccacgacctcaccccggagagctacgtcaacgacaccgcgcttcggcagaaggcggaggatgaccacggcattggtttactcggcggcgacgatgatttgcccaccttcgaccgcctctggaatggcttctgctacatcaacaacaccctaatcgctatcaatgagctcctgccgtatccctgccggcccggtcgccattgcgccgccgccgagctccccgagagctcggtgccaccgtgcatcgccgcgccatgcgccgggatgccgccgtgcatcctcgttgtcggtg

SEQ ID NO: 37442 - DNA, 371 bp, Oryza sativa
  Clone ID: PAT_MRT4530_41172C.1
atggagcaacctctcttcgaggtgtctgctcctaggggcgaattctatgagccacctccttcatcggagccgatttatacaactagctatgaaattcgcgccgaactcatcagcatggttaaggaaaaaccctttttctggcttagatctagaaaatctccaccatcatctacgggactttgaacaagtctactcatgccttaagattcgtggcatgagacaagaaattgtatggtggaaattatttccgttcacccttcaagagagagcgaagcaatggtacacctctaccgttggatgtgtaaacggtagttgggaaaagttgcgagacagattctgtcttgccatcttcccagttactcgtattacat

SEQ ID NO: 37443 - DNA, 2142 bp, Oryza sativa
  Clone ID: PAT_MRT4530_41173C.1
atgcagcgcatcggcgtgaacgagaagccggctgctgtgttgctaccgttgggcgcgccgagggcgaggaacccagtgccgccgctcgtcggcgagaggcagtacgagaagggcccgccgaattgggaggacgtctcctgtctccgacacgagcaactccggcgtgccaccgagaccgaggaggctgtcgaaggtgaacatcggcgccgcgttcttgaacctggccacacacagcacgtcgcccacgcagtagcggtacaggccggagtaggtggtgacgacgagctcgtactcgtgtccgagcttgacgtcgacgaggtcacagtggtcgggctccggggtggcgacgtcgttgccggagttgatgaggaggaactcgaagtagaacactgttgggatgagggtgtaggcgacctcgctgggcttgcacagggggttgaggttgagaacgtgctggtttcagtaaacaagttacatcctccttctccccagacatttcaggtacatgaaagacaaaaacacatcaacatcgagaatatgaagatgtatgattttgaaatatggaagccagagaactctgctaaggtcccgaagaacagcattctgagaaagcatacaaagcgctcctctttcactgtcagcatcaacaaggagaaatgcagcaatctgaaagggtcagaagccatagagctaagccacaagttggggaagcatgttacattctcaggggtggatgacatacatattagaaacaagctaagttccacgttaccccaactgcaaaaccactgcaatgtgtactcagacaagtctaatgaagctgacagattagtatctgcaaaaattagttctcatgagaacaaggaagcctcaggtagggatatatacgacagatggacttctgaatcaagtggtgcaaaggacccaattaacttgattgatctgaatcgcacgctcccatgtattcccgattttaatggcgcattcatttctggttcagaggtgcctgatcttgagcatacggagaatgcaacttctgatctccaaatacctggtgatgtaagagaagaagctgttcttaagcacaatcaagacctccattccaaatcaccgcgatcgcagtgtgaacttaacagttgtgatcttgggagaatcattaacttaagatcaatagcctcactgttgcctgatgaagcaattaacatttctgacagaggaatgattggtcatccattgaactcaacagaagttaataagttttatgctgattatgagagaagttcagtaagagatgatactatggaaggaaaggctccttacatattgcctcagcatacagttcagtacacaagtcagtttacggagaattggtacaccaatatgaatttgggcaactttcatcatgctggaagagaattttcttcttgtccatgtgaaaaccagctgaattctgagaaacccatgttacattctgaaatcaatgtgcaacatgagcatgcagttatgtcacaacgtaccatgcgtctgatgggaaaagatcttacagtttccacaacaggtggcaaatgcattggtgagacagcaaaggtgcatgtgaactcctctgtcagctgccatcatactactaatattttcttagagttgccacgacaaggtcacccgtttctgtcactgcaatcccgaagtttttccaatatacaggtagatgccccaagcacaagccatgattatgttggatacaaaatgcataatttaaagcgtcgttttccggaagctgatgttttctctgggaatggaatcgaatgcgaagataggttgagggacttttcatatttgcactgtggccaaaatgcgcttgctggattttcacctcaaggaggaaaatacaacacaagatctgatcaaaactcactgtctgctacaacattcttgcctaccttgataccacatgccaagcagtcagcagtttaccgtgccaattcaacttggaaacataatccctatcctgcaaacttactagttcatcctcctgatggtacaaattttagaaaggatcaaaaccagataatcagaggagttgcagagatcccaagttctgtaaacccatgtcaagagatactgtttggaagacgagaaaaatag

SEQ ID NO: 37444 - DNA, 450 bp, Oryza sativa
  Clone ID: PAT_MRT4530_41174C.1
atgaagaaacgacggttgccgccgcagtataggccgacatggatcagagagcaaagaaaattgagcaaccgtagtcgtcgatccgtcgccgccgccggcgaccatctccggccgcaggcgagttttgacagcgacctcgccgccgtccttaacgacgacggtgacctgtcgttcgatgatctgatcttatctgttcttcttttctgtccaaagcgtccatggaagaacatggcccggggtaggaaaccagaatgcagcagcaatagatacgagctcatatcaatcagcgaagacactaacatccaagagatcatttccatcatcaaggaaccaaaagtagtaggagacaactgtacatgttcatatcacacgtgggcgaacatcggcggggcaaagcttccactttctttcaatccaaccacacggtcatgggcaccgggaatgcctcat

SEQ ID NO: 37445 - DNA, 718 bp, Oryza sativa
  Clone ID: PAT_MRT4530_41175C.1
ccagagttgagggcttgaagcgctcggagtgaagggagaagaagagcggcggcggcgatggaggggtgggacaaggggacgaagagcgtggtgggcgagatcccgctgctgtcgacgcgggcggggccccgggacggcgaggcgtggcggcagcgtctcaaggaggagtaccgcgcgctgatcgcctacacgtcggtgaacaagtccaaggacaacgactggttccgcatctccgccgccaaccccgagggcacccgctgggagggcacctgctggtacgtccacaacctccgccgctacgagttccccctccagttcgacatccccgtcgcctacccccaggtcgcccccgagatcgagctccccaccctcgatggcaagacccacaagatgtaccgtggcgggaagatctgcctcaccgtgcacttcaagccgctgtgggcgaagaactgcccaaggttcgggatcgcgcacgcgctgtgcctcggcctggcgccgtggctggcggcggaggtgccgattctagtcgattcgggcatggttaagcacaaggacgatgaggcggctccggccgatgcagcggctgctgcgtctggatctgccgctgcttcgtaattgtaagtctgtgtcatgtggctgtatcagggttggaaatccacccagttgtgaactaataagaataacccctatacaatgttgatgcgctgatttctggttg

SEQ ID NO: 37446 - DNA, 271 bp, Oryza sativa
  Clone ID: PAT_MRT4530_41176C.1
ggcatccatgggtaaacatcaggttaatgtgaaatgaggagtgatgggttcagaaaccacctcctggacgagaataactgtaattttcaaacaaccttcctgaccaaagtatgacctgtaactccgcaccatttgatattacacacgcccaacattttttggatggttaaacagctctttgcaagcatcacaccaattcttccgactgatggcctaacttttctgcgctgaaccctccatctcactggttcttaaacatttcatgccccct

SEQ ID NO: 37447 - DNA, 251 bp, Oryza sativa
  Clone ID: PAT_MRT4530_41177C.1
aaaggaagaaaatggcacccttataaagggggatagaaagaaccccaccaaaatcaaacctggggggggggagggggggaaatgccaaaactgggtcccagttccattacttggaaggtcactttcggacccatacgaaaacccgggggaggattgggggggaaaattaggagcaaaagcaccgcgcccttggccccaattggtttgggggcccggggcctgccgccggggaaggggggttggttgagcgc

SEQ ID NO: 37448 - DNA, 423 bp, Oryza sativa
  Clone ID: PAT_MRT4530_41178C.1
gatcaattagacacataacttaactagatgaatcgaaataagaagaagagctgtactgaatatttgatcaagggaacaagaggatctaggaacagtgactaatctaaggcataagtacaccacattccacgtcactaccactacactccactacaccaccctgaaatcacaccacgtacacacatgtactgatgcagtcttcaagctgaagctctaatactgaccgcatgcgggttagctggttgaacgcctgctgaaggatgttgtagagaacccaggcgatcgccggcgccaccacgaacagcaacagcaggccgcggttgtcgtcgtcctccgacgccaacggctacgccgtcaggctctccacctgctgcgccgtcgacgccttgggcgggaacgcgagccaggtacccggcgccgcgc

SEQ ID NO: 37449 - DNA, 252 bp, Oryza sativa
  unsure (1)..(252): unsure at all n locations
  Clone ID: PAT_MRT4530_41179C.1
ggaaggagaggtaggggtcctagggcggaggtgcgaaggggagcacccgcgggcgcctccgggaggcgaacggccggcgaccaccggtcttacaagcccncgcctaggttactagggtttttagatgacaaaaacaaacccacatngttttatggtaaagtatcaaacaatnaaggctgtntcagatctggtctcactaagangncaagntatggntagttttcgncttaaccgcctnccctcctcttcaag

SEQ ID NO: 37450 - DNA, 891 bp, Oryza sativa
  Clone ID: PAT_MRT4530_4117C.1
atgccgcccccaatcgccgggaacgcccgcgtcttcctcggctgcctcccatggccgccggccgccattcctgccgccgttccgacctcccccgtggccggctccctcttctctcatataaaatgggatcctcatcccccgttctctcgttttagccccctcccgagcctccccgtgccgcctctatctccctgcctgagcgccggtcgacgtcgccaccacctccctcggctccgcgacgccgccctcatccccggcatcacctcctcctcgcccgaagctcgccggagtggcctcctcgtcggcatccagtacctccccgtcttcggtcggctcctgtacgtcgccggtacgccgaccgacgtcgccgtctcctccgtcgacgtcgcgcgcgttccacgcccgtccccgctcagccgctgctgcctgccatcatcgtttcctcgtcaccgttcgtcctcgccgatcgacgtcccgtcggtcgcccggctcgtcgtctcgcggcgccgcctccgtcatcaacatcgctgcggcgtgttccacgctgtcctcgtccccgtgcagccgctgccggctgtcctcgtcgtctcctcgccggccccggtcatcgtcgtcgtcgtcgtcctctcgtcgttcccggtcgtcgtggcgttcgtccctccgtcgagccgttctcgtccgtcgtccgcgttcgtcaagtgtgccgctgcagcccccgtcctcgtcttcgtcctcagctccgcgtcgtcaagcctcgtgccggccgcgtctcgccttcgtccaaggatcgccgccgaagccgtccccttgccgttcgtctccgttgtgcccgtctgtctccgccgcgcccgttcgtcgttgtcgttcccgtgcctcgtcgcgtggtggtaa

SEQ ID NO: 37451 - DNA, 1520 bp, Oryza sativa
  unsure (1)..(1520): unsure at all n locations
  Clone ID: PAT_MRT4530_41180C.1
cctcaacccgacaccgccatggccgccgccgtccgccgcctcctgcgccgcggcctctccacggccaccgctccgccgcccaccccgggatccatccttaacccgtcctccccatccaccccgctcacatcgcggcagaagagccgcctcgccatctccctcctcaagtccaccccgccgccgccccccgaccagatcctctccatctgccgcgccgcggcgctctccccggactcccacctcgaccgcgtggccctctccctcgccgcctcgaagctctcttccgccccggactccgttcgcgacctcgcctcctccctcctcactccccaccacgccccccacgccatcgcgctcttcggccaggccggcctcctccccgacgccgtctccaccttcaagtcctccccgtcgacccgctccctcaacgccctcctcttcgcctgcctcgtctccggcaaccacgccgaggctgcccgcgtcttccagaccttccccgatgcgtactccgtcaagcccaacactgacaccttcaacgccattatcaagtccttcgccgagtccggcaccacaaggtccttctactcggtgctcgatgaaatgtgccagaagggtgtgaagcccaacgccactacgtttactacggcgattgctggtttttacaaggaggagcggtttgatgatgtagggaaggtgattgagctcatgaagaagcacggttgtggtgagtcgctgccagtgttcaatgttagggtccaggggctgtgcaaacttggtcggagtggcgacgcaaaggcattgctgaatgagatggtgaagaaagggacaaagccgagctggctcacttataatcatttgattcatggattctgcaaggagggggatttggaggaagctaagcggctatacaaggagatggcaaagaaagggcttgttggggatagtagcttctattatatgcttatttattacctttgtaagggtggtgattttgatactgccgttggggtgtacaatgagatagcagccaggaattgggtgccgtgtttttcgaccatgaagatgcttgtgaatgggcttgctggaagctcaagggtcgatgaggcaaaaggtatcattgagaagatgaaggaaaaattcccagataaggctgaagggtggaaggaagtagaggatgctttgcctcaatagaatangccgatggacgaacttgcagatgaacagtactgcgcccttgattcaattcaatcgttgaacatgtctttttcagaaatcaggaacttcaccaacatttgatcgattggcttgagcacgagatttgttacatatggctagttccagctatggcgcaccatattttccgtctgggatacttgaggcgtttgaaagtactggtcttaagtcatctgccgaatatgttctggacacttattatctggtatgctgttacaaattagtgtggttcacggagatcgatataataaccacccattcatacttttgtcaaaaaaaaaaaaaaa

SEQ ID NO: 37452 - DNA, 274 bp, Oryza sativa
  Clone ID: PAT_MRT4530_41181C.1
atggggatgcctagcatgcaagacgcattacgctgcctcccgccgctaatccggtcgcactatgccaccgctaaccccgttgcattccgttgtatcctgctgctaatctcaccgccgaggacgccacagccgtgtgcgaaggtatatatggagggggctgatcacaaaagtgttgcctagtggtatgccactttggcggtcaaacgtggtcaaagaatggttggaccgagctaggcgccgtacgacggcacctgacaggagcgtgtcgtaggga

SEQ ID NO: 37453 - DNA, 3374 bp, Oryza sativa
  Clone ID: PAT_MRT4530_41182C.1
atggcgacgcgcggggaggcggcggcggcggcggcggcggaccgggacatggagctcttccggagcgggtccgcgccgccgacggtggagggcgcgatggccagcgccgccgcggccgccggcgacgtgttcctggacgatgagctccgggccgacccggtgtaccagagctactactactccaatgcgcacctcaacccgcgcctcccgccgccgctgctctccaaggaggactggcgctcggcgcagcaccgcctccgctcctccgccctcggcgggatcggcgacggcaggaggcagccggccgcggcggcgcagggggatgggctcgtggggttgcccgggatcgacctcgatcggcaggggagcttctccagtatcttccagtttcatcttatccaatccaaggagagctcgtatcagctggacatgggtaagcagggcgccgaccgcaacattagtgactttctggattcttctcggccacagtatgctctgcatcgtgagactagtagagctatgggtggtctgcagagtgacagcaatatacaaagcttggctgaagttcagaacaatgattcatcagcacatacatatgcctctcttttaggatcatctctttctagaagcgcatctccagatcctgagcttgttaggagggtccccagtccttgcctccctccaattggtgtgaaagtcagtgctgatgataagaagaacaatggtggttcatcttccttccgtcgaagttcgtctgctattggtgaatctgataatctgatagctgctttatctgggatgaatttatcatcatctggagcagctagtggacagcaaactgtgacccagtctgagctctaccaggatgttgataatgtccgtaagtttctatttgatcgtcagggtgatcaatcaaatggcaaccagcaacactcctatatgaaacatcccgaacaaggacattttaaggcacctgatggttactctgcaaactcgcctaattcttctatgataagaaatcaaattaatgctgctagtttcacatcgtttgacaatctgtctgctggatcaggctttgcttctcctaggatcggttctaggtccccaggtgggactttatcttcaaggcagaatttggttggtggatctaactttctgaattacaatggaattggaagtccaaatgcagcaacttctcttcaaacagccattgatccgtcatatattcagtaccttcaggcagctgagattgctgcccaactcgcagctagctgtgatgatcctctcatggccagtggccatctgggaagttcttatatggatttacttggtcctcagaaagcttatgctagtccattgcttcagtcacagaagaactgtggctactatggaaaccttggatttggccttggttattctggaagtcctttgatgagtcctgttcttccctcttcccctgctgcacctggtagtccacttaggcatggtgaacgcagcatgcgcatgcaatcaggtataagaaactttggtggttcctttggttcatggaatcctgacctaggtggaaagatgaacatcaatatgatgccttcactcctggaggaattcaagagcaacaaaagcaaatcttatgagctctcagaaattgctggtcatgttgttgagttcagtgctgatcaatatggaagccgattcatacagcaaaagctagaaacggccagtactgaagagaaggacatggtcttttcagaaatcatgcctcaagctctcacgttgatgaccgatgtatttggaaattatgttgttcagaagttctttgagcacggaagccctacccagataaaggaattggccgaccagcttattggacgtgttcttgctctcagtcttcagatgtatggatgccgggttatacagaaggctatagaggttgttggtttagatcagcagactaaaatggttgctgagctggatggacacgtcatgcgctgtgtacgtgatcaaaatgggaaccatgtaatacagaaatgcatagaatgcatccctcaacatgctatccagttcattgtctcaacattctatggtcaagttgtgatgttatccactcatccatatggttgtcgggttatacagagggtgctggagcattgtgatgatcctacaacacagcaaataatgatggatgagattctccagtccgtttgcttgctggctcaagatcaatacggcaactacgttgttcagcatgtactggagcacggaaaaccacatgagagatctgctattatcgagaagttaattggacaaatagttcaaatgagccagcaaaagtttgcctcaaatgtcattgagaagtgcttagcctttgggaatcctgtagaacgacagattttgatcagtgaaatgcttggatccactaatgagagtgaacaccttgaggtaatgatgaaagatcagtttgcaaactatgtggtgcagaaggtgctagagacttgtgatgatcagcagagggaggcgatccttacaaggataaaagcacatctgaacacgctgaagaagtatacctatgggaagcacatagtagcacgcgtagagaagcttgttgctgctggagagaagcgactagggcttcaaccagcatgcaccagtgccgcctgaagggcaagcaatgctgtacagctaacagtggctaggtttggtttgcacgctcctggtcgtcggctccagctaaaaacgtaggccagtatggcctatttgagaaataataaaaatacgcatcttaaaatcgcttgcactggagagtgtatattatgtagttgaggagcacgccgcaggcagcagggatggatgatggattgagtgagtgatgtgtgcaagtgctaatccaatatggaaggaagaagttgtaaagatgaggaggaagaagaagatgagtatacgtactctgctgtacaaattttatttagcactagagagatgaaaagaaaagagagaggaagctgttagctgtcaatatgagtgagtgatgggttgttgttgatgctgtaacataactagagtactactcagggcacaaaactagcctaagccctaagccttggtttttagtttttacagtttgaagctgaagctaattagtatcagctttgctgaacctggtttgttaatttgtcgcgcgccccccgtcacgctcgtcctgcgcctgtacgtggcgccccgcgcccgggagaacgtcgccagccacctccagaagtatcgcctctacgtgaagcggatgcagggcctctccaacgagggcccttccccctccgaccacatcttcgcctccacccccgtcccccacgcctccctccacgagcaggttccttctcctt

SEQ ID NO: 37454 - DNA, 1310 bp, Oryza sativa
  Clone ID: PAT_MRT4530_41183C.1
gcacgggccagctctggtcccggggtggttcttttttttctctggtttcgttcccaatacttcagccgttccaggcggcacgttcagttcttcaggacttaccctgccactcgtgcgaagttcaactctcaacttgccatgttacaaagtactcatgtcaacatggtaatagtgaaccctaaaaaaaccatggtaatagtgaagaaattacacctttggaatgatgaagcgcagaaaaaaaaagaaaccaccttcaacctacttacagtgaaaaattaaaaatgtacaagttcgtcattttctgacatatataatctaagttctatcaccgccaattattttttggagcctaggaatcacatagtattgacctggttggatggatatccaaatccaaggtccaattctctcatgagcaattcgatttcaaacctgctgtggcaaaatcatagatccattgtgccaaaaacttatatatggtagtaaaggagctgaatacatgaatcacgtgtgcaacatatttagctagtgctatttatagttcctccaatagttgaaaactcaaattaaactcaagaggacattatgaaacatggaaaccttatgagatggaaagcacacactcaaaattgcaagtactattcactaaaaaaagatatggatatactatttaatgcaaaggccatctatgaaactttggaagaacgatgcatcacaggtattgtttacaacagttgagctgtagtagaccacagatatagatcttcagtatatacttgccatctgtaccttctttttttctttgatctatgcacatggacaactaatccgatggcatgatcttcatggtaacggcctgcccacgtggatgccgcatccggacctgaaacgctggcaaagcacacaatatcctaaatgatccatcatcagcacctttcattactgctgcagtctaacctaatgaaatattgttgttagatggttctcccagtcattcaagtaggcacctcccaagaagcttatgggagctttcctgccataaaatcctgaaggccatgaacacatctattactgaagaactcagctccatctaccaaagcaagcatcacaccaagcttaccatttgcttttagagtccatgacatggattagcgatcaactctgtactggttgactggttcacattgagatgtcagaataccatcaccatccatgtttgctcactcatctgtcaatagcaagaggcctgcaacctttgtgaaatatcaaccaataccaaaatggtacaacattaccaccggtttttttga

SEQ ID NO: 37455 - DNA, 326 bp, Oryza sativa
  unsure (1)..(326): unsure at all n locations
  Clone ID: PAT_MRT4530_41184C.1
gacgttttgtgagtgtgagtcagtgtcagtctgccaccgccgcaccgctccgagcggtaggtgatcccgccgccgcccgccgcccgccgcgccgctcgccgccccgccgccttccgttccgtttccattccgcgacgngcaaacggagtctactcccattccttcccacccgcgatccctgatctcctggtgccgctcctcttttctttggcgggnnccctagccccccggaccctagccggcggggacctcgtctgccccttgtccatgcgccgtccctgggggcccggccgccttctgcccggcgggctgggtgtgctacctgc

SEQ ID NO: 37456 - DNA, 1272 bp, Oryza sativa
  Clone ID: PAT_MRT4530_41185C.1
atggccggccgaatccgatccagaattcctccgtcgcgaatcctcccttgtaccctgttcgatctcgtgcgcggcgcggagcggcggacgacgacgatgccaacggcggcggcgatggccggagggatggcgacggggccaggcagccgcgtgacgcggtacgccaagtcgacggcggcgtcggtgacgccggtccgccccggcaagacgcacgcgctgtcggcgctggacaacgccatggagcgccacgcggtgtacctggtgctctactaccgcgccgcgccggggctcgacagggagccgctcaaggagtcgctgtccgacgtgctgtcgcagtacccggccatgaccggccgcctcacgcgccccgagttcgcggacgacgggggcggtggagggctgagctgcacccacctgcacaacgaccccaccgccgccgtgctcttcctcaacgcctgggccgccgcccaccgccgggatagcccctaccctccgttcctccactcgccggcgctcgccgccaagtccgccgcgccgccgccggagcacccgctgctcgccgccaagtccaggggctccccggacaccggcggcgagatgtcatccgccacgttccgcttcagcgcagccgcgatgcgcgcgctgctgtccgccgtcgagccgggcaccaccccgttcgccgcgctggccgcgctcttctggctccgcgtcgcggccgccgccgccgacgccgccgccggcggcggcgcggccgaggagagggagctgacgctcgcgctggacttccggaagcggatgcaggcgccgctgccgacggggtactacggcaccgcggtgcacttcgcgacggcgcgcgccgacctgtcgtcggggctggcgagcgtggcggccgcggtggagcggcgcgcggccgccgtgccggaggaggagctgtggcccgccatcgagtggctgcacacgcgccaggccgccggcggcgagccgttccagatgtacgggccggagctgacgtgcatggcgctcgaccacgtgcccctctacggcgcggagttcgcggccggggcggcgccggcgcgcgccgcgtgccgcgtcggcggggcgagcggcgagggtctcgtgatcgtcctgccttcggccgagggcgagtccgcgagggacgtggcggtgacgctgccggcggcggtgacggccaggatctgccgcgacggcgaggtgctccggtacggcgccgacgtggtgttcggcccaaaggtggacacgcaggcctcgtag

SEQ ID NO: 37457 - DNA, 327 bp, Oryza sativa
  Clone ID: PAT_MRT4530_41186C.1
atgcagccccgcgtcgggtgccaagttccgccggaacgtctggctccgcgtgcttttgcctcttggctgggctgccctctctcccccgtggcagctggttctaggactggtggccgagcaccagggcccgctttacctgagcatctcctcgccggcttcgactccctggtgcttttggtttcttggcagttgtggaaggaacagaacgctagggttttcgactctgcgctctcttctgtctcagtggttctggagtccatccactcggagggtcgtctgtggtctttggctggcattgccgcctttggggatttgttgggagtgtag

SEQ ID NO: 37458 - DNA, 949 bp, Oryza sativa
  unsure (1)..(949): unsure at all n locations
  Clone ID: PAT_MRT4530_41187C.1
ccccaatccgatccagaattcctccgtcgcgaatcctcccttgtaccctgttcgatctcgtgcgcggcgcggagcggcggacgacgacgatgccaacggcggcggcgatggccggagggatggcgacggggccaggcagccgcgtgacgcggtacgccaagtcgacggcggcgtcggtgacgccggtccgccccggcaagacgcacgcgctgtcggcgctggacaacgccatggagcgccacgcggtgtacctggtgctctactaccgcgccgcgccggggctcgacagggagccgctcaaggagtcgctgtccgacgtgctgtcgcagtacccggccatgaccggccgcctcacgcccccgccgccgccgccgccggcggcggtggagaggcggnngaggggnnnnnnnnnnccncgnnggttgtgcaccacgggtggatcgtcaagtgcaacgacgccggcgtgcgcacggtggacgccacggcggcggccacgctcgacgagtggctcgcgacggcgtccggcgaggaggagatggacctcgcctacttcgagcccatgggccccgacccctacatctggtctcccttctacgtacagctgacggagttcgcggacaaatcgtacgcgctggggctgagctgcacccacctgcacaacgaccccaccgccgccgtgctcttcctcaacgcctgggccgccgcccaccgccgggatagcccctaccctccgttcctccactcgccggcgctcgccgccaagtccgccgcgccgccgccggagcacccgctgctcgccgccaagtccaggggctccccggacaccggcggcgagatgtcatccgccacgttccgcttcagcgcagccgcgatgcgcgcgctgctgtccgccgtcgagccgggcaccaccccgttcgccgcgctggccgcgctcttctggctccgcgtc

SEQ ID NO: 37459 - DNA, 418 bp, Oryza sativa
  Clone ID: PAT_MRT4530_41188C.1
cgtacgatgtagtgtacatgactttcattctagttaatagttgggggtttcatgttttttgataagcaataaaatcttggaaccttgctcttcttggttagttctgtatgttcaagtgtttgtctcctggccgatgtatgcagcatgaagcttccagctgttcaacatgtggattattttcaagttaattactaacaggttattaatgaaacaatcctccctagccttgaaagagtgctccatcccttgtcatttggtttcactagcattgcagttatctcaatttcacaactatagcttcatgtgaaaatggttctttgttgttgcctgacattcatagaatctgttcccctgttccttatatcttttttttctaagcatcacctttcctttttacagcaacgacagcattttcagc

SEQ ID NO: 37460 - DNA, 430 bp, Oryza sativa
  Clone ID: PAT_MRT4530_41189C.1
cagcgtacatcctggtccttcaggcttcaataaatcataaaaaagagcatggaacatgctttgtttgtagtttatcccacacaagaatctaattctcgatgttctctttacactacactactacagcaaccaccttttacacgttaccgtgccaaacaaaggtcaaacgattatcttttttttaaaaaaaaaggggagaaataagtaataaatgaaaaggttaaaggtataagataaaccttgtaccggtgtaatcctttattcttgcctaaactcgttcttaactacttacttttacctcccaaaaacttgctaccttttaagctgaacccagatccctgtccactaattcaaggaatttagtctttttttttacctggcccattgtttttgttgccaaccttacaaccgcatagtgcggcctttacgc

SEQ ID NO: 37461 - DNA, 267 bp, Oryza sativa
  Clone ID: PAT_MRT4530_4118C.1
atggcgagccggcggcgctgcccagtggtggcaaatcgcaaagaacgccacccgccactacactactctacagcttcggaggagaggatgcgtcggccagatacccctagtagccggagagcggcggcgggatgcggatgccggcgccgctgcccgtgggaaggggaagccgcgacaggggtggtggggaagagcaccgccgtccccgccgtcggccctgccacgacgctcgggatcgggatggggcaccgccgccgtcacgcgtag

SEQ ID NO: 37462 - DNA, 414 bp, Oryza sativa
  Clone ID: PAT_MRT4530_41190C.1
atggccggcccctgcggctcttttgcattcggaccccttgccgccccaccaaagggcggcaagggttttcatgcaaaaaaaaccaccctccgtcaccgtccgttcctcccccgtttgccactccggccgacctcatcaaccccgacaggcccccagccattcagtgctgacatatcgtggcagatgacatcaggatcctctcatggccatggccattgcaatggatctcactgtcccccattgatgaaggcgctcatgcttcttgttgttgtgacactaattcttcttgcggtgactgcgaatggcctcttcatgttctcgtggcaccgatggcacaaagagaagggccacaggctcgccgccgatcgtcacggcctccaccctgaaatccttctctgcctgtcccctgattaa

SEQ ID NO: 37463 - DNA, 3078 bp, Oryza sativa
  Clone ID: PAT_MRT4530_41191C.1
ttttctggttttttctttctccgggctttctctttcagccttactcagccgaccaacaaagatacaagcgcccaaatccagagaaccagcaggagaaacagcgatttatgtcaaacccaaaagacaaaccactatgggtctgatcttaccttacaaatgcaataaatgaagaaaaagaaaagaaggaaataagatgatctgaacatgaaatgttcctccccttctgatagcctgtgccaagccagagaaagagtggatggggcagaacaggagaatagaaggaaaacatcggtggagcaggaaagggctatctatatgagggaagcattatccatactccctatggcttactttgcattcctgtagcggtccaatacttcatgtcgttgcaaaggcgagacagacagcaaccacttactaaactcaaggtcgttcatacccatgaaagatgcaattcggctgaattccttctttttctgcaccagtgagtaagattttgccttaattgtatgcattgtttcattcttcttactttgcagctcctctaagtgccttgggacagttttatcttctgcacagttgcttgcttcatttgtcctcgtgtttacaacatcttcatttcggtgagcataaactattccacaatggtacaaattcttgttctcgttatgtattgctgtcattgaggatttcatttgatcttgcgtaccaaatatatttgtatcaactatttctcgaattcctattgtttcagctgtattacccttcccatgttctccatgcatttcaatgatctcactggtgaaaagcttatcagacaagtcgcgaaacagattgcatatcccaaagagctcaccttgaaattttttgtcatcctgcactccttcaaagtaacgtttttctatttttccagagaccgcaatattggaaagctgttgcttatatatttgtcgagaataaataagctcttcaagggaaccagcaccaagtaggcgaaatacagtgacatgccgcctctgtccaaatcgaaatgacctgtcttgcgcttgcaagtcttgcgcagggttccaacttgggtcaaaaatcaccacacgattagcactgaccaggttgacacctaaatttcctgcccgtgtagatataaggaaaacctgtttgcttgggcatctattgaactcatcaattagtaattggcgtgcattcatgggagtcgttccatcaaagcgagaaaagcagtaacccttccgtataagaaatttctctagtatgtcaagcatcctgactgaatagctgaaaagaagaattttgtcaccctgcagagtccataatgacaatagtctttccaacgcacgcatctttccacaatgttctgcatcactgagacccatgaagttttcacttttagcacctccaccaactaattcaatatctgtgtcaaagacagcagctgcaagctcagcatctttcttctgcttctcaatttcgtctttcaggtttggctttatcagctccagatggttactgatctgctgaagcttcccaaggcaaggaagaacaagacagaaggggcacagagaacaaccctctggattgtctctgtgaagataagaccagataatgccatgtggttcagttctcttgcagcattccacctgagtcaaaggacttccacagctacatgggagatccttgtttataaggatttgcacgtcaggctgttgcagcattcttctgtaaacgcgcttttgaacgtcactcattctgcagaaaacaatattatcctcctttccaagcatgagatgcccaatggtctcttcctttgttcttctcaacagaaatttgctaagaactgaaacaaggtgcttcttgcgcttatcagcaacttgtacaaatctctcaggagcactgaacctctggccatgttttaaaggctcgtcataatatactcgaaagtgttctcgatcccccaagcaaccaggtacaatccagtcaaacagattaaataattccattattttattttgcattatggttcctgtgagaccaaaccgctttcgagtagtaatttccaagcaagctgtatataactttgatttttcattcttcagccggtgtgcctcatcaacaaccacaaggtcccacgagatgccacacaaaatcttgccatgaatcctaaaagtgtcaaaactggtaataactatctctagtctttgagtttcaaccttttgaagaaccaggtcacgatttgggccatgatagacagcaacagaacatcttgcccactctgcaaattcattttcccagtttcgaattactgatgtggggcagaggatgagtataggggcaatctttcttccttccactaattgatcaccgtggtcattatcttttccaataacagctgataagaaagcaattgtttggatagtctttcccaaacccatgtcatctccaagcacaccgccatggttgtttctatacagattgtataagaatcttacaccatccctctgatgcacaagtagcctgcaatttatcgaggagggtacctggacgacggggcgctctccgggcggcgagagagcaagcggttcgtagggcccgcgggagtcgagggaggccgctggcggaagggaagcgcgggggcggatgcaggggacctcgtcctcctcctctggcagcggcggcgcatcatccgccgccgcatccgaggtcggggaagtgcgagggggcggtggcggcgagacggaaaaggaggaagaggaggaggaggcatcaaggcggaggagctgctgcgagagggacgtttttgggggcctcctggcgaggagaggaggaggtgatcggggttgggactcggattggggctgtgaaaaggaggaagactggagggtttctttgaggctgtggagcgacatggcgttgcttggcaggggaggaggaaaccggtcggcggggggcaacgccagcactggcgaggaagcgacgttggtagcggcaggtgcagaacccgtctccagtctcccccgccggcgaggaggaggcaccatcgatgctgagctgctagatctgccctga

SEQ ID NO: 37464 - DNA, 1383 bp, Oryza sativa
  Clone ID: PAT_MRT4530_41192C.1
atggcagcgccacctcacgatcacggcggccgcctccgcgtcctccgaaccgagcacgtcacgccgtcgtcgaccggcgatgacgccgacgcgctctccgaacgtgctctgccgctcaagcccgtcgagcccgtcgagcgactcttcctctaccgcctcgcccccggcgccgccgtccacggcgccctgtcccacctcgccgactccttgtcccgcgcgctccgcgccttctacccgctcgccggccgcatccgcctcgcgcccgggaagaccgaccggtacgagctgttctaccagcccggcgacgcggtcgccttcaccgtcgccgagcacgacggcgccggcgtcgacgagcttgccacggacgatcccagggaagttgccacgattgcgccgctagtgccggcgctcccgcggggcggcgcggtgctcgccgtgcaggccaccgtgttgttgggcctgcggccggcggcgccgcgcgttctcgccctcggcgtcaccgtgcaccacgccgcctgcgacggcgcgagctcgacgcacttcctccacacctgggcggcttccgcctgcgccgccgccggaaatgtcccgccggagccaccagtcatggaccacagcttcattgttgaccgcaaggacatccacgacttgttcgccgcgcccagggctcagaaagggttcgattcgcccgacgccatggacaggctcgtcgccacgtacgcgctgtcgtcagcgcagctgcagagcatcaaggacgccgtcgccggcgaggcggcacgccgcggcgtcgtcccgccgcctcggtgcacgtccatcgtcgcgacgtacggcgtcatgtggctgtgccacctccgagctacacatggccacaacaacgacggcggccacgacgacggcggcggccgcgcctacttcctcttcgtcaccgaccaccggcggcggatggagggccgcgtcccaagcaggtacttcggcaactgcgtcggcccgtgctacgcctcgatgcccaggaaggcggcggccaccgccaccgtgaccgacggcgtcttcacggcgtgctccgcggtggccgccgccatcgacgaggcggtgcacggcgagaccggatactgggagaggtacccagagcgcatcgtcgaggccagaagggacggcgcgccgttctcggtggctgggtcgccgaggttccgcgtgtacgacgtcgacttcgggttcgggacgccagcgaaggtggagatcgcgtccgtggcgaagaccggcgcgatgtcggtggcggagggccgtggcggctccggcggcatcgaggtgggcattgctctgccgccggagcacatggggaggttcaggacgtacctcgccgacgtcatcgcaggtgtgatctga

SEQ ID NO: 37465 - DNA, 525 bp, Oryza sativa
  Clone ID: PAT_MRT4530_41193C.1
atggccggcccctgcggctcttttgcattcggaccccttgccgccccaccaaagggcggcaagggttttcatgcaaaaaaaaccaccctccgtcaccgtccgttcctcccccgtttgccacgtcagcttgccgcccaccattggggcggcaggggtggattgcaaggtgcaaacaacactcatctgaatatgttctgcctgctctcaggctgtgcagtccggccgacctcatcaaccccgacaggcccccagccattcagtgctgacatatcgtggcagatgacatcaggatcctctcatggccatggccattgcaatggatctcactgtcccccattgatgaaggcgctcatgcttcttgttgttgtgacactaattcttcttgcggtgactgcgaatggcctcttcatgttctcgtggcaccgatggcacaaagagaagggccacaggctcgccgctggtggaaggagattgcataacacattaacagatgacaagagtcccaaatccctcatcatcttctaa

SEQ ID NO: 37466 - DNA, 307 bp, Oryza sativa
  unsure (1)..(307): unsure at all n locations
  Clone ID: PAT_MRT4530_41194C.1
cctgcagtaccnaatcccaannncggccgaacctaccntccanttcccctgccactacagatgggacaccgtggggctctccttcgacccggagacgggcgccaagaaccgggagctggaggtgatccactccaggtgggcgatactcggcgcgctgggctgcgtgttcccggagctcctcgcccgcaacggcgtcaagttcggcgaggcggtgtggttcaaggcggggtcgcatatctttatcgagggcaggcttgactacctatgcaacccgagcctgatccacgcgcatagcattcttatccat

SEQ ID NO: 37467 - DNA, 270 bp, Oryza sativa
  Clone ID: PAT_MRT4530_41195C.1
tctatcacccccccacgcgagcccgcgagccggggcgtgctttgccaccgatctccggcgaccccccgggcgccgtcgtcgtcgtctgcgccgccaccacccggagatcctcccgggtgcctcccccctccccgccgcgtgctcccggcgcccactggcctggccccgaggtgggggctcccctgctccccgcaaaccctaaccctagccctagcccacccccggcgcgggggctgcctaggaaacaggttgcacatttggcggactttt

SEQ ID NO: 37468 - DNA, 2376 bp, Oryza sativa
  Clone ID: PAT_MRT4530_41196C.1
atgacgacagcaccgcctttcgggggggtctctcttgtggacgacgtcgagctggcgaagttggtcagctccggagcgttggttgaggggcaggctttcgccccagggaaaaccgtggtgccgaaacctgtcgacaaccggacggtggtgttcgccgtattttttgaggcagggctacggtttccctgcaacgtgttgttgccggagatccttcgcctctttgaggtggaacttccgcagctgagcccgtcggcgcttgttcggatcgctatcttcgactgggcgtgtcggacttccgggtttgagcccaacgccgagctctttggcgccatatttttcgccaccgtgaactcgaagatggtgatcaccccggctggaacgaaaaaaaccgtgttcgggagcgtgaacttcaacgttcgccccgagcggtccgatctctggccggtgaacgctgctatgtcgaagtgggaccgccattggatggcgaggtggttctaccacaccatccccttcgaggttggttctaaatcagcgaaagccctccggtgccggcgtagggcgattgcgccgaaccggagacccaagatcgctgtggacggcaccatggaggcgcggttcgttctactgcggaaggtttgctcccgccttagctgccgtgacttggtggaggaattttgtatgcttcaaatttttcccctctcccagtcatggcaagtcgcggttgaacaaggcgaagaagtcgacggtttgccgaacctgatactccctaagggggcaaacatgttgaccctcgaccaggccgaagccgaagcccgcaggatgatcggcgatgtttcggtcgtcgagtatagtcagctgttaacgcgtcaagcggctaggcgggcgaaccgggtttacaatggcgaactgcctccccgggcgaatccccaaaaggccgtcgacgaggcagggccttcacgaaagtggatgcgtggacaagtgaagcttgcccccaagaagcgaagggttcctgcttcgtttgactccgacgctgacgacgaggatgatgccaaagaacgtgacggcgaggaggaaggagaggaagaggaggaggtggaggctgtggctgataaggccgcgggtgaggcagtcgaagaccgcgccgacacccccaggtacactcctaccccaagtcctggtcacaacgaaaatggggtggagtcgaacagctccccccttcgtcggaaggatttagaaggggcgaaggccctagttgcgttctcttcgggcgcggcggcaaagggaggtcctgtcaaaaaggtggctaaaaagaaaggactcgtcgatgtcgctcgcgtttttagcgatgacgagtcctccgacgggactccgacttcgcccactggtcgcagcctggatctttcggccgcccccattcctccacttggcgccgctggagtggacggtagtaccgccgctggggcttcggcttctgcggaaaggattgtgatggccgcggcgaaagtattcggcagtcctccgcatcagccggttgcctcgccgctgatggaggcgaagggaaagaaagcggtcgctgagacgttcgcttcggaatattcgctctcggtaccccgcttcgcccctggcgacttcgagacgcgagtggacctccttccatttgtggagggggtaagcaatcttgtactgcccgccagcgccccgagcttgttcaccgaactgaatgagttcgacgaggggtgctctgctataaaaagcctggctgttcggatccttgtggctcactgctcaacggagcgaatcgtgcgagctcgacttgatgggttcaaaagccgtcttcgggccaaggatgacgaactaggccgcaaaaatttggagatggaggcccttgccaacacccttaaggaggcgaaggaggttcgcaaggccgaagcaagcgctgcagaggagtcgcggcggttttcgcaggagatggtgaaaaccaccgagtccgcgcggacagcgtgccaaatgcttcgccttgcccttattgatatgggcgcgaaggtgcggggtgtcccctccgaagatgcctcagccttcgacttctccgaatggacccaacaggctggtggttcggtttcagactccaccaccgcatacggcgattgctgtgcacgcgtgtcagcggcctttaccatgggcctcctgcaacagttcggctgcgagcacatcgccgagttccccaagtacgcgaagggggattgggaaatcagtgcgcaagacatttcgcctgcacttcgtgcgtggcgaaaacaattttggcagaaggacggccgctccgccgctaaggcgcaccttttggagcagctggcgaaagcggaggcggcggacatttga

SEQ ID NO: 37469 - DNA, 1998 bp, Oryza sativa
  Clone ID: PAT_MRT4530_41197C.1
atgaactcgcccaagccgccgccggcctcctcctccccaagctgtcggctacctcctccccaagccgagagcgacaatgtgagcaagatcgactgggataccgttgactttaggggtttggttgcctgtgtcttgtacatgcgtctgcctcgtcgacagatgtttagcgtctatgttcctcaaggacggtgcagatgtcttggcctcaccatccgtgtcccacccgaaacttgctctcattttcgctatgtgaagatacatgtatcttcagatagcgacaacgggggcaatgtcgagagggatatggatgatagtgacaacgggggcaatgtcgagtgggatgcagatggtctaccggagggcgccgacggctgggtctacgggagggcgaggcctgctggggaccttgcctgccgcatcggcaggggcaaccggccggcggtttggtcgaagggcctcatgccatccgccaacaagcccctcacggacaagggtgagattggagcttcggccgagaccgtacaaactatgtggtatggggtctctcttgtggacgacgtcgagctggcgaagctggtcagctccggagcattggttgaggggcaagctttcaccccagggaaaaccgtggtgccgaaacctgttgacaatcggacggttgtgtacgccgtattttttgaggcagggctacggtttccctacaacgtgttattgccggagatacttcgcctcttccaggtggaacttccgcagctgagcccgtcggcgcttgttcggatcgctatcttcgactgggcttgccggatttccgggtttgagcccaacgccgagctctttggcgccatatttttcgccaccgtgaactcgaagacggtgattaccctggctggaacgaaaaaaacagtgttcgggagcgtgaacttcaacccagttgcatcgccgctgattgaggcgaagggaaagagagcggtcgctgagacgtccgcttcagaatattcgctctcggtaccccacttcgcccctggcgacttcgagacgcgagcggacctccttccttttgtggagggggtaagcaatcttgtactgcccgccagtgccccgagcttgttcaccgaactgaatgagttcgacgaggggtgctctggtataaaaagcctggctgctcggatcctcgcggctcactgctcaacggagcgaaccgtgcgagctcgacttgatgggttcaaaagccttcttcgggccaaggatgatgaactaggccgcaaaaatttggagatggaggcccttgccaacactcttaaggaggcgaaggctgaaaacaagcggctccaatcggaactggagaaatggaaagaagcaagggccgaagtcgatcgcttaaaggccgaactggagaaagagaaggcccattcggcggtgctcatcgactattataaccttactgagccgaagatggagtctcttcgccagaaggctagcagggccgaagcgagcgccgcggaggagtcgcggcggttttcgcgggagatggcgaagaccaccgaatccgcgagaacggcttgccaaacactccgcctcgcccttaccgacatgggcgcgaagatgcgcggggtcactaccgaggatgcctcagccttcgacttctcggagtggacccagcaggccggcggatcggtttcggactgccccaccgtgtacggcgactgctgtgcgcgcgtgtcagcggcctttaccatgggcctcctgcagcagttcggctgcgagcacatcgctgagttccccaagtacacgaagggggattgggaaatcagtacgcaagacatttcgcctgcacttcgtgcgtggcgaaaacaattttggcagaaggacggccgctccgccgctaaggcgcgccttttggagcagctggcgaaagcagaggcggcggacctttgtgaagaggaagacgtggcggccggagggggtggaggcgatgcccaggaccacccagaggtgtga

SEQ ID NO: 37470 - DNA, 2760 bp, Oryza sativa
  Clone ID: PAT_MRT4530_41198C.1
atgggccgtctggcgatcgccggcctgatgggccggaggggcttcctcagcccttgcgggagcgaacttgtcaaggcgaagtcatcctccttcggcagacagtcttcgccttgcacccttcgcctgagacgcctctggcctggcgctactcttcgccttgcgccgttttgctccatagccttcgccatgggtttcggcaggtttggtcgaagggcctcatgccatccgccaacaagcccctcacgggcaaggcatctttcgacccctcaggcatttcgccgaatctcttttttcgccaccgcaaacacaccattcgtcatggctccacgtaagccaaaccctacttcggcgaaagggccagatcccggccgagtcgatgacgacagcaccgcctttctgggggtctctcttgtggacgacgtaaagctggcgaagctggtcagctccggagctaagttggttgaggggcaggctttcgcaccagggaaaatcgtggtgccgaaacctatcgacaaccggacggtggtgtttgccgtattttttgaggcagggctacggtttccctgcaacgtgttgttgccggagatccttcgcctctttgaggtggaacttccgcagctgagcccgttggcgcttgttcggattgctatcttcgactgggcgtgccggacttccgggtttgagcccaatgccgagctctttggcgccatacttttcgccaccgtgaactcgaagatggtgatcaccccggctggaatgaaaaaaaccgtgttcgggagcgtgaacttcaacgttcgccccgagtggtccgatctctggccggtgaacgctgctatgtcgaaatgggaccgtcattggatggcaaggtggttctaccacaccatccccttcgaggctggttctgaatcagcgaaagccctccggtgccggcgtagggcgattgcgccgaaccggagacccaagatcgctgtggacggcgctatggaggcgcggttcattctactgcggaaggtttgctcccgccttagctgccgtgacttggtggaggaatttttgttgaccctcgaccaggccgaagccgaagcccgcaggataatcggcgatgtttcggtcgtcgagtatagtcagctgttaacgcgtccagcggctgggcgggcgaaccgggtttacaatggtgaactgcctccccgggcgaatccccaaaaggccgacgatgaggcagggccttcgcgaaagcggatgcgtggacaagtgaagcttgcccccaagaagcgaagggttcctgcttcgtctaactccgacgccgacgacgaggatgatgccgaagaacgtgacggcgaggaggaaggagaggaagaggaggaagtggaggctgtggctgataaggccgcgggtgaggcggtcgaagaccgcgccgacacccccgggtacactcctaccccaagtcctggtcacaacgaaaccggggtggagtcgaacagctccccccttcgtcggaaggatttggaaggggcgaaggccctagttgcgttctcttcgggcacggcggtgaagggaggtcctgtcaaaaaggtggctaaaaagagaggactcgtcgatgtcgctcgcgtttttagcgacgacgagtcctccgacgggactccgacttcgcccgctggtcgcagcttggatctttcggccgcccccattcctccacttggcgccgctggagtggatggtagtaccgccgctggggcttcggcttctgcggagaggattgtaatggccgcggcgaaagtattcggcagtcctccgcatcagccggttgcctcgccgctgatggaggcgaagggaaagagagcggtcgctgagacgtccgcttcggaatattcgctctcggtaccccgcttcgcccctggcgacttcgagacactagcggacctccttccttttgtggagggggtaagcaatcttgtactgcccgccagcgccccgagcttgttcaccgaactgaacaagttcgacgaggggtgctctgctataaaaagcctggctgttcggatcctcgtggctcactgctcaacggagcgaaccgtgcgagctcgacttgacgggttcaaaagccgtcttcaggccaaggatgacgaattaggccgcaaaaatttggagatggaggcccttgccaactcccttaaggaggcgaaggctgaaaacaagcggctccaatcggaattggagaaagggaaagaagccagggccgaagttgattgcttgaaggccgaactggagaaggagaagggccacaccgccgtgctcatagattattacaacctcactgaaccgaagatggaggctcttcggcaggaggttcgcaaggccgaagcaagcgctgcagaggagtcgcggcggttttcacgggagatggtgaaaaccacggagtccgcgcggacagcgtgccaaacgcttcgcctcgcccttactgacatgggcgcgaaagtgcggggtgtcccctccgaagatgcatcagccttcgacttctccgaatggacccaacaggctggtggttcggtttccgactgcgccaccgcatacggtgattgctgtgcgcgcgtgtcagcggcctttaccatgggcctcctgcagcagttcggctgcgagcacatcgccgagttccccaagtacgcgagagggggattgggaaatcagtgcgcaagacatttcgcccgcgcttcgtgcgtggcgaaaacaattttggcagaaggacggccgctccgccgctaa

SEQ ID NO: 37471 - DNA, 966 bp, Oryza sativa
  Clone ID: PAT_MRT4530_41199C.1
atggccccacgtaagccaaatcctacttcggcgaaagggccagatcccggccgagtcgatgacaacagcaccgcctttctgggggtctctcttgtagacgacgtcgagctggcgaagctggtcagctccggagcgttggttaaggggcaggctttcgccccagggaaaaccgtggtgccgaaacctgtcgacaatcagacagtggtagaacttccgcagctgagcccgtcggcgcttgttcggattgctatcttcgactgggcgtgccggacttccgggtttgagcctaacgccgagctctttggcgccatatttttcgccaccgtgaactcgaagacggtgattaccccggctggaacgaaaaaaacagtgttcgggagcgtgaacttcaacgttcgccccgagcggtccgatctctggccgatgaacgctgccatgtcgaagtgggatcgccattggatggcgagggcgattgcgccgaaccggagacccaagattgctgtggacggcaccatggaggcgcggttcgttctactgcggaaggtttgctcccgccttagctaccgtgacttggtggaggaattttgtatgcttcgcatttttcccatctcccagtcatggcaagtcgcggttgaacaaggcgaagaggtcaacggtttgccgaacctgatacttcctaagggggcgaacacggcctttaccatgggcctcctgcagcagttcggctgcgagcacatcgccgagttccctaagtacacgaagggggattgggaaatcagtgcgcaagacatttcgcctgcacttcgtgcgtggcgaaaacaattttggcagaaggacggcagctccgccgctaaggcgcgccttttggagcagctggcgaaagcagaggcggcggacctttgtttagaggaaggcgcgacggccggagggggtggaggcgatgcccagaaccaccaagaggtgtaa

SEQ ID NO: 37472 - DNA, 219 bp, Oryza sativa
  Clone ID: PAT_MRT4530_4119C.1
atggagtggcgctggccgctggccggcctgggcggctgccggctgggtgctgctgcgctggctgctggcagcgtcggccgtcgggactcgggcggggacgggagcgggatgtcgggacgccggatctatatcaacttcttccaaatcatcggccgacatgaaaccatgtcccaacttgccatcgagatcatccaccgtgcccttggtgtagaaatttga

SEQ ID NO: 37473 - DNA, 194 bp, Oryza sativa
  Clone ID: PAT_MRT4530_411C.1
caaaagaaatctcacaatgaaacccaacagaaggggtcgatcttaaacatgcattttatccaacttggtccaccctggtcccattcccaattaatcaagaagaaaccaaacctgggtcggtcatcacccaagggggacattcttgcaacaaaagcctttttccccatttgaaccaaaaaaggcctttacaacac

SEQ ID NO: 37474 - DNA, 1802 bp, Oryza sativa
  Clone ID: PAT_MRT4530_41200C.1
atggaggagcagcagcggccggtgcagcccgccggcggcggcggcggcggtggcgcgccgccagaagagcagtggcgcggcgccgtggaggcggcgctcccgggaacgccggcgtccgccgcgtggccgcacgtcgccagcttctacgccgcgcaccgctacctccctggcatcgacgtgtgcgagcgcgtcggcgacggcggcgaggatggtggcctcctcctcgtccccgggtgcgtccggcacgtggcgtcgagcgcggcggggctgtgggcgcgggaggagctcctagaggcgccggaccacgcggcgcggcgcctccggtacgccgtcgtcgacagcaacatggggttcggccgctacgtcgccacgctccgcgtcctcgacggcggcagcgggtgccgcatcgcgtgggcgttcgagtgcgacgccgtgtgcggcgaggggtggagcgaggcggcgctggtggcgcggctcgccgccagcgtggacggcatggccgagagggtgcagcaagccgtggcggcggaggccgaggcgcgcgccggagaagaagaagaagacggagtcgctgggacgtcgcgcgtgcgttgcgtgcaagacaagccaggtggcagagcggcaatccgcggcggcggtggcggcggtgccgaccacgttcgccatcgggaggggggctacgtgcagccacgccgccgtggcctcggccgcgtcgccgcgcgctgccggctgccggcgctcatctacgtgctcgactcggcgatgagcggtgccgtcgcgctcatggcggagcgccgcgacatgagtgggaccgcccggccgggatgttggttgtgttggagtggacgctcaagtgcggcggcggcggcggcccggcgctcatctccctcccggcggcgtcgttcttcgccggcaacctcgctgggagcttcctgctcacgacgctcgccgacactcatctgggacgaaggaagatgctcgtcatgtcgctggcgaacatgtccgtcgccgtcgtgatcacggccttctcaccgaacgtgtgggtgaacgccgccctgaggttcgtgtgcaggttcggcaggtccatggcgggcacatccgcgatggtcctatccacggagctcgtcgggaagtggtggcgcaacacggagtcgccgcggtggctgctggtgcacggccggaagcaagaggccatcgaggcgttgcggcagatcgcgtcgctcaacgacggcgaaggcattacaatgtcgagcttcaccatgctggatatgtgcgccgtggaggtgggggacggagtggccggtggcgagggcatgttagccatgctgcggtcgatatgtgagtggtggtgggcactccagaggctggcgacgatcacgacggccagcttcagcatcggcgtggtctactacgggatgccgctcagcgtgggcagcctgagcttcgacctctacagcgtagcgtacaacgcagcggccgagctcccgtcgtctttcctctcgtggctcctcatgggcaggttcaaccagcgcagctcggtggtcgagctcaccgcggtgtccgggctgtgcagcctcgcgtgcgtcgtcatcccggcggacccggaggccggcaccggtggcttgcgcctcgccgccgagctgtcctccttcttcgcgtcgtgcgcgaccacgcgctcgtctaggacaacggcaagccgccgtggcctcggccgcgccgccagcacttgcgctgctgcgcccggtcgtcgccccgcaccgccccgcgccagccgcctcccgctcaggtgtacgctcgcgtgg

SEQ ID NO: 37475 - DNA, 2358 bp, Oryza sativa
  Clone ID: PAT_MRT4530_41201C.1
atggccccacgcaagccaaaccctggttcggcgaaagggccagatcccggccgagtcgatgacgacagcaccgcctttttaggggtctctcttgtggacgacgtcgagctggcgaagctggtcagctccggagcgttggtcgaggggcaggctttcgccccagggaaagccgtggtgccgaaacctatcgacaatcggacggtggtgttcgccgtattttttgaggcagggctacggtttccctgcaacgtgttgttgccggagatccttcgcctcttccaggtggaacttccgcagctgagcccgttggcgcttgttcggatcgctatcttcgactgggcgtgccggacttccgggtttgagcctaacgccgagctcttcggcgccatatttttcgccaccgtgaactcgaagacggtgattaccccggctggaacgaagaagacagtgttcgggagtgtgaacttcaacgttcgccccgagcggtccgatctctggtcggtgaacgctgccatgtcgaagtgggaccgccattggatggcgaggtggttctatcacaccatcccctttgaggctggttctgaatcagtgaaagccctccggtgccggcgcagggcgattgcgccgaaccggagacccaagatcgctgtggacggcgccatggaggcgcggttcgttctactgcggaaggtttgctcccgccttagctgccgtgacttggtggaggaattttgtatgcttcgcatttttcccctctcccagtcatggcaagtcgcggttgatcaaggcgaagaggtcgacggtttgccgaacctgatacttcctgagggggcgaacatgttgacccttgaccaagctgaaaccgaagcccgcaggatgatcggcgacgtgtcggtcgtcgagtatagccagctgctaacacgacaatcggccgggcgggcgaactgggtttataacggcgaattgcctcctcgggcaaatctccacaaagccgacgacgatgcagggccttcacggaagcggatgcgcggacaagtgaagcttgcccctaggaaacgaagggctcctgcttcgtcggactccgatgccgacgacgaggatgacgccgaagaacgcgacggcgaggatgaaggagaggaggaagaagaggatgtggccgataaggccgcgaacgaggcggtcgaataccgcgtcgacacccccggctacattcctaccccaagtcccggtcacaacgagaccagggtggagtcgaacagctccccccttcgtcggaaggatttggaaggggcgaaggccctaattgcgttctcttcgggtgcagcgttgaaggaagcgaaagtattcggcagtcctccgcatcagccggttgcgtcgctgctgattgaggcgaagggaaagagagcggtcgctgagacgtccgcttcggaatattcgctctcggtaccccgcttcgcccttggcgatttcgagacgcgggcggacctccttccttttgtggagggggtaagcaatcttgtactgcccgctagtgccccgagcttgttcaccgaactgaatgagttcgatgaggggtgttctgctataaaaagcctggctgttcgggatgatgaactaggccgtaaaaatttggagatggaggcccttgccaacacccttaaggaggcgaaggttgaaaacaagcggcttcaatcggaactggagaaagggaaagaagccagggccaaagtcgatcgcttaaaggccgaactggagaaagaaaaggcccacactgccgtgctcatagattattacaacctcaccgagccgaagatggagactcttcggcaggaggtgcgcaaggccgaagcaagcgctgcagagaagtcgcggcggtttttgcgggagatggtgaaaaccgccgagtccgcgcggacagcgtgccaaacgcttcgcctcgcccttactgatatgggcgcgaaagtgcggggtgtcccctccgaagatgcctcagccttcgacttctccgaatggacccaacaggctggtggttcggtttctgactgcgccaccgcatacggcgactgctgtgcgcgcgtgtcagcggcctttaccatgggcctcctgcagcagttcggctgcgagcacatcgccgagttccccaagtacgcgaggggggattgggaaatcagtgcgcaagacatttcgcctgcgcttcgtgcgtggcgaaaacaattttggcagaaggacgaccgctccgccgctaaggcgcgccttttggagcagctggcgaaagcagaggcggcggacctttgtgaagatgaaggcgcggcggccggagggggtggaggcgatgcccgggaccacccagaggtgtga

SEQ ID NO: 37476 - DNA, 2211 bp, Oryza sativa
  Clone ID: PAT_MRT4530_41202C.1
atggcccctcgcaggccaaaccctgcttcggcgaaagggctggatcccggccgagtcgatgacgacagcaccgcctttttgggggtttctcttatggacgacgtcgagctggcgaagctggtcagctctggagcattggttgaggggcaggctttcgctctagggaaagccatggtgctgaaaccaatcgacaatcggacggtggtgttcgccatcttttttgaggcagggctacggtatccctacaacgtgttgttgccggagatccttcgcctcttccaggtggaacttccacagccgagcccgtcggctcttgttcggaccgctatttttgactgggcatgccggacttccgggtttgagcctaacgccgagcttttcggcgccatattctttgccaccgtgaactcgaagacggtgattaccccagctgggacgaggaagaccgtgttcgggagtgtgaacttcaacgttcgccccgagcggtccgatctctggccggtgaacgctgccatgtcgaagtgggaccgccattggatggcgaggtggttctatcacaccatccccttcgaggctggttctgaatcggcgaaagccctccggtgccggcgtagggcgattgcgccgaaccggaaacccaagatcgccgtggacggcgctacggaggcgcggttcgttctgctgcgcaaggcttgctcccgccttagctgtcgtgacttggtggaggagttctgtatgcttcgcatctttcccctctcccagtcatggcaagtcacggttgagcaaagcgaagaggttgacagtttaccgaacttggttcttcctaaggggacgaacatgctaaccctcgaccaagctgaagccgaatcccgcaagatgatcggcgatgtgtctgtcgttgagttcagccagttgctgacacggcaggcagctggtcgggcgaaccgggtttgcaatggcgaactgcctccccgggcgaatctccacaagaccgatgacgaaacagggccttcgcggaaacggatgcgcggtcagaacataatggcaaagaggagggggggagaagaggaggtggagatcatggtcgagaagacaacgggcgaggcggtcgggggccgcgctgagactcccggctatacccctactctgagtcctggccataacgagaccggggtggagtcgaatagctccccccttctccagaaagacttagacggggcgaaggccctagttgcattctcttcgggtgcagcggcgaagggaggtcttgtcaaaaaggtggctaagaagaaaggactcgtcgatgtcgctcgcgtttttagagatgatgagtcctccgacgggactcctacttcgcctgctggccgcagcctggatctttcggctgcccccgttcctccactcggcgccgctggagcgggcggtagtaccgccgctggggcttcggcctctgccgaaagaattgtcacggccgcggcgaaagtattcggcagtccttcacgtcagccggttgcgtcgccgctgattgaggcgaagggaaagagagcggtcgttgagacgtccgcttcggaatattcgctcccgttaccccgcttcgcccctggcgatttcgagacgcgggcggacctccttccttttgtggagggggtaagcaatcttgtactgcccgccagtgccccgagattgttcaccgaactgaatgagttcgatgaggggtgctctgctataaaaagcctggctgttcgggctgaactagagaaagagaaggcccacaccgccgtgctcatagattattacaacctcaccgagccgaagatggaggctcttcggcaggaggttcgcaaggccaaagcaagcgctgcggtggagtcgcggtggttttcgcgggagatggtgaaaaccaccgagtccgcgcggacagcgtgccaaacgcttcgcctcgcccttactgatatgggcatgaaagtgcgggatgtcccctccgaagatgcctcagccttcgacttctccgaatggacccaacaggctggtggttcggtttcggactgcgccaccgcatacggcgactgctgtgcgcgcgtgtcagcggcctttaccatgggcctcctgcagcagttcggctgcgagcacatcgccgagttccccaagtacgcgaagggggattgggaaatcagcgcgcaagacatttcgcctgcacttcgtgcgtggtga

SEQ ID NO: 37477 - DNA, 2490 bp, Oryza sativa
  Clone ID: PAT_MRT4530_41203C.1
atggctccacgtaagccaaaccctacttcggcgaaagggccagatcccggccgagtcgatgacgacagcaccgcctttctaggggtctctcttgtggacgacgtcgagctggcgaagttggtcagctctggagcgttggttgaggggcaggctttcgccccagggaaaaccgtggtgccgaaacctgtcgacaaccggatggtgctgagcccgtcggcgcttgtttggatcgctatcttcgactgggcgtgccggacttccgggtttgagcccaacgccgagctctttggcgccatatttttcgccaccgtgaactcgaagacggtgatcaccccggctggaacgaaaaaaaccgtgttcgggagcgtgaacttcaacgttcgccccaagcggttcgatctctggctggtgaacgctgctatgtcgaagtgggaccgccattggatggcgaggtggttctaccacaccatccccttcgaggctggttctgaatcagcgaaagccctctggtgccagcgtagggcgattgcgccgaaccggagacccaagatcgctgtggacggcgccatggaggcgcggtttgttctactgtggaagtcatggcaagtcgcggttgaacaaggcgaagaagtcgacagtttgccgaacctgatactccctgagggggcgaacatgttgaccctcgaccaggccgaaaccgaagcccgcaggatgatcggcgatgtttcggtcgtcgagtatagtcagctgttaatgcgtcaagcggctgggcgggtgaaccgagtttacaatggcgaactgcctccccggacgaatccccaaaaggccgacgacgaggcagggccttcgcgaaagcggatgcgtggacaagtgaagcttgcccccaagaagcgaagggttcctgcttcgtctgactccgacgccgacgacgaggatgatgccgaagaacgtgacggcgaggaggaaggagaggaagaggaggaggtggaggctgtggctgataaggccgcgggtgaggcggtcgaagaccgcgccgacacccccgggtacactcctaccccaagtcctggtcacaacgaaactagggtggagtcgaacagctccccccttcatcggaaggatttggaaggggcgaaggccctagttgcgttctcttcgggcgcggcggcgaagggaggtcctgtcaaaaaggtggctaaaaagaaaggactcgtcgatgtcgctcgcgtttttagcgacaacgagtcctccgacgggactccgacttcgcccgctggttgcagcttggatctttcggccgcccccattcctccacttggcgccgctggagtggacggtagttccgccactggggcttcggcttctgcggaaaggattgtgatggccgcggcgaaagtattcggcagtactccgtatcagccggttgcctcgccgctgatggaggcgaagggaaagagagcggtcgctgagacgtccgcttcggaatattcgctctcggtaccccgcttcgcccctggcgacttcgagacgcgagcggacctccttccttttgtggagggggtaagcaatcttgtactgcccgccagcgccccgagcttgttcaccgaactgaatgagttcgacgaggggtgctctgctataaaaagcctggctgttcggatcctcgcggctcactgctcaatggagcgaaccgtgcgagctcgacttgatgggttcaaaagccgtcttcgggccaaggatgacgaactaggccgcaaaaatttggagatggaggcccttgccaacacccttaaggaggcgaaggccgaaaacaagcggctccaattggaactagagaaagggaaggaagctagggccaaagtcgatcgcttaaaggccgaacaggagaaagagaaggcccacaccgccgtgctcatagattattataacctcaccgagccgaagatggaggcccttcggcaggaggttcgcaaggctgaagcaagcgctgcagaggagtcgcggcggttttcgtgggagatggtgaaaaccaccgagtccgcgcggacagtgtgccaaacgcttcggcttgcccttactgatatgggcgcgaaggtgcggggtgtcccctccgaagatgccttagccttcgacttctccgaatggacccaacaggctggtggttcggtttcggactgcgccaccgcatacggcgattgctgtgcacgcgtgtcagcggcctttaccatgggcctcctgcagcagttcggctacgagcacatcgccgagttccccaagtacgcgaagggggattgggaaatcagtgcgcaagacatttcgcctgcacttcgtgcgtggcgaaaacaattttggcagaaggacggccgctccgccgctaaggcgcgccttttagagcagctggcgaaagcggaggcggcggacatttgtgaagaggagggcgcggcggccggatggggtggaggcgatgcccaggatcacccagaggtgtga

SEQ ID NO: 37478 - DNA, 402 bp, Oryza sativa
  Clone ID: PAT_MRT4530_41204C.1
ttttggttttttgatttttttggtttttttttttttttttttttttttttttttttttttttttttttttttggcccccggcccacaaaaaaaaattcattttttcccaggggcggggtatagcccccggcccgatttttggcccaaagggaaccttttttaagggggggaaagaattccctaagccttggggaagccccaaatttggtgcattggggaaagcccaattctaagggggggcagggttcacaaacaggttcccaacatttccctggggaaccctccaaaagggttttgcctttttttttttaacggaaaaaaaggggcctggtccggcccaattaaaaactcgttgccccccaagggaccgtttttggtgaacccaaccaacccggttcaggg

SEQ ID NO: 37479 - DNA, 2472 bp, Oryza sativa
  Clone ID: PAT_MRT4530_41205C.1
atgggccgtctggcgatcgccggcctgatgggctggaaaggcttcctcagccctcgcgggggcgaacttgtcaaggcgaagtcatcctccttcggcagacagtcttcgccttgcacccttcgcctgagacgcctctggcctggcgctactcttcgccttgcaccgctcttgctccatagccttcgccatgggtttcggcaggtttggtcgaagagcctcatgccatccgccaacaagcccctcacgggcaagggtgagactggagcttcggccgagaccgtgcaaaccatgtggtttgagcccaacgctgagctctttggcgccatatttttcgccaccgtgaactcgaagacggtgattaccccggctggaacgaaaaaaacagtgttcgggagcgtgaacttcaacgttcgccccgagcggtccgatctctggccggtgaacgctgccatgtcgaagtgggaccgccattggatggcaaggtggttctaccacaccatccccttcgaggctagttctgaatcagcgaaagcccttcgatgccggcgcagggcgattgcgccgaaccggagacccaagatcgctgtggacggcgccatggaggcgcggtttgttctactgcggaaggtttgctcccgccttagctgccgtgacttggtggaggaattttgtatgcttcgtatttttcccctctcccagtcatggcaagtcgcggttgaacaaggcgaagaggtcgacggtttgccgaacctgatacttcctgagggggcgaacgtgttgaccctcgaccaggccgaagccgaagcccgcaggatgatcggcgatgtttcggtcgtcgagtatagtcaactgttaacgcgtcaagcggctgggcgggcgaaccgggtttacaatggcgaactgcctccccgggcgaatccccaaaaggccgacgacgaggcagggccttcgcgaaagcggatgcgtggacaagtgaagcttgcccccaagaagcgaagggttcctgcttcgtctgactccgacgccgacgacgaggatgatgccgaagaacgtgacggggaggaggaaggagaggaagaggaggaggtggaggctgtggctgataaggccgcgggtgaggcggtcgaagaccgcgccgacacccccgggtacactcctaccccaagtcctggtcacaacgaaaccagggtggagtcgaacagctcccccctttgtcggaaggatttggaaggggtgaaggccctagttgcgttctcttcgggcgcggcggcgaagggaggtcctgtcaaaaaggtggctaaaaagaaagggctcgtcgatgtcactcgcgtttttagcgatgacgagtcctccgacgggactccgacttcgcccgctggtcgcagcgtggatctttcagccgcccccattcctccacttggcgccgctggagtggacgtattcggcagtcctccgcatcagccggttgactcgccgctgatggaggcgaagggaaagagagcggtcgctgagacatccacttcggaatattcgctcccagtaccccgcttcgcccttggcgacttcgagacgcgagcggacctccttccttttgtggagggggtaagcaatcttgtactgcccgccagcgccctgagcttgttcaccgaactgaatgagttcgacgaggggtgctctgctataaaaagcctagctgttcggatcctcgcggctcactgctcaacggagcgaaccgtgcgagctcgacttgatgggttcaaaagccatcttcgggccaaggatgacgaactaggccgcaaaaatttagagatggaggcccttgcaaacacccttaaggaggcgaaggccgaaaacaagcggctccaatcgaaactagagaaagggaaggaagctagggccgaagtcgatcgcttaaaggccgaactagagaaagagaaggcccacaccgccgtgctcatagattattataacctcaccgagccgaagatggaggctcttcggcaggaggttcgcaaggccaaagcaagcgctgtagaggagtcgcggcggttttcgcaggaaatggtgaaaaccaccgagtccgcgcggacagcgtgccaaacgcttcgccttgcccttactgatatgggcgcgaaggctggtggttcggtttcagactacgccaccgcatacggcgattgctgtgcacgcgtgtcagcggcctttaccatgggcctcctgcagcagttcggctacgagcacatcgccgagttccccaagtacgcgaagggggattgggaaatcagtgggcaagacatttcacctgcacttcgtgcgtggcgaaaacaattttggcagaaggacggccgctccgccgctaaggcgcgccttttggagcagctggcgaaagcggaggcggcggacatttgtgaagaggagggcgcggcggccggagggggtggaggcgatgcccaggatcacccagaggtgtga

SEQ ID NO: 37480 - DNA, 2061 bp, Oryza sativa
  Clone ID: PAT_MRT4530_41206C.1
atgggccgtctggcgatcgccggcctgatgggccgaaaaggcttcctcggccctcgcgggggcgagcttgtcaaggcgaagtcatcttccttcggcagacagtcttcgccttgcacccttcgcctgagacgcctctggcctggcgctactcttcgccttgcgccgttcttgctccatagccttcgccatgggtttcggcaggtttggtcgaagggcctcatgccatccgccaacaagcccctcatgggcaagggtgagactggagcttcggccgagaccgtgcaaaccatgtggtatgcccaacgccgagctctttgggccatatttttcgccaccgtgaactcgaagacagtgatcaccccggctggaacgaaaaaaaccgtgttcgggagcgtgaacttcaacgttcgccccgagcggtccgatctctggccagtgaacgctactatgtcgaagtgggaccgccattggatggcgaggtggttctaccacaccatccccttcgaggctggttctgaatcagcgaaagccctccggtgccggcgtagggcgattgcgctgaaccggagatccaagatcgctgtggacggcgccatggaggcgcggcccaaagacaaagcccgcaggatgatcggcgatgtttcggtcgtcgagtatagtcagctgttaacacgtcaagcgactgggcgggcgaaccgggtttacaatggcgaactgcctccccgggcgaatccccaaaaggtcgacgacgaggcagggccttcgcgaaagcggatgcgtggacaagtgaagcttgcccccaagaagcgaagggttcctgcttcgtctgactctgacgccgacgacgaggatgatgccgaagaacgtgacggcgaggaggaaggagaggaagaggaggaggtggaggttgtggctgataaggccgcggtggcgaaggccctagttgcgttctcttcgggcgcgtcggcgaagggaggtcttgtcaaaaaggtggctaaaaagaaagggctcgtcgatgtcgctcgcgtttttagcgatgacgagtcctccgacaggactccgacttcacccgctggtcgcagcctggatctttcggccgcccccattcctccacttggcgccactggagtggacggtagtaccaccgctggggcttcggcttctgcggaaaggattgtgatggccgcggcgaaagtattcggcagtcctccgcatcagccggttgcctcgccgctgatggaggcgaagggaaagagagcggtcgctgagacatccgcttcggaatattcgctctcggtaccccgcttcgcccctggcgacttcgagatgcgagcggacctcctttcttttgtggagggggtaagcaatcttgtactgcccgccagcgccccgagcttgttcaccgaactgaatgagttcgacgaggagtgctctgctataaaaagcctggctgttcgggatgacgaactaggccgcaaaaatttggagatggaggcccttgccaacacccttaaggaggcgaaggccgaaaacaagcagctccaatcggaactagagaaagggaaggaagctagggccgaagtcgatcgcttaaaggccgaactggagaaagagaaggcccacaccgccgtgctcatagattattataacctcaccgagccgaagatggaggctcttcggcaggaggttcgcaaggccgaagcaagcgctgcagaggagtcgcggcggttttcgcgggagatggtgaaatccaccgagtccgcgcggacagcgtgccaaacgcttcgccttgcccttaccgatatgggcgcgaaggtgcggggtgtcccctctgaagatgcctcagccttcgacttctccgaatggacccaacaggctggtggttcggtttcggactgcgccaccgcatacggcgattgctgtgcacgcgtgtcagcggcctttaccatgggcctcctgcagcagttcggctgcgagcacatcgccgagttccccaagtacgcgaagggggattgggaaatcagtgcgcaagacatttcgcctgcacttcgtgcgtggtga

SEQ ID NO: 37481 - DNA, 225 bp, Oryza sativa
  Clone ID: PAT_MRT4530_41207C.1
atccacgcgtccgctctcgctagaccttcgagtgtccttgtacttgacctaccctgctccgccgagccgtatagcgagcggccatgaccaaggtgcaccccaatgtcccggtggtggcgccggcggtggtggaggaggagaagggggaggcgcgcgtacttgacggagaggcgccagacgctcctgttcaacgggaagggcttcacggtgtagcacggcaagggg

SEQ ID NO: 37482 - DNA, 1440 bp, Oryza sativa
  Clone ID: PAT_MRT4530_41208C.1
atggcagccctttgtaccatcatcactgcaatggtgaccaccaaacttgcaagagtaagaagaccaattaccctcaatccaaagagcaaaagaccacttccaccggtggtgaatgtcattgcccttctagagcacttacctaggctatgtacaaagggtgtaattccggtgtacaaagggagtgtgttcacggtaagtctgtttggactgaaggcaaccttcttggttggaccagaggtctcggctcatttctatcaagggatggattcggagattagccagggcgatctgtatgaattcaccgtacccttgttcggcaaaggggttggctttgacatagataatgctactcgaaccgagcatctccgtttctttattgatgcgataaagacgtcgaagttgcgaaaccatgtcaactccatggtgcaggaagtagaggactattttgcaaaatggggagaaaatggcatagttgatataaaacatgagtttgagaagttactcatgttgatctcaggccattgcctactcgggaaggaggttcgggacaacatgttcgatgaggtcttctcattgttccatgaacttgacagcggggttggcttgggcagtgtcatcttcccatatatcccaattccatcgcacattcgatgcgacaaagcacacgccaaacttgcaaaaatattctccaaaattgtgaggtcgaggagggactccaaccgaccagccgagcaggatgtactccagtacttgatcgattccaaacatagagatggaaactccactaccgaacaagaggtcactgggtggatcatttctatggtttttgccggaaaacacacaagcacaaactccactacctggactggagcatgcctactaactcatgacaagttcttgacagaggcactcgatgagcaaaagcatatgattcaaaaacatggagaccatatagattataatgtgttgttagatatggacatcttgcactgctgcatcaaggaggccctaaggatgcaccctgtggcgccaataatatatcgcaaggcacaaaaatcatttgttgtaaggacgagagaaggcgatgcatatgacattccagaagggcataatttactgagcccaatgatattcaacaacagactaccctacatttataaggatccccatatgtatgacccagataggtttgctcctaaaagagaggaggataaagttggtggcatgttctcttatacatcgtttggtggtgggaggcatatttgcattggtgaggcttatgcttatatgcaaattaaggtgatatggagtcatttactaaggaactttgagttgaaattggagtctcctttccctaagacaaactggagcaaaatcctgctggaaccttggggaaaagtaatggtaagttacaagaggaggaggctccccacagcttag

SEQ ID NO: 37483 - DNA, 1231 bp, Oryza sativa
  Clone ID: PAT_MRT4530_41209C.1
atgccctccttcccctccattttcttctgttgccttgctttgcttctttctttctttctttctttctttcccgcatcttcttctccatcgcgctcctctcctctcctctctgctgccgatctgctgctgcgcgagccagagctcctcctcctcccgcgcgcggccggcaagaaccagcaagcagaactagcagtttctgttaaaaagaaaaaaattggggattcagttgaactcccatgctccaatgttaggtctacccatcatctgtacaactttttttgccttgtagttcccggaaaaatgggagtccgttccaagttgcaagctcagatccatggcttcattggtacagtttttgtgtggtataattcttggacggatcatgctagcaaaagttcttgctcaagtcttagcaccagtactcaggagagtgaggaggatgtgacagttggtacccttttaactgaagcaaagaacagtggacggagtcttggaaaacgcctttcccacttagattctatcccgcacactcctcgagttaatgggcaaattcctgatgttaataatgcaacaatagaccatgaaacattactggaaagattgggcacttatggcttagctgaattccaaattgaaggagacggaaattgtcagttccgagctttggcagatcagatattccgcaatcctgactatcacaaacatgtgaggaagtcagtcgtgaagcagctaaaggaattcaggaaacactatgaaggctatgtaccgatggaatataaggtgtacttgaagaaaatgaaaagatctggagaatggggagatcatgtgaccttacaagcggctgcagaccggtttgctgccaagatttgcctgctgacatcatttagagacacatgcctaatcgagatagtccccagaggtgccactcccacaaaagagctttggttaagcttctggagtgaggtgcactacaattccttgtatgcaactgaagatcttccaaatcgcaagaccagaaagaagcactggctgttctaagtaggtagatagcctatggcaattcttggaattgtacctgccattgttcttctcactcaatctagtagcagctgtaacttcattcacttcgctcattttctgtcattgctgatgctgtaagttgtaactcgggagcaaactttgtaagcttatgtacagtgaaatgctgtttgttcaaaaaaaaaaaaaaaaa

SEQ ID NO: 37484 - DNA, 366 bp, Oryza sativa
  Clone ID: PAT_MRT4530_4120C.1
atggctcctggagactgctacctaatcaaagaggctctctacaccgggctgaatttttcttctttggcccgtaaaagaaatgcaatgatcaaggtgaccaacacgccccactcgtcgtgccgtgccgtgccagcacggcctcttcaggacgcggcccaagcacagcccaatggcccgacgggcctattcgtgccgggccggcacaagcacggcccaaaagatgggagcaggccggctgcgctgagaagaaactctggcggcgacgcggcagcggtggcttgcggcttcgtcgtcccgtcgcggcgacgcggcagtgacagccacacccatcctgctcctcctcgtcggctcgtcgcggcgacgtag

SEQ ID NO: 37485 - DNA, 662 bp, Oryza sativa
  Clone ID: PAT_MRT4530_41210C.1
ccctcttcttttttttttttactgaaacaggccttcagaaaaggagatgaacaaacagcatttcactgtacataagcttacaaagtttgctcccgagttacaacttacagcatcagcaatgacagaaaatgagcgaagtgaaatgaagttacagctgctactagattgagtgagaagaacaatggcaggtacaattccaagaattgccataggctatctacctacttagaacagccagtgcttctttctggtcttgcgatttggaagatcttcagttgcatacaaggaattgtagtgcacctcactccagaagcttaaccaaagctctgcagaaggaaccaagggaatgatcaaacaccaaaaatatatattgggatttacatttaccaacccatgcggatactgcgtacatggatttagtttgctaaaagcaggcaaagatttacagaatgaaggatatcacaagtattgaataatataaaaaacatcatgacaacacaaaatagaaaatgtgacctcaaagttctcaaagatctcaaacaagatatcaaagttctcaactctaaccttttgtgggagtggcacctctggggactatctcgattaggcatgtgtctcttaaagatgtcagcaggcaaatcttggcagcaaactaatttaac

SEQ ID NO: 37486 - DNA, 234 bp, Oryza sativa
  Clone ID: PAT_MRT4530_41211C.1
atggaaaatatctacacgagtcgagtgattttcaaagtcctactcggaggggatagagtttttgttatatcgtataagatccaatgtcttcgagtcttacttggggatcaagatgatccatggtataaaagggacccccagggaaggatcctcgttccaacatatcccaataccctaatcatccggtatacaagtatcactcgtcgacagctatatactccacaaacatgttat

SEQ ID NO: 37487 - DNA, 894 bp, Oryza sativa
  unsure (1)..(894): unsure at all n locations
  Clone ID: PAT_MRT4530_41212C.1
ccggccgggctttctttctttctttctttcccgcatcttcttctccatcgcgctcctctcctctcctctctgctgccgatctgctgctgcgcgagccagagctcctcctcctcccgcgcgcggccggcaagaaccagcaaggtgcgggatagccacctgaagttggattgcactgattctttcctttggaacctgcagccaatccatatattttcaatgctccctctgaggtagcatgtctgaacaacaggatcatgctagcaaaagttcttgctcaagtcttagcaccagtactcaggagagtgaggaggatgtgacagttggtacccttttaactgaagcaaagaacagtggacggagtcttggaaaacgcctttcccacttagattctatcccgcacactcctcgagttaatgggcaaattcctgatgttaataatgcaacaatagaccatgaaacattactggaaagattgggcacttatggcttagctgaattccaaattgaaggagacggaaattgtcagttccgagctttggcagatcagatattccgcaatcctgactatcacaaacatgtgaggaagtcagtcgtgaagcagctaaaggaattcaggaaacactatgaaggctatgtaccgatggaatataaggtgtacttgaagaaaatgaaaagatctggagatggnggagatcatgtgaccttacaagcggctgcagaccgggtaacatagcactttcagatggctgattggtttgttatgagaaaataccttctaactgtaggttttgacatttattatcttgtgacttagttctaacgataggttaatccgatgctttcttgttcacaaaactctgtcaagntgaaccctacaatatattgttctaaaaa

SEQ ID NO: 37488 - DNA, 155 bp, Oryza sativa
  Clone ID: PAT_MRT4530_41213C.1
tgttctaattaccattcggggtctggaccgtgtgggagctattctctctggagggttgatgagaaacccggaagggacatggctacccacctctctgtgcaacagtactgagaggctagggaggtctatgccatagtgcgctttaacgatcgcag

SEQ ID NO: 37489 - DNA, 882 bp, Oryza sativa
  Clone ID: PAT_MRT4530_41214C.1
ttatttttgaaaaggaaaagaggattattgcgtcaacggctagggttcaaggtggaccgggtgcacggcggcggctcacgggaacgaacggtcgagatctaaccttaccaaacgaacggccgagatctagcggtccacggccgttccacgagacacggcgacgatgacatcggcgatgacgtcatcaccggcgacggctcggacggcgcaagctcgccggcgaactacggcacgacggcgctaacgaaaggcatctacaggttgcggacagcacggcgaactcaccggtgaccaaagcagcggcggaggcgaccttcggctcgacgacggcggcgatgttccggcggtcctcggcgaaaacggaggggcagacgaggtcggcgacggcttggcgatcacgatggcgaccttcccgagtggcgacgacgaccggagcgacggcgacgcacggctggaccagcggcggtgacggcggcgcacggctgcacggtgctagggctctaccggcgacgagagacgaaggcgagggtggcgacgggggctagggggcggcggcgaaggcccacggcggtcggcggcggcgatggaaagttagggctcggaggagagagatcgatccgaatcaaactcgaatccacagatttccaaaccgaattagccgatgattccaaaagggaaaagatagaggagatcgagaagatcgtttcccctcaattgattcaaccggaaacggaaaggcacggcgggccccacctgtcagcgggcgaacgcgcgcgcgcgggcggcttggctgcgggccggcttgggccgagggagagagagaggtttgggccgactttcggcccaaagccaaaagagaactttttaaaacctttttcaatt

SEQ ID NO: 37490 - DNA, 278 bp, Oryza sativa
  Clone ID: PAT_MRT4530_41215C.1
ggatgcagggagccaacaacctgcaatgcctgtgcttggtgagataacactcccaatggggtgatatgaatgcaagttaatttggtttggattttggttgcggtaattttgatgacaagcacaaccggacgcaatgggatgtgcaagtgatggaacaggctgctgcgcaagcaagctggcaagcttgggagagggtggatatggatgtgtgatgcaattgtttgtgcagctgctgtgcatgctcccaattggagcatctggtaacaaagtttggttga

SEQ ID NO: 37491 - DNA, 477 bp, Oryza sativa
  Clone ID: PAT_MRT4530_41216C.1
atggcgcagaaatactcctgggggaagggcggtgccggcaagcgggccccaccggtcagcggcacaagggcgtcggtccatcgtggaccgggaccaccgaggcggtccaccgccggtccacgggaaccgacggcccagattggcccgagccgatcggatggccacgggcggtgctgctggggcatggcatggctcaaagccggccgatcgagtgatggcgatgggtggcgcgcggtggagcagccagcggcggcgcacggcacgggggaggccagcgaagggggaaggaggaaaaagggagggggagtgctcaccgagcgacacggcggaagcatgcggccggcggcgaggaacggcgacggcggggctccccgggaggacagcgtgatggagctctggcgacgggtgtcgcttgggaaaggggtggacaggcttggcctcgatttgaggaagatgaaggaggggttaggaaagtga

SEQ ID NO: 37492 - DNA, 218 bp, Oryza sativa
  unsure (1)..(218): unsure at all n locations
  Clone ID: PAT_MRT4530_41217C.1
tcatacggaagtgtgtgaatgacggcaaaattgttgtggagttcgtccggattaagaagcagcgggcgaatgcattaacgaaagaattgccgtcgncaaaagctggcgacgccgagacaccttcttggttcattcccctcgccctctctcacgcctctcgcgtgatgggtccggcgacggcgaccgcaggtggatccgcccgcaatggtgacggctga

SEQ ID NO: 37493 - DNA, 5319 bp, Oryza sativa
  Clone ID: PAT_MRT4530_41218C.1
atggccgaacgggcagtggcgcacaacctctctccgagcgctagcggtgacgacggggagcagaacccgcgccgtcgagctcgtactccaccgtccccctctcgccgaaatcttgggcgggaggaggcgctcgaggaggtcgaaagatccgtgacttcgccgcccgcgggcaatggagaaggacggcaagacggggagcgtcgcctcctcgtctacggcgatggcggcacgccccagggcgcgctccaggctgcgggcgcgctcctgcgtcacccgcccgtcgtctccgatccagagactccagcccgacgttggctggatgacgtggccgacttggtcatgacgacgcagcagcgcctaggtgccggcgggcggtcctccgccaccgggacctctggcgctgccgccgccggctccaggtcgtcgaggcggagggcgcggcgagcggcggccgttacccgccgttcgtccgccattccctcgtcaacgcctccgacccaagaagatgtgcgtggggggccggatgcccgcctcaatatcgagcgccggcgcaatggtcgtcgtgctgcccatgcaacgaagggcgcttcctcgtccggagcgccacttcggtccgggcacgggggccagcctcccgtgtccccggttggcggtgccggctgtcgagcctttgtggcgagccttcggaacgtccgttggcccccaaggttccggcccaccatcaccgaaaaatacgacggaagcgtcaaccccgccgagtttcttcagatctacacgaccgggatcgaggccgccgggggtgatgacagggtcatggcaaatttcttccccatggccctgaaaggtcaggcgcggggttggctaatgaacttgccacccgcgtcggtccactcttgggaggatttgtgccagcagttcaccatgaacttccagggcacatatccgcgcccaggtgaagaagcagacttgcatgcggtacagcgaggggacgatgagtctcttcgctcgtacattcagcggttctgtcaagtccgcaacaccataccatgcatccccgcacacgcggtgatctacgcgttcagggggggcgtgcggcacaaccgcatgctcgagaagatcgcctccaaggagccccagaccaccgcggagcttttccagctcgcggaccgtgtggctcgcaaggaggaggcctggacctggaactcctccggttccggtgtggcagctccggccgcccccgggtccgccgctcggtcagagcggcgggacaggaggaggaagaagagggcgcatcgcgggccacccgaaaggggaggcctgcgagcgacaaaaagaaggaggccggcgctcccagcagggagcgcccgaccggcaagtggtgttccgtgcacaacacctccctccacgacctcgcggactgccgtggtcaaaagtttggctgagcggacgaggaagtgggaggaggagaggaggcaggagcgtcgtgagggcaaggccccggcggctcccgccggcaaccggcgaggtgaggccaagcagaaggccaccgccgaggacgtcgacgatggcgacgatgacctggggttccaggagcctggggccaccgtcgccaccgtcgatgggggagcgtgcgctcacgcttctcgctggagcctcaaggccatgaagcgagagcttctggccgcggcccctacccataaggcgacgcggcgggcgcgatggtcggaggttgccctcaccttcgaccagaccgaccacccgccgtgcgttgcccggggaggacagatcgcgatgatggtttcccccaccgtttgcaatgtgaagttggggcgtgtcctcagagacgggggtgcagccctcaacatcctttcccccgcagcctttgacgccatcaaggccccggggatggtgctccggccgtcccagccgatcatcggtgtgacgccggggcacacctggccgctgggtcatatcgacctcccggtcaccttcggtggtcccgccaacttccgcacggagcgggtggacttcgatgtggcggacctcagtctgccctacaacgcggtcctggggaggcccacgttggtgaagttcatggtggcggtccactatgcctatctccagatgaagatgccgggccccggtggccccatcaccgtccatggcgacctcaaagtcgcgcttgcttgtatggagcagcgcgcggaccacctcgccgcggcgtccaagcccgcgggcagcgacgagaggctcagcacctccgtcccggccgccccgaggcagcggatggtcacctgcgacgaagtcccggaagacgcgctcgtctccttcctgcgggcaaacgccgacgtcttcgcctggagaccggcggacatgcccggggtccccagggaggtgattgagcaccgtctcgccgtgcggccgggcgcaaggccggtccggcaccagctaggacgcaatgttgaggcctatgttgatgacttggttgtgaaaacgcgcaaccaagagaccttactctcggatttagcggaaactttcgaaagtctccgctccacccgcataaagctgaaccccgataaatgcgtgttcggcgtgcctacgggcaagcttctcgggttcttggtttctgcccgaggcatcgaggccaatcccgagaagatacgagctatagagcggatgcgcccccccagcaagcttagggatgtgcagtgcgtcaccggctgcatggccgccctaagtcggttcatatcgaggctgggagagaaggcgctatccctatttaagctcctcaaacgctccgggccgtttacctggacggaggaggctgagcaggccttcactcagttgaaggcgtacctcagttctcccccagtcctggtcgccccggagccagatgagccgttgctactctacctggcggcaaccccgcaggtggtcagcgcggcgttggtcgtggagcgcaacgaggacaaccctcactccgcgcatccccaccctgtgtcgactcgacccgggagagagcagggaggagaggcccccgagccgaacggcggcccgaggcccccgacggccggagctggccctccgcccgcttgtctgatggtgccaggcgcccccgacccccatgatggccccggggccactgcgggaaggccgcacctgtcgccctctgaccccgaggtcgtcggcacagaagccgagtgcgccccgcgtggcctctcggacgaagagcgccctggagatgcggcccctggcgaagaggatcggccctgccgaaaggtgcagcggcccgtctacttcattagcaaggccctccgggacgccaagacccgataccctcaggcccagaagatgctttacgctattctgatggcttcgagaaagttgcgccattatttccaggcgcatcgggtcacagtggttacgtcttaccccctcggccaaatcttgcataaccgagagggtactggacgggtggtgaaatgggcaatcgaactctctgagttcgatttgcactttgaaccacgccacgcgatcaagagccaggccctcgccgactttgtggcagagtggaccccagctcctgagcccgtctccgtccccgaggccagctcgagcccctcacaactgcctcacaccgcctactgggtgatgcagttcgacggctccctgtctcttcagggcgccggagcgggggtcacgttgacctcgccgagcggagacgtcctcagatacctggtccgcctcgactttcgggcgaccaacaatatggcagagtatgagggactccttgcgggactcagagtggcagctggactggggatccgccgcctcctggtgttaggcgactcccagctggtcgttaaccagatggacgcttacgtgcgccaggtgcggcgtatggagcgccatttcgacgggatagagcttcggcacgtgcccagacgggataacgcggtcgccgacgaactctcaaggctcgcttcctcgcgagcccagaccccaccgggcgcctttgaagaaaggcttgtccagccgtcggcgcgacccaaccccctaggggagacggacgcacctgaacggcccccgaggcccgtcggagtccaggcctcgggacccgaggggagcgctcccagctcccttagattgattgcttggatcgctgagatccaggcgtacctcgcagataagactctacccgaggaccgcgaagggagtgaacgcgtccaacgcatctccaagcgctacgtgctggtggaagggaccctctatcggcgcgcggctagcggagtcctcctgaagtgcattcctcgggaacaaggcgtcgagcttctcgccgatatccatgaaggcgagtgcggagcccactccgcctcacgcaccttggttggcaaggcctttcgccagggtttctattggccgacggctctcaacgatgcggtcgacctgttccggcgttgcagggcgtgccagtttcacgccaggcaaacccatcagccggcccaggccctgcagatcatacctctttcatggccgtttgctgtctgggggctcgatatcctgggtccgttcaggcgggccccgggcgggttcgagtatctctatgtcgctgtcgataagttcactaagtggcccgaggcttatccggtcatcaagatcgataagcactccgcgcttaaattcatcaggggcatcactgctcggtttggggtgcctaaccgtatcattacggataacggcacccagttcactaaagcaatggccaagtggagcgccaacgtggaaatcctcaagggcctcaaaaccaagaccttcaacatcctcaagaagcacggcgactcgtggatcgaggagctgccagcggtgctctgggcgaaccgaaccacgccaagccgagcaaccggggaaacgcctttcttcctcgtctacggcgcggaggcggtcctcccatctgagctcaccctgaggtcccctcgggccaccatgtattgcgaggctgatcaagatcagcttcgcagagacgacctcgactacttggaagagcgaaggcggcgcgcggccctccgagccgcgcgctaccagcagagcctgcggcgctaccatcagcgccacgtccgggcccgatcactctgcgtcgacgacctcgtcctacgccgcgtccaaacgcgtgctggactgagcaagctctcaccaatgtgggagggtccgtatcgagtgatcggcgtcccccggccgggctccgttcggctggccacgggcgacggcacagagttgcctaacccatggaacatcgaacaccttcgtcgcttctacccctag

SEQ ID NO: 37494 - DNA, 379 bp, Oryza sativa
  Clone ID: PAT_MRT4530_41219C.1
atggtatggcgatggcaagcagctgcaagtagcacacacatcaatagcagagggccagaggggcagtggtacagcttccgccttgtcgtcatcgtccgctgggagaatgacccacagatagtagcgagtgcgaaggagacccatgtaatggaggtcgaggttattgattttccaaattgttcgagcttctccctctcaccactgtcggcctcccatctcgtctccgcgtagcttcttctccgccgccaaccccccgacgatgggcaacgagatcgagacgggaaccttcccgatgataggacaaatcgaggggctgaagcatagaggtggagctgttgcttgttatgttagatcgagcaccatcttcctcaacaaggcc

SEQ ID NO: 37495 - DNA, 539 bp, Oryza sativa
  Clone ID: PAT_MRT4530_4121C.1
ccaagaactgagaattttcaagttaactttacaaattacaaatgttcttacataatataatcaacctatagtacagaacaatctttctaactttcataagaaagattgttagacccaacccctcatattttgtattcacaaagcatggcggcatggtagcttaaagatgataaattaattaccaacaataattaattcatctcaaaatctcaacctaagtaggaacttaggatcacatcgttgcatgctaaactaccttaacccaatcggagctcctgtcttgagtcggcgccgcggcgacggcggcgggctcctcctgatcctggggtccatggccaccaccacctcccctcccctgaacctctgcaacgcccatttcgtggtggggcggggatcgaggtcgcggcggcgctcgatgggcgggcggccggtgacgagctcgacgaggaggacgcccaaggagtagacgtcgctcttgtcggtgagctcgtacgtgctcaggtactccgggtccacgtacccggcggggctcttcccct

SEQ ID NO: 37496 - DNA, 375 bp, Oryza sativa
  Clone ID: PAT_MRT4530_41220C.1
atgagcaaggacgcggaagaggactccgggcgcgccctcttcttcctcttccccggcccgaggccggagagattactcccgcgctgtcggcctctcgtcacagcgcccctcctcatcgcgggtggtgtcggagaggaccccctgggcttcctggcacagtatggtctgggacctaacctgttgttggtctgggacccctctcgtcggcatatggtaaacctgtgtcggctttggaaatgccttgtcatgaaagcttggaggtctcccgacgtggctgatccccacgggctgggtgatccggttgctgaagaagatgaagcggatcctgctgatgaggagttcttccaggagcaagccggctacgatgagttttag

SEQ ID NO: 37497 - DNA, 1347 bp, Oryza sativa
  Clone ID: PAT_MRT4530_41221C.1
ggcattcttcctttgcctccaatggaccatagctcttcagaagaatctgatgttagtgattcagatattggtgtgcacgaggaaaagacttataatcaactgagagccgaaaaagtgaaagtgaagcatggcaacaacacatttcgttgcccattctgcccagggaagaagaagcaggattacagctccaaggatcttctgcagcatgcctcaggagtaggggctgcttcgaagcgcaaggcgaaggttaaggcgacacacctagcacttgctcgctatctgaaggttgatctagctggctcactggaatcatcaccacaacttgctaccgttgagcatcaacctcctgggagtgaagagaagtatgtatggccatggatgggtatactggttaatctgccaactgagttgaaagggaaaggatttgttggggaaagcgaggagaggctaagagcacaattctcacgattcaaaccactccaagtaactatcctttggaattcaacagacaatgcagattatgctatcgtgaagtttgctgaaaactggaatggaatgaaggatgcattggcttttgaaaagcatttcaatgtggagaggtatggtaaaactgattggaacaaaataaactgtagaagagatgatctttttgggtgggttgcaagaagtgatgactataactctcttgagccaacgggaaagtacttgaggaaaaatggagagcttaaaggtgtatgtgatctggaacatgaaggccagcgaaaaatgggcaggcatgtgggtcattatgcttgccaaatcgaagagaagaacaaatacttagaagagttgaagcttatgaacaaccaaaatggcctaaaacttgaaaggatgatggaagagaaagatcaattgtttgaagaacataatagaaatataatagaactgcagcagcatgcttgcaaagattcaaagagaataattgatgaaaacctaaatctgtatgaagaactgcaggctaagaaacatgaaattgaccggagatcaaatctaaagcagaaggaggcagatgaagagcttttgcggcttgttgagaaacacaagccggaaatgacctctgacaagcagtacacacacctcctgctccgctcgtcagctctcccggtggacgcccgtttcaaccttcattcaatggccagcgactttcttgccatgcttgcgctgaagcctggaatggatctgaccgggactgacataccaactccaggagtcagcacgccagctccggctagagacgagagccaggaagctctcatcattccgacgggacggggcgaggcgtgcgacaggccgcctgttgccacctaa

SEQ ID NO: 37498 - DNA, 804 bp, Oryza sativa
  unsure (1)..(804): unsure at all n locations
  Clone ID: PAT_MRT4530_41222C.1
tttttttttttttttaataagtattagttcacatataaacatggaagtctccagaaggtttacaatgaagaggctaaaatttgtgaccaaaaaattcatgcaaataagttactagctattaactaaaaacgagtgcactgcaaataagtgacacaataagtagcttaaacattctacaaaatgggagtattgcaagatcatcactctgttacagggaagaacaaatttgttcattttccgcaaatactgcagtattgcagaagccgcaagctaatataacagtttaatatgtccatgaaaatgacaaaaatatcacgagagttcctgtaaacaattcattctgcgacttaagctcagtgctgggcttcaaactcctgcttgctgatgaagattgctactggttcaccaggagaaggcggggtcttgtccaacattgaaacatgagcaccagccttagcacgagttgcttcatcagaagctgacaagacctctacatggtcaaggcctacctgcctcttgatcaactccaaattctcctcgagaacattcatttcaccaaatggaagcttcagatttaaagcatggggcccaacactcttggcctcatcctttttcgacttgatgaaaggcatgcagagcttctggacttgtttgaaattagtttcctgcccgatggagcaattcttcagtgcttcagtaatctcctcatcaggggcaaaggaaccgagcttggctgtcaaatttagactggagcaccctcagacattgctctttccatcataatagnggtcattaccatagatc

SEQ ID NO: 37499 - DNA, 778 bp, Oryza sativa
  Clone ID: PAT_MRT4530_41223C.1
atggccgaacgggcagtggcgcacagcctctctccgaacgctagcggtgacgacggggagcagaacccgcgccgtcgggctcgcaccccaccatccccctctcgccgaaatcttgggcggggggaggcgctcggggaggtcgaaggatccgcgacttcgccgcccgcgggcaacgggggaggacggcgagacggggcgcgtcgccgcctcgtctacggcgatggcggcacgccccagggcgcgctccaggctgcgggcgcgctcctgcgtcacccgcccgtcgtccccgatccagagactccagcccgacgttggctggatgacgtggccgatttggtcatgacggcacagcagcgcctaggcgccggcaggcggtcctccgccaccgggacctctggcgctgccgccgccggctccatgtcgtcgaggcggagggcgcggttccggcccaccatcaccgaaaaatacgacggaagcgtcaaccccgccgagtttctccagatctacacaaccgggatcgaggccgccgggggtgacgacaggcggttctgtcaagtccgcaacaccataccatgcatccccgcacacgcggtgatctacgcattcagggggggcgtgcggcacaaccgcatgctcgagaagatcgcctccaaggagccccaaaccaccgcgcagctttttgagctcgcggaccgtgtggctcgcaaagaggaggcctggacctggaactcctccggctctggcgtggcagtccggccgcccccgagtcagccgctcg

SEQ ID NO: 37500 - DNA, 102 bp, Oryza sativa
  Clone ID: PAT_MRT4530_41224C.1
atggctgcatctgcatttctgcatggcgtggcgtggcatggcacgcaaccgatcgaggacgtcgctggcactgccattgcctacgcctacgggctgcggtcg

SEQ ID NO: 37501 - DNA, 357 bp, Oryza sativa
  Clone ID: PAT_MRT4530_41225C.1
atgttgacaacataccgacgatccccatactatgcaaataccagaatcgcgacatcaaacgtcaacaatggcacgccaggtaggaggattttggtgcttcaagattttgatgagatgggtttaagagatggatttcccgacaagaaactctcgacttcagctttgggagataccgcggaggacatcggttcagcgtcgtcagccacgagatcttgctccgttccaaccacatccgagccgacgtccaccgccgaaatcttgaaatccatcgttaacagagtcgtcgcgtccaacctaccaacgaagattgacgacttatctcatagcaccggccatggctggactactcgagaaaag

SEQ ID NO: 37502 - DNA, 354 bp, Oryza sativa
  Clone ID: PAT_MRT4530_41226C.1
atgggaaggaggggagcgacactgaaaggggaagcccatgcgccggctatttccagccggtgcgtcgttgccgccggctgcttcctcctccaccgtgcgccgtctgctgcttcgcctcctcgctcccgcgagatggaggttggggaagacggggtgaagcggcacgcagctctccttcccgcctcctcttcctccggcgacccccgcccccctccaccgcccacctccccgccctcctccgccgcccactcatcccttcgcctccctgccttctcccctcgatcgcacctccacccgctccgcccctgccccgtcttctcgcccgcaaaccctaaccctagctccgcgcgccag

SEQ ID NO: 37503 - DNA, 696 bp, Oryza sativa
  Clone ID: PAT_MRT4530_41227C.1
atggattctccgataacgagctactcaacgacttcagctgagagggagatccaacctaaccatatcggaaccatcatcgtcatcgacaacttggtctatcgagatcatccaagcctcaagcttcgcggtgtaccaaaagatgtcagatcgtatgatgtcgaacgagtacgcaacaagaggtgtagcgattctcccattacctctacttcaacaaagttgatatcaggtacacaatatcgccaagtgttttacccagagatccgttaccacaaaagacacctagcgttgaaacctatcctaatgtccctttacgccgtcttgacaaggcctccgaggaacctaagggaacttcggctggggacgcccagagcggataaggccttgtcggatcctgtagagacaaaagaccatgaaaattctattcgacattatcgaagactccatgtctctatggttctacaccaagatcgactaaggcgagtacgacaaatgttgacaaggcttcgtcgcagactctacgcctactcgattactcaagaacggttggtggatgtcgacaaggaatacggaatgaagagatggagagacgaaagcgctatctctgatcttgccgggcatgaactcgaggaggaagactaccctgttgtcgactacgagtcagaccttcagaccgccatgtcgacaacagttagatag

SEQ ID NO: 37504 - DNA, 423 bp, Oryza sativa
  Clone ID: PAT_MRT4530_41228C.1
atgggggagaagcgccgcccgaggcggtcgagccacccccgctgccgcggcgttgaggagggggtatgcgccgcgccgtcgaggaagggaggccgccgccgccggtgccgagcccgcagcgcgcccgccgtccagacccgccgcccgccgctgccgtcgtcgtctcgccatgcccgctgccgtcgaggaagggagtgccgtgcatggaggtcggggaaggccgccgccgccgttgcaaagcctgccgcgcgctgccgcgccggatgggagatcggggaagggaggccgccgccgttgctgaggccgccgccgccggtgcaacgccgctcctgcatgctcgaggatctcttcagcctttatgctctgctggatatcaacttgagattcagcccatatgaatttatgatgtggctcctacgataa

SEQ ID NO: 37505 - DNA, 1660 bp, Oryza sativa
  Clone ID: PAT_MRT4530_41229C.1
ctatctaactgttgtcgacatggcggtctgaaggtctgactcgtagtcaacaacagggtagccttcctcctcgagctcgcgcccgacggaatcagagacagtgctagatccactctccctagcccccagccttgtcgtcggagaatcgttctcgaaggataaggctcttggacccttgacatggtctttcgtctctacaggatccgacaaggccttatcggctctaggcgtccccagccgaagatcccttaggttcctcggaggcctttgtagatacatgccggagccgaagtcatcgagtagcttgttgtcggagagtccatatcttaaacgcatctcgtcgaaatctgttgtcgacatggcggtctgaaggtctgactcgtagtcgacaacagggtagccttcctcctcgagctcgcacccgacggaatcagagacagtgctagatcccaacctccactccgccggaagcaggtgcaacgtggaagcacggttgtttgctgatgacgtgaccggcgtcagaccagtcacaaaccggtcattcttgtccaccacgtgtcagtttagcatgctacacgtctgcccttcttcatacaatgacttccttgcaatgattgcgatgaagcctggaatgtatctggccggggttgacgtgtcaactccaggagttcccacgccggctccggctagggacgagtgcctggaggctctcatcattccgacgggacggggcgaggcgggtgggtggagaaggagacgagagagtggcgccgcgccgcctccgttcgacgtcgatgccgccactagtgcctgcgtcagcagggaggacgacggggtggcgatgggtgaggcggtgcagtgggtggtggggagaaggtgccaacggcgacgcacatgccggcggacggcggtggagatgagtccctccgcagcggcacagagacgggccgccgggagtgaggccctccgctccaggcaatccctagcaaggccggtggtagaggaggccgacggaggtggagtccttcatatcggcgccaacgaggcaaggggtagccgacaacgacgaaggggaaggacggctgtggggtcactagggccgcggcaaaaggagggggcggaggcggtggggacgggtgctgagcgctgggcagtcggcggcctctatttgggagaagaagacggcgactcgctcatgacgccgtttggaggacgaagccggcggcgagagcatggagggcaccagatcggcgatgatggatggagatggtgtgttggcgaagccgtcgtcatcgccgctggcgaccccgagctcctaggtgagcggcacctccttgaccacccccgcggccacttccctggccagcgcaaggagcagcgccaacaacaggagctcgtccccgggtcgacggcgacggacctcggcgcgacgaagaggaggtcgcccccctccgacggtggcagcggttcccggagtggaggagtcaacgatgtcgaagccggcggcgcagccgtgccggcgtggaagagggaggcggctacttggggccgctgcgagacgagcaggacggtggcggcggccacaagttccaaccctccgagatggagcagggccgagcagcccacccgccaccgtcgccgccgccgctccggcctttga

SEQ ID NO: 37506 - DNA, 4023 bp, Oryza sativa
  Clone ID: PAT_MRT4530_4122C.1
ggagaacctgagcagaagacaagaaaatttctcgagttctaatgggagacatgggactagtttattccccacttgtctctagtggggtgctaatttacaccagcccgtcttgtgtgtatgattgattatccttagccaaaatcaacggtacaaaaatcgtaagttacagaaatgtggtcaatccaaaaaggtatacgaaatcaacacctgaaaagaatgccaaaacttttgcaatgatccaaccgctgttcaccaacagaatctgctccaggcctattcaagaattaagataaaactggcgtgtttttttcaggagcatacctcgcttctccggaacaaagctaagagctgccagagtatctgagtatatacaagtctagctaacgcacggatcagttgacgaatagcccttttccaaattgaatttcggctcgctgggatatacaaagacagttgcggctgaggctgaaggagtcagtgcagcagaatacctcactgaagttattgttatccttggcagctgctgggaaccagaaccaagcggcacaagcttatggctaacaatatgctcggttttcggcagaatggatgcagcatgattgtgagccccagagaagacgaagttctgggaatcaacaagagagtacttgatttcctgaagtaaggatgttgaattgtagatcttcacatgaaaagtgaaagggattccaaggatagcataaggagggcactccatggtcacaacaagtggcggctcctcgatatgaacttcaggtaacctttctttcattataacacggctatcttgactctctccaatgcttgaatctcttgaccagctcaggcaaatttcacctagaaaaaagcttggactaatagtatgtggattcactgaaaatattcctttgtattcttcactaggagcaataactgcgtattcattggaaatcccactgatctgttgcactgagcagagttgttttccatcatcattagacacaatagtcatcgtgtgtagccgcaaaggtacctctgtgcaatttctagcacttaaaataagcatatttgactcgttgaaagcaagagaactttttttatcatcatcacttgaggatctgatcctagataataacaggggttctcgcctaaatggtctcaaaaactgttgactgactatcatggggatcttaccttcaatttgcaagcttctgtgcacattaagtctgtgcagtgctgcttcttcagtcgagtccagggaatagccaagtgagacatagaacatcactgacattgcttgatgccattttatttccaatttgcatgaccaggaatcacctgcatataatgtgggaacagatacaaccccaaacgagtgctggatttttcttatgctatcaacttcttcctttgacccattttccgtggtcacatctgagacaccaagaagttcaacatgatgactttcagattcttctgcttccctaggactcatcaaaaggcctccacctttggcatcgacaaggttgattttcagttcaccagaatgaactgcgtgtccttttgacaatatggtcactgggactgtaaataattctccaaccaatgcaggaccaggacaatctaagacaaggtcaacttgagcatctggctcttcaacttggatcagtttctgcccagaaaaagcaagtacattgtccttcataggtaatgcctctacttggtcctcaaatttccacaatgaaaattctcccattgaaacaggactttccgcttggcagcaaactacaagacgtttacttattgttgccttcaccgccaaacattccagctttccactctgtcctggtttaacttcatgagtcaaccgcatccatttatcagtgaacagtgtcagaggagtctgaacagctccatcatgaacatgtgaatttgatgcagaacaatcttcctgtgcactaactataacaaagttacagtcggattggttaaactgaacctccaacttatcaatcataactggacaaggaagatgagactgtagagagacactgacaagcattggtgaatcaggttttacagattgatcgtgaaaagcaacagatgcgagaaacactatccttagtggacttatttgatcaatatcgaggtgagtagattcttccatcaaatgaagatcaaattcatcatcagtgttctccgatgcatgctttccttccaagatattaataacttcctgctgtataagctctctactggaaatggtaggagatcctgctggtccatttttccttttattttctgaatttccctgtccactgccagagaataaaggtaatgcagccatctcaagtgaataactgataaagtccttcagagacttaagtttccttgcacattctctcaagtaacctaggttttcccaaagtaaagtggcccaaccttcttgacggtataggccagcaacaccatcaaaaagttgttttgcattactaaaatcccctgctgcataatactcaatggccattccaccactacaggcagaagccattcttgtggcacctaggctccgaaatgattcataagcttttctgaacaatgcaattatctcataggaatcttgaaacctttcagcttctgacaaagcatagctggtatactcagtatcagaaaggggaagcaccgcaactgtatctccttgctcaaacaagcgtacatactgaccaacatatacggaaggcattactgactcaggtaatccattgactcctttggtaaggcttacacttgatgaagagaactctaaggcatacctcttctctctcaagtaatttgccgccaactgatagtagtaagctggttgaaattcccactcggtcagtgcgttgtcagcagtgccaaaacgaggagatagtgtatccggaacagttgtagatgttgtttctatgagctcaccaaagacaaggaactgcctgctaaaccattcccagtgaagaaaagcaacttctggtgatccaacaacacgctcatagcttctgatatgcttacggaaccatgtgattgctcccacaaccttccccccatgaagtaatattgttgatatcttaaagtgaaattgctcagcaactgcttttacctcaacaaggcgttgtgttggaggcagtcttgttgaagttcctatcatctcacgcagaacacgaatgccctcctcatagaactttaatgcttcaggccaatcccgcctaaactccgcataaacagcgaccttgaaacagtagcgaatgctcagctcaacagatgagaaattccttttctcgatgcgagctttgacccttcgtccttcatccttatagtatgtcgtacataactccgcaaaaacagttgtcaacttgttgagagatttggtccattccatttcatctctctcaaccaaaacaaccaggtgctttgaatcaatttctgcacgtttcctcagagcaaccgtaacatcctcgctcagttcatcaccagcttgactctgtacaaggatcaccactaatttagtgtttcttccctgaatcacagacttgaggttctcgagatcggagcaggcctggagccactgggcggggtccccggagacctgatcggcccggaacatcgcggcgacggcggcgggcactcgggtgcggtgcttgaggagccagtccttcttcaggatcccggcgggggcctgcggcggcgcgagcgggtcgcgggccttggcggtgcgagcgaggatggaggccttggagaagtccgggagggcgagcaagttcatgggcggctgcctggagctcagcgccgccgagatcgcggggtgcagctccgggcaccccacgatggacaccagcgacagcggcggcgtccgcagctcctccgggtagtcctccatggccgccccacccgcggcgccgcggcgaggcgaggcgaacggtcgggaggcgctaggtccggtcgccgccggggtggtggccggggaggacggggagctcggataaatggtga

SEQ ID NO: 37507 - DNA, 2031 bp, Oryza sativa
  Clone ID: PAT_MRT4530_41230C.1
ttttattttaactctttttttttttttttatgacacacagaaagtactcatctttgacatttgcagcagagttgcacaagggcagtatcaaacatgggcagggagttgcacaaggtaaaggttgcacgaacagcagtatgcacagcaagatcgtcatcctgcaggatgttggtttttcagaagcacatttatcattgtttctaccttggctccactggtgagaggacctccacttcagcccaccagagcggagacaatctgggcgttgctgcatccggcgaaatggctatggtctctctcagccttgtggtgatctccctcatgcctggtctcttcgttgggtcactctggatgcattccatgattatctgacagatcacatctagctcattttctttgtgtgactctagtactgaatcaagcatggaggctatactccgacctttgataatgcaccccaaagccagattcgccagggagccctcgttttcagagtaagggggtttccctgagatgatttcaagaagcagtatgccaaaactgtaaacgttccctgccagtctagcagatattggttcatgatgatcattattcgctgtcgactttttgccgtcggaaaccacttcctgccaaacactcaagtctgcaatctttgcagcacaatcttcagaaagaaatactgcacttgaatgcagatcagggtgcacgttggcagggttgagctcatgcatgtgctgaatacagtaagctattcccatgattattctcattctacttctccagtcgatgtgatcaaaggcctcatcatggagattctcataaagcgtcccatttggtgcgtattcgaacaccatcaccctcgtgaaaggttcttcctcctcacaaaaccccagcagattgatgaaattcttatgatttattcgtgagagcgactctatctttttcctgaaacaatcttcacagtgctttgaccaatctttgctggatttaatcgttgtcgatacaacggcgatctcaacaccggatgataaggttcccttgtagacagtgtagtatggatgacttgccacaatattactgaagtcctcacaagcacgctccagttctggacgctgtaattggggcactcctgacacaaatgccttctgcagctggccactgagtccagtcctccaagggccaatagtcgcaacggatttcttgcggcatggcaagaacatccatgccatgccagcaagcataatcaaaccagccactggaatcacaactatatacagccacttcttgaatcctttgcttgatcctttatttgcagaagcctcggcagggtgggatgaactatctagaggcttgtaatttggatcattttgcagttgatgagatgttggaaacgtcatgtttccaactgttgggaaatgatctttgtagagtagagcagcgtgatttctgtcatgaagtagcctccggttgctaagctgaacgggtagctcgtccagtgaggagcaaccgatcacgacagcttggagaatcagcaccacgagcacgaaagaactcgatgaatccatcactgggatattcgcgaccaacacctgatgattcagttgctagtgtcttgaataaatcagaacacaggggcagaatcatcagccaaattcaccttttgcttggctgctgttcagacttcagaaataattctgctcacacagtgcagaaactggagcatgcaagggttcaggcttcagactagacagaggctagaggaagcaacaggagctcgattcttggtagtagttgaagaaccaggagcaaatcttcagataaagaaaaaaaaaagggggagatttttctgcaacgactaaactggatacaggaggaatgggtaaaactcttggttcactgcattcccttgtattcttctctctttgtcaaacatctcggttgtgttgatcagttaatgcagggattattaaacaagaaggaagaggacgaagacggcggacgcgtgggcggacgcgtgggcggacgcgtggg

SEQ ID NO: 37508 - DNA, 264 bp, Oryza sativa
  unsure (1)..(264): unsure at all n locations
  Clone ID: PAT_MRT4530_41231C.1
ccgagggatggctcgaggaggccatcgccgacgagctcctccgctngctgccncccccgccgccggcctagaccgtcatctctgcatattaatcctgcttgaggttaattagttaattaccgcggtaatccatcagtgaaatttatatatgactgatgatattgcagggcatctcgatgcgtatgtatgtatcgtcgttgtttcgtggtaataataactggtagtaacacgtgactttataaaaaaaaaaaaaaaaaaaaaaaa

SEQ ID NO: 37509 - DNA, 215 bp, Oryza sativa
  Clone ID: PAT_MRT4530_41232C.1
accggtcagatcgcgggttaggtggcaacaggcggcctgtcacacgcctcgccccgtcccgtcggaatgatgagagcttcctggctctcgtccctagccagagccggcgtgccaactccaggagttgcggcccgaacctgtctacgtcgcccgtgtcttgcgcatttcctttctcgctgacgttcctcagatcgagggcgaagaacctcacttag

SEQ ID NO: 37510 - DNA, 489 bp, Oryza sativa
  Clone ID: PAT_MRT4530_41233C.1
aaagccgctgcccctgccggtaccgaatcgccggtccgggccgaccggccggtccacggtttagcaaagcatgtctggatgcccatcccttaacctctcctgcgacaacacttcctgcaacctcttctgctgccaccccaaacaacacgaaccaccaccggcaccccacgccgccgccaccaaaccaccgccgtcgccgccacacgatgacccacccctcaagccgccgccgcagcagcagttcataaccgcacagccaccgccgccagatgaaccaccgctcaagccgccgccctcgttctacccagccgtgctgccgcctgagccgccgccgccacgtcgtcctgcagcgacgccgtacagcaacagagaaggcgtcgacgacgacgacagccatcacgtggcgccgccgtcacgccggtcgcccgcagctcgtcctccttctgcgccggagacgccgctgccgttgccttgctgtgagaagccccc

SEQ ID NO: 37511 - DNA, 238 bp, Oryza sativa
  unsure (1)..(238): unsure at all n locations
  Clone ID: PAT_MRT4530_41234C.1
agcagatcacgcgcgcacgaacccaaaacaaaaaaaaaaagcacagcgngngaactccacggagcagagacacctccatcaccttatcctcgncnccgggaccagagccgccgccgtcgccggtnncntcccctncggctnccgggcgggaggggccgtggctgacgtcgncgccgccncattnggtanngaggatgccaccgcgtnggnccagtggaagcgggcgttcagggcagta

SEQ ID NO: 37512 - DNA, 246 bp, Oryza sativa
  Clone ID: PAT_MRT4530_41235C.1
atggcggttgagatggggcagatcgtgcgcgcattaactacgcccgccaaccaccggtcagatcgcgggttaggtggcaacaggcggcctgtcacacgcctcgccccgtcccgtcggaatgataagagcttcctggctctcgtccctagccggagctggttgaaatgggcgtccaccgggaaagcaggcgagcggggcaggaggcgtgtgctctgcttgtcagaggtcacttccggctgtgactag

SEQ ID NO: 37513 - DNA, 158 bp, Oryza sativa
  Clone ID: PAT_MRT4530_41236C.1
atgacctcacagccatgccggatctactgcagattggcactgttctcgtcgtccacgcctctatacagatatgtcaaatggctccccaatgccatgcggctgaggaagaaggcgcggacgtggcctatcgatcttttatttaagcctgtcatcgagga

SEQ ID NO: 37514 - DNA, 3026 bp, Oryza sativa
  unsure (1)..(3026): unsure at all n locations
  Clone ID: PAT_MRT4530_41237C.1
cgtcacgaggcgccacgtcacgcgcccggccaccttcctccggcccctgcgcggatcctcgcgttctccatggtgcccccgtcggcggcggcgagcggtggcacgggccaggacgctgctctgcgtgccggcgacggcgctggcgccgcgggagatggcggcggagttggcggccgccgcggcgctcggcgccgacgtggcggagctccggctcgaccgcctcgccggcttcgcgccccgccgggacctccccgtcctcctcgcgcagccgcgcccgctccccgccctcgtcacctacaggccgaagtgggaaggaggtgaatatgaaggcgatgacgagccacgattcgaggcgcttctattggcaatggaaatgggggctgaatatgttgatattgagcttaaggtcgctgacaaatttatgaaactcatttctggaaagaaacctgaaacatgtaagcttattgtttcatcccataactttgagaacactccttcaacagaggagctcgaaaatttggtggctcagatacaagcaacaggagctgacatagtgaaaattgcaaccaccgccaccgaaattgttgatgtggcaaaaatgtttcaaatacttgtacattgccaagaaaagcaggtgccaatcattggactggtgatgaatgatagaggttttatctctcgagtgctctgccccaaatttggaggataccttacttttggctctcttgaaaaaggaaaagaatctgcgcctgctcagcccacagtaacagacttgattaatgtgtacaatattaaacagattggtccagatactaaggtgtatggtattatcggaaaacctgttggccacagtaaaagcccaattttgcataatgaagctttcagatcagtgggtctcaatgctgtatatgtgccctttttgtcgccaaggacattggagctgtcaatacaatcatcagaaaacctaatggaaaacttgtaggctacaatactgactatgttggtgcaatttctgctattgaggatggaataagagcttcgcaaccaacggatactaccacttcaccattggctgggaggctttttgttgttattttttgtccaggacattggagctcactatcttatggtgcaaaagcagaagggaacacgtatttgctaatagcctgactatgttggtgcaatttctgctattgaggatggaataagagcttcgcaaccaacggatactaccacttcaccattggctgggaggctttttgttgttattggagctggtggtgcagggaaagcactagcttatggtgcaaaagagaagggagcacgagttgtaatagcaaaccgtacttttgcgcgtgctcaagaacttggcaacttacttggtgcgcctgctctgactttggcggagttggaaaattaccatccagaggaagaaatgattcttgcaaacacaactgcaattggaatgcatccaaatgtcaatgaaactcctttatccaagcaagcacttaaatcttatgccgttgtcttcgacgcggtgtatacaccaaaagagaccagacttctccgagaggccgcagagtgtggagccacagtagttagcggtttggagatgttcataaggcaagcaatgggtcaatttgagcattttacaggcatgccagtggttgattgtagtattggacaactgtttctttttttgccccatagatggttaagcatgaaagatcggtaacggaaagcttgtttggagattgggttgcatcaaagatcggaaataaggaagcttgtttggagatatcaataagagtaaatcagcaaaggcacggcagcgcgctgtaccacttcggcaccagcggcgccgccgtcgccgccgccactgccgtcacgcacccgctcgctcttggaagtgtgaggtatagtagtagtagtgtgggattggggaatgggagcaaggagattggcttgcaaaattggggtgctgatgattcaggtttagtttcatccatcagatatgttatcaaagttaggctccaaatgcagcttgctgggcaaagaggaaacttagttggaatggggacaatatttacacaaatggtacaagtggaagggcctcgatcactctacctgggactggcaccagcattgactagatctgtcatctacggtggccttcgattagggttatatgagccctgcaaatatgtctgcaattatgcatttggatcaacaaacttcgcttttaagtttgcatctggagtaattgcgggcgccctagcaactgcgttgacaaatccaacagaggttttgaaggtgagatcgcaaatgagtccaagcagaaccagtacaatcggggtgcttaagaaaattgtagcagaggaaggggtcaaagcactttggaaaggagttggcccagcaatggcaagggcgggctgcctcacggcatcacagatggctacttatgatgaggctaagcagcgtgagtgcaaaggtgccagagtatacaggaatggcttccattgtggttatcaggttgtggtgacagagggtgtaacgtcgctttataaaggtgggtttgccacctttgcaagattaggtcctcagacagcaatcaccttcgttgtgtgtgagaagcttcgtgaactcgcaggaatgactgctatttagtgactagtgactcccatggactaggaagatcgctagacccatgagatgtttagtcggagggcntttttgttgcccctgttaaattgcaaggcattgatgtgttgccgcattgcattatgcagaaaaattgcatgcgatgggggattgccatgctggaactgtgttgacnctcctgcagaatttttgttgcttncaatgtgcaatggatgtgaattctatttggttacaaagtttgagttacacacctgttcttgtcaaataacattatttgacaacaaggtatatggaagaaacagacatgatagtttcagttagtttcaatacatgaaattgttctgaataaaaaaaaaaaaaaaaaa

SEQ ID NO: 37515 - DNA, 456 bp, Oryza sativa
  Clone ID: PAT_MRT4530_41238C.1
gtgatgaatgatagaggttttatctctcgagtgctctgccccaaatttggaggataccttacttttggctctcttgaaaaaggaaaagaatctgcgcctgctcagcccacagtaacagacttgattaatgtgtacaatattaaacagattggtccagatactaaggtgtatggtattatcgggaaaacctgttggccacagtaaaagcccaattttgcataatgaagctttcagatcagtgggtctcaatgctgtatatgtgccctttttggtggacgacctggctaactttcttaatacatactcttcaccagagtttgctggttttagttgcacaattccccataaggaagctgctgttaggtgctgtgatgaagttgatcctatcgccaaggacattggagctgtcaatacaatcatcagaaaacctaatggaaaacttgtaggctacaatac

SEQ ID NO: 37516 - DNA, 215 bp, Oryza sativa
  Clone ID: PAT_MRT4530_41239C.1
ggggccacaactttaaaaattggtcaaaaaaacactttttggggacaacccacacgagagttatttccaggggaaaacaattcagcccaaacgggccacttgtcaccaaaagcaaagaaattggggaaaaaatataatggacccggtacccccctttttaaaacaccaataaaaataaagagggaaggggtggccctgggaaaaaaaaacatttt

SEQ ID NO: 37517 - DNA, 576 bp, Oryza sativa
  Clone ID: PAT_MRT4530_4123C.1
atggcggacatgctccgcttccccgtcgaccccgacctccgctctcctcctcctcctccgccgcctcctcctccacctccgcgggacgacggccatcgcacgcgggtggacctgccgctctttcatccaccgcccccgccgtcaccaactccaggactcaagcgagatcgctcaccagagggcgagctgctccctctcccacccccgctcggctcctcacgccccgaccgcctcagcgatcacctggagggggccgccgcgcctccgcgtgctgagatgaggagcgccagccccactcctacgtccgagaggtcgccttcaccgccgctgcgcttggacgacccggtcggctgccgcagtccaccgcgcggagagaggttcgcgaccatcggcttggagaaggagcgagccagggaaatggacagggacacttcatgttacgctcaatattgcttcaactatggatacgatggcctctgtaatggtcaaggtaacgcccagagtgatccaaacgccaaaggtggaatgacagttgaggagcaacctgtaccagtttacattgcactggactattaa

SEQ ID NO: 37518 - DNA, 1045 bp, Oryza sativa
  Clone ID: PAT_MRT4530_41240C.1
atggcccacaccctccgcctcctccacgactcacccctcctctggatcgtcgtccaggccggcaaccccaccccggaagccgccgccgccctccgccgcaccgccgtcttgcaccgctatgtcggatgctgccacaacatcaatgcctccgcccctgacttccgcccccaccagatcaacgccgccctcgacatcgtcgacaaccaccgcctcgacggcgtcctctacttcgccgacgaggagggcgtctactccctccacctcttccaccacctccgccaaatcaggaggtttgccacatggcctgttccagaaatctctcaacacacaaacgaggtggttctccaaggccctgtatgtaaacagggccaggttgtgggatggcacacaacccacgacgggaacaagctgcgcagatttcatcttgccatgtccggtttcgcattcaacagcaccatgctctgggatcccaagctcaggtcccatttggcatggaattcgatcaggcatccagaaatggtgaaagaaagtctccaaggaagcgcgtttgtagagcagctagtggaggatgaaagccagatggaaggcatacctgctgactgctctcaaataatgaactggcatgtgccattcggatctgaaagtgttgtctatcctaaaggatggcgggttgctacagatctggatgtaattatccctctaaaatagtatcaccagctatgttcaccaaagtgctaactcctttgacaggcatatactgtagaaattaggccttggcaagtgtgcagagacatttatactttggagagcatctctcggaaagggaagacttcttcagctgttgcttcataattttgtaggattcataattgcttggacggcctctatccaaatccaatccaaaaaccttctctttgccgtgtatatgttcatgttgtagcaatttgtattcatttttttgggttcaaaagccaaacggcaatacatgtttcaggatatttaatttaatagcattctttcttctgccctgtgcagattactgcct

SEQ ID NO: 37519 - DNA, 285 bp, Oryza sativa
  Clone ID: PAT_MRT4530_41241C.1
atggagttgttgccggagtggtcgaacgcggagtcgaagccggtggacatgggctgcgacaacggccgggatggagcagttgtcggacaaatgtggagcgaggatgacaaagccaccggcgacgagctccggtgtgacgtggacggtggaggacccaccgacgatgacctccgacgtggggcatggacgacggaggatgcgaccgccggcgacaagctccagcatggggtgtggagggtggggccactggcgatgacgcctcagtgctcgactcctaatacctag

SEQ ID NO: 37520 - DNA, 352 bp, Oryza sativa
  Clone ID: PAT_MRT4530_41242C.1
tgtatccccctcccatacttctccaggctctggtgtccttttcgtggcatgtgccgtcgttacgacggcgttacaagatgtaacattggcaatggcgtccttcgcctacgccgcagcgggcgtgtgtcaccacgcactaagatccgggcaatatcaggcctacgggcggcctcggcttttgcacgaacaccatcattttcaggccgttggagctcaccaagcgtgggggaggcggtggccacatcttcgtggatgggctgaggcgcgcggtgttgctgcggcttgtgggggacatgccgatgtctgataagactttcacccagcagactatggacgctgtcggggtctaccg

SEQ ID NO: 37521 - DNA, 832 bp, Oryza sativa
  Clone ID: PAT_MRT4530_41243C.1
cgtatagtttccgacaaaaataaacaattaataacctaattcttatgtattctcgacaaaaaggcctatcctatacaagttcttctaattcagtgcttaataggattcttataataatgttgcaaatttggaaggcaagaaatgatcttaaatttcagggggaaaaaatggagcctcctcaagtctgcatggcagctgaagctatgatcaacacttaaaataaaattctcttcttataattcaatacaagagaatttgcaggaagaacaaagggggaggggacctggaagactgccagacggaaccagatgttacatagatgcagcatgggaaaatggaatcacaggaatggaaattttctttcatatgccatctactcataatgccatttttcttaaagcctcctccgaggttccttgctcttccttgcaggctgagttaatggcgcttcaacttgctttggaggtgactgtcttcttaacattgaaggagtgactctcctctctgataattctaccattgtggaaacccttagaaaaggaagatttcaaacggagccaggtcattggagcttaagacctatttggagtcagatcgttgccacaattcctgaatctcttttgcaggtcatgtggattcctaggggcataaacaagttagctgaccaactagcaaaagaaaccaaatccagtgttaatacagcccctgtctatgtttgtcaaaatatatcgcatttggcttatcctaccagaagatgtcatgctaatgacattagagacaatttcaattccaggaactttgtaatccggcatgttctatgcttctaaataaa

SEQ ID NO: 37522 - DNA, 471 bp, Oryza sativa
  Clone ID: PAT_MRT4530_41244C.1
atgggcaccaagcttaggaccgattttaccatggtaatgcgacctatcggttccatttgctcagccttccacgtcggtagccggctagatgaatgcgaccacgtcgtcaacgtagaaagacacccggtgagggacactgagaggttgaagcaacccttcattctgagccttaacaaagagggagctcagggagtctatcaccaagatgaaaaacaagggggatataattgggtcatctcgccgaatgccgcggcgatgaactacaccatcccccggcatgccattcagaaggatcttcatgcttgccgtacgcagaagcatggcaatccaggagttccaacgttgtccaaagcccttgtgctccaggacttccaggatgatgaactgccaagagatggaatcgaaagcttcggcgatgtccaacttgagccgcaaggccggccgccgtctctcgtgcaaacgcttggttga

SEQ ID NO: 37523 - DNA, 232 bp, Oryza sativa
  Clone ID: PAT_MRT4530_41245C.1
gtttgcacaaatgttgcaacacaataagttttgtgtgttttcgtttgcagaggtacttgcttgggtgaaagaaaagagactgagcgtaaggaatgcatggatgattgaagaaattgattggggaccaaaccaagaccttctccaagtcttctttcatctcaccatgtcacttttagcccatagaagacaagagatcaagttgtacacgttttggattcggattcgggcctcc

SEQ ID NO: 37524 - DNA, 6306 bp, Oryza sativa
  Clone ID: PAT_MRT4530_41246C.1
tacatagaatttacgtaactgatcaatgttccaggagttggataactcgcggccatcgccatctacaattttgaacgcgcctggtcgcagtacttgtaccaccgtgtatggtccttcccacttaggcaagagtttgttgcgtcctgcctggttttgaactcgtcggaggacgtaatcgccgatggtgagtgtgcgagctctaatgcgtttctcatgatatcggcgtagggcctgttggtatgcggctgctcgaatggcaactcgttcacgatgttcctcgagaagattcacattgtcgcttcgcctttcgtcctgttcctcgtcagtatacttctgtacgcgtgtactttgtacgcgtgtcgaagcacttaataaatcagaccgtgaagttaagggaaggaaaggacgttggactgagggcgtccctttcggagataagatttaatcgagataatttttaattccatatttcagaatcgaaattttcaggatgttacagttgctctgaggatgggacactgaggcgaagcagatcttgactccaagttcgatgcagtaatcttggaaatcaccgttggtgaattgggacccgttgtcggtaaggatgcggtgaggcaacccatatctacagaatatccccttgataaattttatggcattttcggctttaatttctcttgtcggctttgcttcaatccacttagtgaaattgtcgatcggcacgaacaggaatttgtagcccccttgtcctcgtgggaatggcccgagtatgtcgagcccccagcatgagaatggccatgtcaaagggatagtctggagcgcttgtgctggcaatttggtgtgtttttagttcacatgcgtctttaagagtagttggccagaaaaagccttgtctgaaagcttttccgacgagagtacgtgcgccggcgtgtgatccgcaaatgccttcgtggatgtcaaggagaagagtttttccgtcgtcggatgatacgcacttgaggaggattccgtttggggccttcttgtataaatcgttgctgatcatacaatatatcttggcctgacgggatagtttctctacctctgtgtcgtcatccggcagctcgtctgactccaagaatctgattagcggggtgcgccagtcgtctgttgtctctatgttcgcaacgacgtttgtgaattgtgacctctgcagctccctgcgagatgctggtattggctgtggtgctttcgtcgtgcgtgtccttgatggatggttttgtcagaacgtccaaaaacgttccgggctcgagtggttctcgcctggaagcgcgtcgtgcaaggtcgtctggttcgacattgtcttttcggtagacatgtcgaacttcgatgtcgttgaacttgcgttctagttttctaacctcggcgagatatttggctaactcggggttggagcatttgtagtctttgtgtacttggtttgcgaccaattcagagtctcccttcacgattagtcgcttgacgccaagcgcggctgctgcttttatccctgcgagtagtccttcgtactcggccgtgttatttgttgcccggaagtttagatggattgcatgcttgaattgatctcctgtgggggatgtcaagccggtgcctgctccttggctattcagtgctccgtcaaatgccatgatccaggtttcgttgtccgtttgggcggctgggctatcctctgggatagtccagatggctacaaaattggcgaggacctgtgacttaatggttgttctaggcacaaagtggatatcgaattggcttagctcaactacccatttggcaattcagccgaccacatctttattcctaatgacttcacccaaagggaaggaggagacgacggtgaccttgtgagcctggaagtagtggcgtagctttctcgatgtcataaccaccgcatagagcagtttttggatctgtgggtatctaatttttgcgtcgtggagggcctcgcttacgtagtacacgggatgttgttctttttccctctctacgacgataaccgtactcacagaataaggcgtggtagcgatatacaggaataattcttcattgatgtgtggagcaacgagtacaagggggtttgacaagtagcgcttgagcgcgataaatgcgttctcggcttcttggttccactcgaattggtcctgcttcttgagcagggcgaagaaaggttgtcctcgttctcccatccttgcgatgaatcggcttagcgaagccatgcatcctgtcaaccgctggacctccttgagccttgtgggcgacttcatgttctcgatcgccttgatcttctcgagatttgcctagattcctcgtcctgaaactaagaaacctaggagcttccccgacggtactccgaatgtacacttctccgaattgagcttcatttggtatcttcggaggttgtcgaacgtttccctgaggtcgtcggttagtgagtcgcttttcttggtcttgacgatgatgtcgtccacatatgcttcgacgttttgtccgagctgagtaccgactgctccctggatcctgcgctgatatgtgttgcctgcgcttattaatccaaaagacatcttggtataacagaatacaccgaaaggcgtgatgaacgttgtcttctcctcatcctcttttgccatgctaatttggtggtagccggagtaagcgtcaaggaagcttaacaactcgcaaccaaccgttgaatccaccaattggtctattcgaggagagggaagtggtctttggggcacgccttgttgagatcggtgaagtcgacgcacatcctccacttcctgttggctttgcgtactattactggatttacgagtcactctggatggaggacttctcttatgaagccagctttgagaagtttgtctagttcttttcgtatggcttgtttttggtcgggtgcgaatctccgcagtttctgcttaactggcttggcatcgggtcgcaacatcagtttgtgctcaatcacctccctggtactcccggcatgtctaacggttgccaagcgaacacgtctgcattgtctcggaggaaggtgatgagcacgagttcagttttgtcggggttggagctagacagtgggatgatcttgatggcgccatctggttttggtgtcttcttgggcttgctcactttcttggggttttcggttgtggcgggcgggttaggagtatgctcgaccatgtcgaggctccgcttgtcgcattgtactgccaacttggtgttcccctggatagtgattgtccctttcggtcctggcattttgagcacttggtatgcgtaatgcaacgccgccataaattttgcgagtgcagttctcccaatgatggcattgtaggcggtgtcgaactctgcggcatcaaaggtgatctgctctgttcggaagttttcggcatgtccgaaggtgacgggtagcatgatctttcccaatggcttagacgacgactccggggtgattctgtggaagggctaatctgtgggtgtcagctcgcttcgaggtattcccatcgcgtctaaggtgctggcgaagagcaggttaatcgagctcctgccgtcgatgagaactctcgccacctttatgttccgaatagtgggttcaaccactgttggatatctgcgacgtggatccgccgaagatgtgggagacgtgtaggtcgtattctggaaaggcagagtcggagttggcggcggcggcttcttctgccgtttcgacaactcgtactcgcttccctctttcgatcgctagttgtctcgcaagctctttttttatgacatagaaatcctccatggcgtgattgcttgtcttgtggattgggcatcatgccttgcgcgagtcgtcgctctggggattggggcgtctggacggttccacttgttccgtggcaaggacctctatcgaggacttgcgctacccactcttgcggcttctctttttgctcgactctggtgcatccttatcggtcgacttcttcttctcatcccccgccttgctttttccctccttgcgcctcagtgcatcgtctgcatgagcgcatctatcgatgatctcgaatagctttcgggcagacgtgattcggcgcgtcgccaactcctgggtggtgtaccgatctcggacgcctgatctgaatgctcggatgacagaagcatcggtgatctcggggatcgtatttttgcacttgttaaagtgccgaatatagtcccgcaatgactcgctcgggttctaagttagagcgtgtaggtcgtcttcaatcgcgtggcgcttgtatgtcccttggaagttggcgatgaactgctaccacaaatcttcccacgaagaaattgagttcggcgagagatggacgaaccatgaacgagcagaacctttcaacgcggctagcaaataattagccagagtgttgtcgtctgcaccagcggcatagagaactgtggagtagacttgcagaaattcttctgggtctgtacctccatcatatttctcaatcgatcccggtaggaacttctcgggccatcgcacattgcggagcgctggtgtgaacgccctgcatccgtttcctgggatagggtgtggcccgtggtcgcgacatcgtcttggaggccgatccgaagaggacgacgaagacgaggatgaggggtcacttggctcaggagcttggcttctcgagcgatgatcgcgtcctcgatctcgactcggataaggagattgggagtttcgatcacgtcggttgtcgccgtccctctcctgtcttcggcgattattctcctgacctcggttgttgtcgttatcgcatcgatcattatggggccgatgatctcgatcttcatttggggtatttcctcggtcctcccgacgagaaggagagtgatggcgacgatggtcgtcttcgttacgatccctcctactctgctggcgtctgttcagatgctcgcgaagatcgctatcttcacggcgtggtggtgtaggatcatgtctttctcgaggggaatgatcaccggtggcatgtcttccggcgaggtcttctccatccgcgtccttggtgggtcgctctccgttcctgtgcggctctgggccgcctgctgcttcggcaaacgcggcattgaggttcgtcacagtttcccgtagtcgctctgccaattggctggcgtctgggtttgttactggatcgaaaggactttctctcaatatcgcgtccaagttccgcaactgatgagcgggcattctcgctgctgcggacgcacttgtcttagtgttgtcgaccacgtttacatccctaggtgactgcgaggagggttcgttgccttcaaggaggtgcaacacggatggctcgtttgtaccgacagatcccacaaacctatctggaatcggtgccacatctggttccttggcaacgcacggggtttgaactcatggttgttggacacgatgatgcgctggtttgagggtccagagaaagattctgcaatttgtgaaatcatgagatctagatctgtggatcggacagtaggtggttcccgttggtgaagtgtgttgaatccctcgttcccaacaggcgtagagttcagcttgtacgtggagtatcaccggacagtcctcgagagtatgcttggttgtcttatgcacaggacaccaagatctcggtcttagggtggtcatccttgtcggctttgatctttcacatgaagggtgaatttcagccgcctgagggttcctcccagatgttggggccgtcgatgttccgttctccacctgagtgggaggaattgtcggcggggcgtcgtttctctcagtcgttgccgtacctctctcgttcccaatgatgattgggccagccgagattggtgtaacggtatagaccagaaagacaatagatccgacctaagtccacactagcggtgtcgaggtagaaactccttgatcgacgctggcgatgacactgttgtcgggaagtcctgaagtcatactggtagatccttgagcaccaagtccccctacttggcgcaccactgtcgacgtgggatactcgcggaccggatgagttaattattggggtatgttggaacgagggtttcgtaaactttggtgggtgtgtggtcgatgagatgcgatgcccttcgcctccccctaggggtcccttttataccgtgtaataccttgaccctcatgtaagacttagggatatgtaaaccgacacgatataacagagattttaccctttccgagtaggacttcggcaatttcttaactcagagatattttccataacttgagac

SEQ ID NO: 37525 - DNA, 982 bp, Oryza sativa
  Clone ID: PAT_MRT4530_41247C.1
ctagcaaataattagccagagtgttgtcgtctgcaccagcggcatagagaactgtggagtagacttgcagaaattcttctgggtctgtacctccatcatatttctcaatcgatcccggtaggaacttctcgggccatcgcacattgcggagcgctggtgtgaacgccctgcatccgtttcctgggatagggtgtggcccgtggtcgcgacatcgtcttggaggccgatccgaagaggacgacgaagacgaggatgaggggtcacttggctcaggagcttggcttctcgagcgatgatcgcgtcctcgatctcgactcggataaggagattgggagtttcgatcacgtcggttgtcgccgtccctctcctgtcttcggcgattattctcctgacctcggttgttgtcgttatcgcatcgatcattatggggccgatgatctcgatcttcatttggggtatttcctcggccgtcgtctctttctcgccgcgagggagagcgatgatgatgttgtcgatgtggagtaccgtcctcccgacgagaaggagagtgatggcgacgatggtcgtcttcgttacgatccctcctactctgctggcgtctgttcagatgctcgcgaagatcgctatcttcacggcgtggtggtgtaggatcatgtctttctcgaggggaatgatcaccggtggcatgtcttccggcgaggtcttctccatccgcgtccttggtgggtcgctctccgttcctgtgcggctctgggccgcctgctgcttcggcaaacgcggcattgaggacaccaagatctcggtcttagggtggtcatccttgtcggctttgatctttcacatgaagggtgaatttcagccgcctgagggttcctcccagatgttggggccgtcgatgttccgttctccacctgagtgggaggaattgtcggcggggcgtcgtttctctcagtcgttgccgtacctctctcgttcccaatga

SEQ ID NO: 37526 - DNA, 221 bp, Oryza sativa
  Clone ID: PAT_MRT4530_41248C.1
aagcttctcaacggcaaggaaacttcaaagtatcaacaaacaatgaagatcgattcagtgatcttcaattcactgccagcggtaatgtgaatattcaaccaaacatcttcttattatcaggtggatctgttctcctctccggaagtaatttgtcaatgaaatccaattcagatatcagcttcactgctgactcataaccatcctccaaaaaaaaaaagctt

SEQ ID NO: 37527 - DNA, 1104 bp, Oryza sativa
  Clone ID: PAT_MRT4530_41249C.1
tcataactccgttaggagcatggcttcagatccgtataccagtaagaaaggtgtttccttgttgcatgtagttggcatggttcgtacgacccatagaactgatgggagttcttcaacccacgttttgtcataggccataagcctatcatgaacgcgagttttgatcccttgtagtactattctgttggcccactcgacttgtccgttgctctgaggatgggacactaaggcgaagcagatcttgactccaagttcgatgcagtaatcttggaaatcaccgctggtgaattgggacccgttgtctggaagcgcatcgtctggttcgacgttgtcttttcgatagacatgttgaacttcgatcccatcgaacttgtgttccaattttctgacttcgtcgagatatttggctaactcggggctggagcatttgtagtctttgtgtacttggttcgcaaccaattcggagtctcccttcacgattagtcgcttgacgccaagtgcggctgctgctcttatccctacgagtagtacttcgtactcggccatgttgtttgttgcccggatgtttagatggattgcatgcttgaattggttccctgtggaggatgtcaagatgaatccgacgcctgctccttggctgtccagtgctccatcgaatgccatggtccaggttttattgtccgtttgggcggctggcctatcctctgggatggtccagtcggctacgaagtcagcgaggacctgtgatttaatggctattctaggcacaaagtggacatcgaattggcttagctcgactacccatttggcaattcggccgaccacgtctttattccagacgacttcacccaaagggaaggaggaaacgatggtgtccttgtgagcgtagtacacgggatgttgcactttttccctctctacgacgttaactgtactcatagaataaggcgtggtagcgatatacaggaataattcttcattgatgtgtggagcaacgagtacaggggaatttgacaagtagcccttgagcgcgataaatgcgttctcggcttcttggttccactcgaatttgtcctgcttctttccaaccaccataaccgtcat

SEQ ID NO: 37528 - DNA, 763 bp, Oryza sativa
  Clone ID: PAT_MRT4530_4124C.1
ttgtagaagactatctgtatagattttatcttgaagcacattattcttagagtcagtattcctctaactttgactacggatcaatgctcttctttcatgtctaaagaggtgaaaggctttgccgaatcttatggtatgaaattgttgagttctccttactacgctcatgctaatggacatgccgagtcgagtaataaggttttattaaaattagttaaggaaaaagtattgacgaacatcacaaaaatacggcatgaggtgctctccgaagcattatgggctcataggatatctaaacatgatgcgaccaaggttactacttttgagttagtctatggacacgaagccgtttttactggttgaggtgaatcttggctctcttagatacatcaagcatggtgatttattggtcaaagagtataatacattaatgggaggtaatcctgatgatgtgaccgataaacgattaaaggctttggaagatagagaagaataagcagaagatagccaaagccaacaataagagagcgaaagcaaaatcatttgaagttggagacttagtttggaagacgattttgcctttaggctcggtatctagagaattcggtaggtggtcaccttgttggggggatccttaccggttatatggaatcgtttgagggaatacatactttcttgaaactttgcaaggggaacgatttcagacaacaattaatgggaaatatttgaaagaaaatacttaccgagtgtttggcgagatgct

SEQ ID NO: 37529 - DNA, 229 bp, Oryza sativa
  Clone ID: PAT_MRT4530_41250C.1
ctttatattgaagatggcaaacgctagaagtcattcaaacacctcatttatcggaataaataaggagctttcattgagcaattaactgaaaaacttctgatctaacaggaaggggagaacctgcaaattgttgatgtgagaaactgacaatcaattgaagtatgcagaagtgaattaggcactccttctgcgcttatctttctggatgagatgcacctgttcctgacct

SEQ ID NO: 37530 - DNA, 121 bp, Oryza sativa
  Clone ID: PAT_MRT4530_41251C.1
cagcgccagatgtagagtgcggctgctttaaagtggagcgggctgttttaaataataacatgagggggccttagtaataacatttcaagctggcaaccaacaactaaagctaaaccacaaa

SEQ ID NO: 37531 - DNA, 3198 bp, Oryza sativa
  Clone ID: PAT_MRT4530_41252C.1
atggcgaaggcagcaaggaggggcgtgaacccaccatcgtcggcctccccctccctcacaaatccggcaatagctgcaaggggaggcgcggatccactgtcgctggcctgcccctccctcacggatccggcgacggcggcagggggaggggcggatcgatggtcgccgaccttcccctccctcatgcatctggcagtgggggtggctgccgtcgctagactccccctccctcacgggtccggcggcggcggcggcatggggaggtgcggttgtgccgtcgccagactctccctccctcacagatccagcagcgatggcagcgggaggcgcggatccaccgtcgcaggcctcccccttctcatgaatccgacgatgaaaatgatggtggcaagctgcctggtggcggatccaaagaccctgatcttgggagtggcatccacagctcctgtctcctcctcacgagagaaggggagacgcgaggagctcggcggcggcggcggcggattggtcggtcgccggagcgagcacgtcgacggcggctgcagcgccaagaaagccaagaaaccaccggtgatgccgccgcctgccgcgttcttgttcttggcctgcgttcttggcgcctccgtggccgtggccgccgccgtggcggcggatggggacggggacgcaatgcgggagctgcggcgcgcgctggcgccgccggactggggcgcggctggggaggacggcaagggaagctactactgcgcgtggcggggcgtcacgtgcgcgggcggcggcggcggcgcggtggtggcgatcgacctgccgcggcgcgggctgaggggggacttctcggcggtggcggggctccgggcgctggcgcggctggacctgtcgttcaacgcgctccggggcggcgtccccggcgaggcgctgggcgggctccccggcctcgagttcctcgacctgtcgatgaaccacctctccggcggcgtcccgccctccctcgccggcgccgtcgggctcaggttcctcaacctctccaacaacgcgctctccggcggcatccccgacgagctcaggtcgctcagggctctcacggagctccagatttccggcaacaacctcaccggcgccatcccgccctggctcgccgcgctccccgccctccgcatcctctccgcctacgagaactccctctccggcccgatcccctccggcctcggcctctcctccaagctccaggtgctcaacctccactccaatgccctcgagggcgccatcccgagcagcctcttcgacctcggcaacctccaggtgctcatcctcaccgtgaaccgcctcaatggcaccatcccggacaccatcggccgctgctccgccctctccaacgtgcgcatcggcaacaaccgcctcgccggcgccatcccggcgtccatcggcgacgccaccagcctcacctacttcgaggccgacagcaacgagctcaccggcgggatccccgcgcagctcgcgcgatgcgccaacctcacgctgctcaacctggcctacaaccgcctcgccggcgaggtccccgacgtgctcggcgagctcaggagcctccaggagctcatcgtctccagcaacggcctctccggggagttcccgaggtcgatcctgaggtgccggaacctcagcaagctcgacctgagctacaacgcgttccgcggcggcttgccggagagcgtctgcaacgggtcgaggttgcaattccttttgctcgatcacaacgagttctccggtggcatcccggtcggcatcggcggctgtggccggcttcttgagctgcaacttggaaacaacaatcttactggtgagataccggctgaaattggcagggtcaagagcttgcagattgccctgaatcttagcttcaaccaccttgtcgggccgctgccccgtgagcttgggcggcttgataagctcgtcgcgctggacttgtcgagcaatgagatatccggggagataccaggtgatatgagagggatgctgagcttgattgaggtcaatttgtcgaacaaccggctaagtggcgccatccccgtgtttgctccattccagaagagcgcggcgtccagcttttccggcaacaccaagctgtgtggcaacccgctggttgtagactgcgggccaatttatggatccagctatggaatggaccacaggaagatatcttacagggtggcattggcagttgtggggtcctgcgtgctcatcttctctgtggtgtcgttggtggtggcgttgttcatgtggcgtgagaggcaggagaaggaggctgaagcgaagatggctgaggcgggggaggttgtagtggcagcgccgcaggtcatggcctcaaacatgttcatcgacagcttgcagcaggctatcgacttccagagttgtgtcaaggcaacattcaaggatgccaatgttgtgagcaatgggacattcagcataacctacaaggccgtcatgccatccggtatgacaaagatgatatgggagctcgagtgtctttcgcacatcaaccacccaaaccttgttcgtcccattgggtatgtcatctacgaggacgtcgcgttgctgctgcaccatcacatgccgaatggaaccttgcttcagctgctgcacaatgtcgacaaccctgacggtgacaaccagaagcctgactggccaaggctgttgtcgattgccatcgatgtcgccgaagggttggcattcctccatcatgtcgccaccattcacctggacatctcttcggggaacgtcttccttgactcgcactacaatgcgcttcttggtgaagtggaaatctccaagcttctggaccctttgaagggcactgctagcatcagtgcagttgccgagtatgcctacacaatgcaagtgactgtgccgggcaacgtgtacagcttcggggtggtgctgctggagatcctaacgtcaaagctgccagtggatgaggagttcggggagggtatggaccttgtcaagtgggtgcactctgcccccgcgaggggtgagacaccggagcagatcatggatccgaagctgagcaccgtgtcgttcgcgtggcgcaagcagatgcttgctgtgctcaaggtcgcgatgctgtgcaccgagcgcgccccagcgaagcggcccaagatgaagaaggtggtggaaatgctgcaagaggccaagaacagctga

SEQ ID NO: 37532 - DNA, 526 bp, Oryza sativa
  unsure (1)..(526): unsure at all n locations
  Clone ID: PAT_MRT4530_41253C.1
ccgacggcgacagggcgaccaaacaaaagtcctcgcatcccgccgccgccgccgccccgcctcctcctcccatgcgccgccacgtaggatcgcgcgatcagatctagggtcgagcactccactctcccgcctcccacgcgatgcggtggtggccggcgctgccgctgctcctcctcgccgtcgccgtcgccggtgccggcgacgcggctcccgtgtgcacgcggccgtccgcggctgaggcgatcgtgggatcccccgaggcgtgccgctcgccgctgcgccgcccgctcggcgtcaccgagggagatgatgctatcttagcgagggccgttaatctacttcatgcaaacaaggaggatttcgctgctgtgctcttctatgcttcctggtgcccattttcacaagaatgcagactacgctntgagaagttggcttgcatatttccaactattcgtcatcttgcaattgaagaatctacggtcaggttaaggacaagatatcggtatgggattcatggatacccaac

SEQ ID NO: 37533 - DNA, 678 bp, Oryza sativa
  Clone ID: PAT_MRT4530_41254C.1
cccacgcgtccgcggacgcgtgggcaaaagtcctcgcatcccgccgccgccgccgccccgcctcctcctcccatgcgccgccacgtaggatcgcgcgatcagatctagggtcgagcactccactctcccgcctcccacgcgatgcggtggtggccggcgctgccgctgctcctcctcgccgtcgccgtcgccggtgccggcgacgcggctcccgtgtgcacgcggccgtccgcggctgaggcgatcgtgggatcccccgaggcgtgccgctcgccgctgcgccgcccgctcggcgtcaccgaggtgagccgtaggactactagtgagtttggtgctgtgaaattcagttggtatcggggagatgatgctatcttagcgagggccgttaatctacttcatgcaaacaaggaggatttcgctgctgtgctcttctatgcttcctggtgcccattttcacaagaatgcagactacgctttgagaagttggcttgcatatttccaactattcgtcatcttgcaattgaagaatctacggtcaggttaaggacaagatatcggtatgggattcatggatacccaacgctgtttctcataaactcaacagtgcgagtgcggtatcatgggcctcgaactgtcaaatccttagctgccttctataatgatgtttcaggtgtgtaa

SEQ ID NO: 37534 - DNA, 246 bp, Oryza sativa
  Clone ID: PAT_MRT4530_41255C.1
atgaggcatgttactttcttcgcggcggttcttgttgccatcttcctcacctccggtggcgggaggatgagcagcacggcggcgcggccgacggcggtgggcggcgccggcgcgccgccggccgccgtggcggtggagctggccggcaccggcaccggcaccaacgcgtcgtcgcagccgtcgaactgcacctacggcaacaacgtcggcggccagtgccctcccactcccggcgctggccattag

SEQ ID NO: 37535 - DNA, 624 bp, Oryza sativa
  Clone ID: PAT_MRT4530_41256C.1
ggcggccggccgcttttttttttttttttttattagaagaagtttctgtttttattaattctcagtttttcccaattttgcagtccacacaaatcacagaagttatacattgtgcatgtcacgagacatgaaaactaatcccagaagtacttcttctgtcacaaggaaaaataaaaatcagtaacaacgtactatttattgccctaggctcgatggaacagtgtagcttccgcactggtagccaggctggaacggcttcttgcagaacttggcgacatagacgaccttctccatgcaccacaccttctccttctccttggtgacgccggcgcacaggcaggggatgttggccctttgccacacggcgcagcacgcctctgacggctcgattttgggctccgccggccacccctcgtacttcttgcactcccggatcatgtcctgccggtcttggtcgcagccgccgctagggtcgccccacacgaccgccaccataatggcgaggaccaagaacaaacctaggagttgttgtctcgccatggctattgcttgtgtgtatctccctggtttctctcagatggtgatgcaagagttgtgttgatagtggtggtgagtcccggccgg

SEQ ID NO: 37536 - DNA, 351 bp, Oryza sativa
  Clone ID: PAT_MRT4530_41257C.1
gtttagtttacataaagattgagaacttggtaggtagggtgatctagacattaaggttcggagctggttgttgcggtaatgggatgcaccaacaggctggacgccacgagagtcgagttgacaggtggtcgatccgagcttgtgactcgacggagttatggactgggacactcttgccccaaagaacgactatcacaaccgtgccagggcacaccccgttcaccgggaccgaagcgactgctgtgttaggcagaagaacgtcgccttatgacatgtcattcaggcgaatgaaggggaggctgaagatcatggacaggaactggtgccagtgcaagtcgactctgatggagg

SEQ ID NO: 37537 - DNA, 432 bp, Oryza sativa
  Clone ID: PAT_MRT4530_41258C.1
gcgcgtggcgccggcgcggcgcgtcggcaggcggtgcggctgcgggtgtacatgcacgacatcgtgggcggggcggggcagacgtcggtggtggtggtgaaggggccggggccggcgaacccgtccatgtcgccggggaacaacttcggcgacacggtgatcatcgacgacgtggtgacggagggcccaagcctggcgtccagtgaggttgggcgggcgccaggggacgtacatgctggcgtccatggcgaggccggtgttcatcgtcgacatcacgctggtgctcaccgacgggccatacaacgggagcaccatcgtcgtcgccggccgcgacgacacctccgaggaggtcagggagctggcggtggtcggcggcagcgggatgctccgggagcgtcgggccgtgctgggaggacggcagtggagtcagct

SEQ ID NO: 37538 - DNA, 719 bp, Oryza sativa
  Clone ID: PAT_MRT4530_41259C.1
aaatacaattgccacaacactacatttgtctaggaaaatcacaacagcaccggtctatgaaaatcacgtactacaaagtgctcagtagtccatcaccaacaacagtggacatcaatcagtacataagaatgatcggctaattcgaccaaactgttcaaatacaatgttgagagaattgcttttacatgcataaacaaatttggccaaaaaaaagaaatatactgaaagcagcacaatactgtttgccatgttaccgcctacatcgaaaatgtatcatagtctacagcaatacactaacaaatgccctgcatggcatggcaccaacgttctgcaactccagcagtggttccatatagcagtggacaagtctgcagtagcagcacacggcgtatgctcctgcacctccatgagaagggtaaagaagaggaaaagactccaaaacacaaaggaaactcttaactcgataaaatctcaacccagttattaactttgagaggttctctgaaacttacccacactcagattgagcatcagagcacacgtgcacatcaagtcaagatcccatgtatagcatggcttgcacaattgcatgttagggcttttatgatctataaatcagcaaaagcgaaaacttccagctaactgtaaatcgccatagtagtcatatagcttacgagacaggttgatactagaagaccacggacgcgaggtcgacccgg

SEQ ID NO: 37539 - DNA, 435 bp, Oryza sativa
  Clone ID: PAT_MRT4530_4125C.1
atggcatcgcacactgtcaccggcctcccgccacggctgtcgtctccgcactggcgagggcgcgccagcccccacctctcctttgcaggccgtggcgtcgtcgcttccgggcgggatggcggcggatcctgccgtcccccacgactcccgccggtgggagcaccagatccggccaagagagggccggatccatgctcggtagcgccggaactggacgctgtcgccctcgcctcactcccgtcgtccggtctcgtcggcgccccagccgccttgaccacgagcgagggagatggaaagccccgccgccgccttccttgcttccacccggctttgccggcggctgctcgggcggcgacgatgctggggagagcaggggagggagggggcggctcgccgcccgcgtcgcccctgggcggagcgaccgggggcctctga

SEQ ID NO: 37540 - DNA, 428 bp, Oryza sativa
  Clone ID: PAT_MRT4530_41260C.1
cccacgcgtgcgcccacgcgtccgctactttgaacgttattttacttattccgcgagtcggaagcggggcctcttcctgtgaggaacattattggaagatctgggtttcggtactggcctgcatcaagaataacagatacaatatacgagcctcgcgctgaatattctgaggctgggttgtctggaggatgatccagaccttctggccatgctggatagccgatgagtcatactctcttgtggagctccacttatgagccgagctccagttcacagctgtcactgttgtgtatagagtgtctggaaaatcactctggctagaccaattggtgttttcaactgcctgtttggcagatctttgctatattaatacatgcgaagctgaaagagacttctatctcgtcagagcaaactgctgaaggagcatt

SEQ ID NO: 37541 - DNA, 536 bp, Oryza sativa
  Clone ID: PAT_MRT4530_41261C.1
aaaaaagggagggcccccccaaaccaaaataaaaaaaaagggggccccctatttttataaaaaaaaaaaaaaattcctttttaaaaatggaaaaaaaaagggggtttttaatgaactaaaaaaagatcaaaagcccttaaaattcaaaaaatttcccaaaaagcaaaaggccctttaaaaaaaattatttggggggttttttccccgggggggggcccacaagaaaaaattggggggcccggcttttcaaaaccaaaaacaggggttaccaatttacccgggaaaatttcccggggggggggcgggaaaaactttttgaaaaaaatttttaaaaccgtttttattttttttaaaaaaacgtttgggccaaatcttggggtaaaccggttgggcccaaaacccaaaaaccctgaccctgaaaaaaaaattttctgttgcggccaaaaaaaaaaaaaaggggggaaacctccggaaaaaaaaatcttgaaaaccctccaaacttggtatttggggggggggaaacaaaaaaacccccg

SEQ ID NO: 37542 - DNA, 171 bp, Oryza sativa
  Clone ID: PAT_MRT4530_41262C.1
atggggacgcagcatctgcaggccagtgaaaacagcaaaatccgcagcaaaatcagagtgaatcatgtcatcatcagagtcgttgtagtaaccaccagaagtgaagatcttgacggcacaaaatctgccagagccgaggttgatgagcttcggctgaaacggcaaccatga

SEQ ID NO: 37543 - DNA, 483 bp, Oryza sativa
  unsure (1)..(483): unsure at all n locations
  Clone ID: PAT_MRT4530_41263C.1
ggaacccgcgagccggccgggaaaaacncgnncacanccgccccccngcgggaagcccgcgacccncgagcagacagcaccnccgcccccagcggccaaggcgaccgccgcgagacgncagcnccncccggcgccccgcaagacccaacccgcggccaacggcgccgcgcgaggcgncnccacggagagggcggncggcgccggcggcgggggcggcagccacaccgccaagnggangcaggacacaagcaagaagnccccaanggaanngancaacgcagnaccnccgancaaggnngaaggacgaanngcngcangngaagggcgncaggaaaaaggncgngaaacnggnncccncggccaaccgancgaaganancngccnngaccnggaccagccngcngnangcaagaaccgnggncnncgnnnngnncaagaacaccancacngagaagacaagangcagnccnncaccacaccgaa

SEQ ID NO: 37544 - DNA, 554 bp, Oryza sativa
  Clone ID: PAT_MRT4530_41264C.1
tcctcctctcttcctctctttctctcttctctgaccactcctccaagatggctaggtagatggctagctaaggcatatattggtgtgcttggcctctgcctgtttttcagcttggttatagctgcagcaacagcagcagcagcagctgaggtgaatgaatgcatggtaaggtgaattcagggtgcagaggtaggcgagtggtagtagctgggaccatgggctggctccagtctctcctcgcgcctctcaagaagctctggatccgcatgcattccgcccagaggaagaagagagggatctacatcctgtacgaggacgtgaagtcgtgcccgtgcgaggacgtgcagatactctggtccatcctcgtcgagtcctcccacggcggcggccatcaccaccaccacccgccgccgctgcggctgaagcagtgacaacgacggcggcgacggcgacgacgacgacgacgatgacgaactcttccgggccggcgtccgagcgacgagcatggcgctccgagacgtaaccgacggcggcgcggcgagcagcaaagaggt

SEQ ID NO: 37545 - DNA, 1874 bp, Oryza sativa
  Clone ID: PAT_MRT4530_41265C.1
cctcgccgccttaacccccacccccgatctccttcctcaccgacgacgcgcgccccactccccccacctcaatgcgcgcttcctagggcatatgaccggtactacgacaaccatcacctctcgccgtcaccgtcatcgtcgggatggagctcgccggcagcaacaacaagcgggggagggtgagggggcccaacgacgacgacgacgacgccggggagccggacgccaagcgccatcaccaccagctgctgttgccgtggccgcagcagcagcagcagcagcatccggcgtcgcggatctaccgggtgtcgcgggcctccggcgggaaggaccgccacagcaaggtgtacacggccaagggcatccgcgaccgccgcgtccgcctctccgtctccaccgccatccagttctacgacctccaggatcgtctcgggtatgaccagccgagcaaggccatcgagtggctcattaaggccgccgccgccgccatcgacaagctcccttcgcttgataccgcttccttccccaccaaccccgcctcctccgccgctgttgctgctgctgctgctcctcctcttccccatgccgaacgcgagcagcagcagcagctcaccaagtccggatgcagtagcacgtcggagaccagcaagggctccgtcctctccctctcccgctccgagagccgcgtcaaggccagggagcgcgccagggagcggagcagcgcggccgccgccgcggcatccaaggacgccggggacgacgccgccacccccaccgcgcccaccgccgcgcccgcctcctcgcaggcggcttccttcaccgagctactcaccgggatggccgcagccaacgcctcacccgctgaccacaagcagcagcaggcgtggcagccgatgaccgtcgccgcggccaccgccgactacatcggcttcgccgccgccgccgcgccgcatacgcagccgcggaaatccgccgcgggccatcactccgcgatgccgcacaccttcgcatcacccgctccccacctcgccaacatcacccccatcgccatggcgcccgcgcagcacttcaccctcacacccgccgccgccgagcaccacgcggagatgacgcactactcgttcgaccacttcatgcccgtccacgcggcagcagcggcggcggcggcggcctccaccccggccggcggcgactacaacctcaacttctccatgtcctcgggtcttgtgggtgtccacagtagggggacccttcagtccaattcgcagtctcacctctccagccatcaccaccaccatcaccagcaacagcagcagcagcagcagctgcagaggctgtctgctccgctggatgcgcccaacattccgttcctcttcagcccggccgccgcgcccaccgccgcggacacccagttcgccgccgcattgcagctctgggacgggttccggcacgccgacatcaaggagaagggcaagcactgatcagatcagcagccgcgggcatcgacggcgacgtctcttcttggatggaagtgaaaacatcaaaacgttgcaagccattcctgtgagcaacatccacagcttgaagctgccataagtgaatgctggatgcattctcggaagtagagcatcaactgcacatctaccttggtcacgggaggacctcatcatcgctattcagatgatcttgtgcttttctctgcctgttgttgtattcattttgttgagttgagaatttgggagcattactcgccggagtgccctgaggaggggacgcccttgtaatcctttctgttgtaaactatgtcaatggatgcatgcggctctggactggattggttctttgcctcttttgacactgtgaaaaaaaaaaaa

SEQ ID NO: 37546 - DNA, 2375 bp, Oryza sativa
  Clone ID: PAT_MRT4530_41266C.1
ggacccataataaggaataaatttatgaaagttttttttttgtcaaaaagaaaacccacagttgcatcatgattcatgagatgccaagaagagagagatgagatcaatcaggagcaggagccaggaggaaagctaaccagacatgttcacaaggacagcaccatctggcgtcgttggacagcgagagcgggcaacaacgtgtgactgacctaccacaactaacctgtagactgtcttgcaccacctcctgacctcccgccaatccatcgaatccaaacaagaactgacggagtctggccaaccgtccctgtttgttgggtcaccaaagttgcatccgacctattcatgccatttcgtccctccatctacccgctccacgccgcctcgtcatcccttcattactaccctcgccatgcttccggtgcttactcttccctcttccttgttccaagataggaatccaataagctgtcctgttagttttcagtttttcatccaaaaggtgtagattaggaggtgaaaatgaaggtgcaagtagaggactagaggttccttcaggttttctacttgccttgcgcttgcagattttgcagagaaggatatcctatcaccttgcaaacatggcgcaggctctgagtttggggttgcttcttgcgtttctggcaattcaatcctgcatcgccattgagctgactgatcacatcgacttgtggcctatgccaacgtcggtgagccatggaacacaaagactttatgtcagcaaagatatcacaatgtcaatggagggaagcacgtatcctgacgggaaagggatcttgaaggatgccttccagagggtagttgatttaatgaaactgaaccatgtcgttgatggtgcaaacccaagttcttttgtactcactggtgtaaatgtagttgtccattcacctgaagatgagctcaaattcggagtagatgaatcatataacttatctgttcctacagcaggatatccattgcgcgtacagattgaggctcaaacagtatttggagcacttcatgctttacagaactcatctcggctccttggagaatttctgacacaccaagatttccttaccgaggacttcttattggatcaaatgcgcctgcatgcagatacctcaaggcactaccttcctgttacggtaattaaaaaagtgattgatacaatggcctacagtaaattgaacgttctccattggcatattgtggatgcacagtcatttcccattgaaataccttcataccctaaactgtggaacggttcatattctttttcagagagatatacgacgtctgatgctgtagacattgtacgatatgctgagtgagccatgggaacacaaagactttatgtcagcaaagatatcacaatgtcaatggagggaagcacgtatcctgacgtggaaagggatcttgaaggatgccttccagagggtagttgatttaatgaaactgaaccatgtcgttgatggtgcaaacccaagttcttttgtactcactggcaaatttgtgcatttaggaggtgatgaagtcaacacaagctgctgggctgatgaatcatataacttatctgttcctacagcaggatatccattgcgcgtacagattgagggtcaaacagtatttagatccctaaagctagcaatatcactcggtcatgatgtcatcaacggggaggcaaacatttaacaattttggagacaaattggaccgtagaaccgtggttcataactggcttggagaggatgtagcaccaaaagtggttgcggcagggctgagatgcatcgtaagcaaccaggataagtggtacctagatcacttagatgccacatgggaggggttttacacgaatgaacctctgaaaggtattgacgacccagagcagcaaagtttggtcattggtggtgaggatagtatttgggacgaagaaattgacgcatcggatattgaacaaaccatttggccacgtgctgcagctgctgcagagagactatggactcctattgagaagattgcagaagacccaagattggtcacgtcaagattggcacgcttcaggtgtttgctgaaccaaagaggggtagctgctgcaccggtggctgggtatggccgtacagcaccatatgaacctggtccctgtgtaaggcaataggatattcatagcaagatgaaggtagtatgaacagaggataaactttgttcaggattcacttttaccaagtgtaacatcagcatctcaatattcagatagttcagtggttagactattgaatatcctaagttaacctattatccctatttttcccctcttccaattttcaacagaataattttgaggattcagattaatt

SEQ ID NO: 37547 - DNA, 1327 bp, Oryza sativa
  Clone ID: PAT_MRT4530_41267C.1
cccgtccgacctcacgagcggaacgaccccccacatttccccaaccgccgaacccctcgccgccgctgccccaccggcggcgatggaccccacgcctcaccgcggcggctcgccgtcgccgaggttcacgctgcagccgagccgcctcccgccggaggacatgctcttctgcgtcgacgtcgacctggagacgcgctccgagatgaggatcgccccgggccccgccgccgccgccgccgcgtcgccgggcgccgcgggggcttcctcgggggccgcggctgcttccaggcaggccgctcggccgccggtgaagaggatggacgccgtcaagcaggcgctcctgctcttcgtccacagcaagctcaccatgtgccccgatcaccgcttcgccttcgcctccctcggcgacaccgtctccttggtaaagaaggatttcagcagtgatgctggttctgcagtggaggcaatccaatccctggatgcgtcggaaacgagatatgcgatggctgatctcactcagctcttcaagatagcttaccaggaagggaaaagagcagaattgcaaggccgcctactcagagtggtactcatctactgccgttcctcaactaagcctcaacatcagtggcccatcaagcaaaagaatttcaccttggacataatctatcttcatgacaagcctactgctgataactgtccacagaaggtatatgatgctttggttgatgcacttgagcatgtcagccagtatgagggatacattctagagactggtcaggggcttgctcgaatcctgttccgtcagacttgcattcttctgtcgcatcccttacagcgttgcatccaagatgaccttgatattcccaagccacttgctaagaaaaatatggttactgaagctgcgcagaacgaagatggcatgccagtctccacccagtaggtagttaggccttctagttcagtggtttgcatcatgaagtcaactcaagagcttcatttcgttttatttgtttgcattaaggttgttctgtgtaatgcaaatgaccaattgaatgtcaatttgttgctgtgtcatgcttggtattgcgttgaacttgcagatgcacatcatacagaagttctctgtggtatggcacttaagttgcttctgaattctctcaaccatactgcacttctgatctttgcctggttgtctacattcagaccttgaagtacatcctttatcagttgtcactagtgactgatccaccctttcgttgagttcttcatgtatgaatttcttgctctatgtacaacatgtattcaaatatttacagtttgacattac

SEQ ID NO: 37548 - DNA, 292 bp, Oryza sativa
  Clone ID: PAT_MRT4530_41268C.1
cggaaggcctctcctgcggcgggccgcggcgctggccgccacccccatgattcctccggcgcgggcgacgttgctgctgctgcggtcgatcctccgagccggattgggggagggcaggatcgggccgatgcgatcgggtgcgggggcggcggcgcggggcggtgggggaatatcaggggcggtagagcggggtcgccatacggcgcgggaagaggcaccgcgacggggcctccgccgccgccgccgttgccgccgcggcggcgatcggaggaggacatagggcggcggggga

SEQ ID NO: 37549 - DNA, 129 bp, Oryza sativa
  Clone ID: PAT_MRT4530_41269C.1
ccaccgtccgtgcggcgtgcgttctcgcttcgctttctgctatgcttgtccttgacctcccctgctttgtctcgccgcatatcgagcggccatgaccaaggtgcaccctaacgtctcggtggtggcgcc

SEQ ID NO: 37550 - DNA, 339 bp, Oryza sativa
  unsure (1)..(339): unsure at all n locations
  Clone ID: PAT_MRT4530_4126C.1
agacgccggcgttcncgccttcgcccaatgaanggcctcgcggagacggcccaggtggccctcgatcggttcgaggagttggagcaatgcatcgacgagtccgagagcagctgccacaaggtgttcaggggcattcttcacacaagggttgcactgctcaacattcagactccaaccattctagaaaccaactgaaaatgtacatcttgctgactgctcnaggagacgaactaattgatcatgtaccacactaccatacaatactgtacatagaaaacagagtacagagattaatacagagaggaaaattttgccataaaaaaaaananananananaa

SEQ ID NO: 37551 - DNA, 513 bp, Oryza sativa
  unsure (1)..(513): unsure at all n locations
  Clone ID: PAT_MRT4530_41270C.1
cgcctctggtgggcaactttgtctgactccccgntagagattggggagctcccctggtctgaatttctggagctnctacccctatttcgtatctccagtttctgttcatgtgattngcaccacttgttgtacggagatccnaaggcctattcacgtggttatagagttgacacctaccacttatggtaatgactcccgccgtggaagaaaagtcagagttatttagttgatgaagggagtgttctcccgctgtggaaactaagaccagcttactgagacccccaaatgtggacaccagattatcccaaccacccatattgtggtctccctgctagctggccccaaattgtgtttgaccaaatgacataactgaaagcgaaagcccttgtcataacgcgtgagtcgttttgctatctatctgtctttcctgtatttttccccgaatcgttgtatctttgattgtttggaggataagaccttgcaactacccggtaaaaaaaaaaaaaaaaaaaa

SEQ ID NO: 37552 - DNA, 187 bp, Oryza sativa
  unsure (1)..(187): unsure at all n locations
  Clone ID: PAT_MRT4530_41271C.1
cccccccccacacgagtgtgtaaaaaaattntttataaagaccccnggatactccccgcaattttattaacgggttaattcttcccggaaaattgcccnccccgcgttccacccggttccgtgttcccccgttaattgttccttgtggggaaaaaaataaatattatgctcccacaaaanctcccaa

SEQ ID NO: 37553 - DNA, 1374 bp, Oryza sativa
  Clone ID: PAT_MRT4530_41272C.1
cagagcaaatcgagatcgatccgacagaagcgagcgatcatggggcacggcaaggaggtgaagacgaggccggatcccaaggtggagatccaggagaagggcgagatcttcttcttctatcgtcccaaggtcggcaaggacgaggcgcgcggccccgacgacgtgcagcggatgtacatcgtcctccgccccgaggccaccggcgacggcggcgaccgcgccgtcgaggacaagcaggcgccggactccggcaaggagggccacaagaatcagcagccgcagaacagcgacggcgatggcggcggcgaaggcggacacggcaaggaggtcgtctcggtgacagagagttgcagatttttcagagattttcaggaggtgaacgtcgaggagcaggcgctgctccggctgatcgtgatggggaagaagagcctgccggacccggcggcgaagcgcggccgcccgtactggggttacgtcgagctcgtcaccaccgacgtcgaacacatcaaagacgcgctcaaggaagaggagtacagcacggcgacgcgcggtacgcggcggaggccgccggccagggcgctgggggagggcgtgtaccgcatcctgaagcacgactccgggcgccgcgttcacacccacctcgtttacaagctcgagctccccttgccggcgcgtcgccgcgagcacgacgccgaagccgacgaggccggcgagccgcaggaggccatgaacgtggagccggaggcgtcctacctcatccagatcaagaaccccgagcagccgccaccctccggcggcgggggcgacggcgggttccgcgggctgcagagcaagcgcagggcggcgttcccggcgcacctgcaggggcggttcgggagcaaccaccgttacgcgccggccgacccgccggacctgctcaactacgaagggtgcgagttcctgctgatcgccgcgtccgacgacgtcgaggaggagctggggctcgagctggagaccgagaccgacgccgaggccgacctcgaaggtgatggcgccgccgccgccaagtgctcggacctggtgaagatgttcggcgaggtcgccgacgtgaagccgctgctgtccgggagttgggactagagacaatatgcacaagtgatcagctcgacagatagtgtcagtgtgcatagaatgtagaactagtttcagtgttcagtgggcttttggtgcaattagtagacgagtttaggagatgtttagagttctagttttagtgctgtactaatcttttggccggtgagtttggatggtgattttggagaacaatccgaaaatccaaaaaaaaggctgtaactatatttatgtcaagaacaagatcagtagcagcttctgagt

SEQ ID NO: 37554 - DNA, 738 bp, Oryza sativa
  unsure (1)..(738): unsure at all n locations
  Clone ID: PAT_MRT4530_41273C.1
cagcccaccatatcgcagtccccctaggaggggctatggtggcagaggaagaagtccccctaggaggggatatggaggacggagggagcagggttctggaagtctcttggtccgcaacatcccattaagctgcagaggggaggatcttcgagttccttttgaaaggtttggtcctgttcgggatgtttacctgccaaaggattattacagcggggtcatgttggattgaagtaaatacaatgttgaaggataccttttaatattcctaacaattcatttgtttggcaagataaagtcttttccgtacgaagttcttctatgaagacaagatttgtttcattgagaaaattagtttcacgaagagaagataagagagttgtactgggtggtccatgagaagataaatatgaagtgaagtttatttgaagtactatcatgacttctcaaacatttggaaacttgaagcgaatgattttgtgaagatactctttatgaggatcaccatgcgtagtgttacacaagaaattcagatactagagcctggacatctaactgcttttgcatcgagaantcatagaggacatattgagttttgaactgtaatgggaaccacggngatttgcatntgtgggagnntcgttgacccttatgatgcctctgaggctcaatatcacatgaantcgccaggtgtttttcggccgggagataacctgttgttcttgctgctgagtcgcggaa

SEQ ID NO: 37555 - DNA, 1950 bp, Oryza sativa
  Clone ID: PAT_MRT4530_41274C.1
atgtccaccgagaactacgacccgtgctaccccgaccagccggtggtgcaccggtacctccccgtgtgggccaagctgccggcgttcgccgccaagccggccttcgtctgggcggacgacggcgacacggccatgtcgtacgcaacactgacatactcccagctcgacgccgccgtcgaacgcatgtcgtccggcctcctcggtgccctccggcgagctgacaccgtcctcgtgctggcctcgccgggcctccgcctcgtcaagctcctcttcgcgtgccagcgagcggtgctcacggcggtgcccatcataccacccgacccctccaggcccggcgccggcggcgccgcgcactcgcaccttctgcgcgccgtgtcgcagacgcggccgagggcggccgtcgccgacgcccgatacattgacgccatcaagaagtcgaatgccgtcgtcgacgtcgccggagaacctgatcggctcgccgccatgttaaggagcctacggtggctgtccgtcgacgagctggagcaaggaggtgccaatggagcggcgccggtgacgccgttcgtgggcggcgagccggaagacgcgtacctgatccagtacacctccggcgcgacgggcgcgcagaagcccgtggtgatcacggcgggcgcggcggcgcacaacgcgcgggcggcgaggagggcctacgaactgcaccccggcagcgtcgtcgtgtcgtggttgccgcagtaccacgactgcggcctcatgttcctcctcctcaccgtcgtcgccggcgccacctgcgtgctggcctcccccgacgccttcgtccgccgcccgcgcctctggctcgagctcgtcaccgagttcagggcgacgtgcacgcccgtgccatcgttcgcgctgccgctggtgctcagacgcggccgctcgccggacgggcggcggcggcggcctctcgagctcggcagcctggagaatctcatcctgataaacgagccgatttacaagtcgtgcgtcgacgagttcgtcgcggagttccgcggtgacgggctgcttcccgcgtccatctcgccgtcgtacggcctcgcggagaactgcacgttcgtgtccaccgcgtggcggagccgccggtgcgtggacctcccgtcgtacaagaagcttctgccgtcggcgaggctgtcgttccacatggccgacgaggagccggagatcgagatcatcatggtggacgaggagaccggcgagccggtggaagacggcgtggagggggagatctgggtgtcctcgccgagcaacgcgtcgggttacctcggccacccgtcggcgacccgcgaggtgttctgcgcgacgctgccggggaagggctcgtgctacgtgcgcacgggcgaccgtggcgtggtggtggtcaggggagcagagcggtatctctacgtcgtcggccggagcgccgacgtcctcgcgctcgacgtcgacggcggccagcgcagcgtgtgcgcgcactacattgagacggcggcgttcggcggcgcgccggatcgcctgagaggcggctgcattgctgccttcgccacctcgccggtgccgtcgacttcgcttgtggtcgtcgtggcggagctactgaagggaagcggcggcggcggcggcggcggcgaccacaaggatatctgcgagggcataaagcgagcagtgtgggaagaggaaggtgtgagggttggctggatcgtgttggtcgacagcggcgtcgtgccgaagacaacgtcggggaagctccgccgcggggcggcgagagagaagctgctcgccgggaagcttccaattctcttggaagcacggtatgacggagatgagagctcgagctcggtgccatgggacggtggcgaagaggagatggagaagtgtcctggcatggatgcggcttatgggagtgcaagccgccgtctgcgtctgcagtcgtttctttga

SEQ ID NO: 37556 - DNA, 603 bp, Oryza sativa
  Clone ID: PAT_MRT4530_41275C.1
atggatgccggcggcatctcgaatcacccacacagaggcacgcagggcctcgccggtggtgcctgcgtcatggacaccggcgaatgcgtaggggaggatcttcgagttccttttgaaaggtttggtcctgttcgggatgtttacctgccaaaggattattacagcggggaaccacggggatttgcatttgtggagttcgttgacccttatgatgcctctgaggctcaatatcacatgaatcgccaggtgtttttcggccgggagataactgttgttcttgctgctgagtcgcggaaaaggccagaggaaatgcgcagtagagctagagtcagggaggtctcgttcccgttctcgctctccccactatcgaggtcgtccacggtcaagccaaaagaacatgatgaagagaagaagcggagatcctactctcctgccagtagagatggcgaccctcgcgatgctgataacggttatgagaagaggtcgcccccacctgacagcgatggatcccctccacaccggaggtctcctaggcactcctcagggtcgcctccaggatcccgctctaggtccgccgatgtttcccctgcccgcagcgactga

SEQ ID NO: 37557 - DNA, 443 bp, Oryza sativa
  Clone ID: PAT_MRT4530_41276C.1
cccacgcgtccttccacgcgtccggtttacctgccaaaggattattacagcggataaagtcttttccgtacgaagttcttctatgaagacaagatttgtttcattgagaaaattagtttcacgaagagaagataagagagttgtactgggtggtccatgagaagataaatatgaagtgaagtttatttgaagtactatcatgacttctcaaacatttggaaacttgaagcgaatgattttgtgaagatactctttatgaggatcaccatgcgtagtgttacacaagaaattcagatactagagcctggacatctaactgcttttgcatcgagaatcatagaggacatattgagttttgaactgtaatgggaaccacggggatttgcatttgtggagttcgttgacccttatgatgcctctgaggctcaatatcacatgaatcg

SEQ ID NO: 37558 - DNA, 243 bp, Oryza sativa
  Clone ID: PAT_MRT4530_41277C.1
caacaacactagtccactgggacattcaggctgttggctggcccattggggtaactggcgtctgttagccaggctcgcgttcgctgccacgcaaccaatagtcctcgaacctgtgggcaaccagcccatcctctcccaggttggggagcggtagggcatgggcacgatcagcatccagcaatacctctcaactggcgcatcaagatattcaaagctagtcgctcgtacaatagaccatgccta

SEQ ID NO: 37559 - DNA, 1242 bp, Oryza sativa
  Clone ID: PAT_MRT4530_41278C.1
ccgatttcgtcccctccggcggcggcggcggcggcggcgcacggcttctccgggagctctacgcgacaaaacaatgaggaggtacagcccaccatatcgcagtccccctaggaggggctatggtggcagaggaagaagtccccctaggaggggatatggaggacggagggagcagggttctggaagtctcttggtccgcaacatcccattaagctgcagaggggaggatcttcgagttccttttgaaaggtttggtcctgttcgggatgtttacctgccaaaggattattacagcggggaaccacggggatttgcatttgtggagttcgttgacccttatgatgcctctgaggctcaatatcacatgaatcgccaggtgtttttcggccgggagataactgttgttcttgctgctgagtcgcggaaaaggccagaggaaatgcgcagtagagctagagtcaggggttactctggaaacgaagggcgccgctcttcatattatgggaggtctcgttcccgttctcgctctccccactatcgaggtcgtccacggtcaaggtcatactctcctgctccaagacggcgagatgactactcagcttccccaccgagaaaggatacgcaccccacaaaatctcctaggcgtcagccaaaagaacatgatgaagagaagaagcggagatcctactctcctgccagtagagatggcgaccctcgcgatgctgataacggttatgagaagaggtcgcccccacctgacagcgatggatcccctccacaccggaggtctcctaggcactcctcagggtcgcctccaggatcccgctctaggtccgccgatgtttcccctgcccgcagcgactgacagaactttgaaccaacgaaatgggatagctgcatgatctccacagcacctccaattctagtcagtctccatcttccttcctggtccaaccaagctgtttcaattaaaccgaagccctaagcggcgtgttgtattattgctaagtgtgcttgccatgagtttggtatggcacatcgcctgtttgtgtgctcatatgttgggagtccaggatgttgtagtcttttgagagctgctttgtttggtggtcatttgctttttgctgaacattaacttgaaacaatgtgacattggtgttgtgtactaccactagtgagccttgaactgggtaaccgcctatttccacatatatgtatgtttgtgagtggttaataaaaggg

SEQ ID NO: 37560 - DNA, 550 bp, Oryza sativa
  Clone ID: PAT_MRT4530_41279C.1
gttatcacccattaccccccagaggtttgcttgtgggtgccaataacaagttggttccggccgccttgggtggtgggggcccccccaccacccaaagtcctgtccaccttatccaagggacacattaacaccattgtgggttccaagcgcacattaggcgcgcaagctaagtttgaacaaactgccagacccagtgttggggggatgctgctacttttggatgcggaatgctgggctgcaaagctgcaaagctgctgattgggcgttgtttgaaacaggggccaatgtctgaagaatatatgggtgatgtcttaccctctgagggtatctatgggtggcaccccacgtgacccactgtacccacccccttggcggtggtgctgtggtaaatagagtgtgtgtaacccgctgatacgtcggttttcgaaagttataaaatgaagctgtcagatgatgcactgccatgatggtggacaactgtgaaactttggggtgataataaaataggaaaataaatttctttcatatttaaaaaaaaaaaaaaaaaaaa

SEQ ID NO: 37561 - DNA, 860 bp, Oryza sativa
  Clone ID: PAT_MRT4530_4127C.1
cggagcggccgcgagcgtgcagcgggcgggcgggcggtggagcagagtgtcggcagcggcaggcgagcgcgcggccagtggagcggagcggcggtgagcaagcggctggagcagggccgcgagcgcgcggcggcaggtgaagtggagcagagcggcggcgggcaagccagccgccggagctgctaccaccacttcctatagatggccaaaaggcccgcatggcccggcccggcccaggcacggcccaccagccatcgggccagcacggcccgatcggcacttcatgccggcccatgggctgcgcctcccgcccaagcacggcccaccagccatcgggccgtgtcgggccggcccgaaggcgcgagtggcccatctcctcattgtttatgtctcgggcctggcctgtggcccatcgtgccgtgccggtggagaggcccaggcacggcccggtggtcgggccgggccggtacgggcccgacccctgacgggccgtgccgtgcttgggccgggccaaaacgccgtgccgtcgggcctcgggccttttggccatctataccacttcccaacgtctccagcgtgctcaccgtcgatagcagcagccctagcttccccgcgcagtagatctccacccgcgtgttgcccccctccttcctttccacctctaactgcacctcacaaactccattaatcccatcatcctcctcattatcgcctaaggacccaaagtgatccggttttgtaaattgagggatgatatatatccggttttgcggttcaaggacgatttcgtaactcgatgacaagttgagggaccttcggtgtactttttcctgctgtgtctgcccacaggctgcagccat

SEQ ID NO: 37562 - DNA, 1207 bp, Oryza sativa
  Clone ID: PAT_MRT4530_41280C.1
ggccggtggcccgggtcgactccgcgtccgcccacgcgtccgcgccgccgccgccgccgtcgtcgttgctccgccgcctcccgaccacgcgctgctgctgctttgcctccgcgtcgagcggctggagcgcgagtgcgagcgtgcggctcggatccctcggcgggaagcagcggcgggggcatcgcggcgtggcggtgatggcggcggcggcggcagggggaggaggcttcgaggcgcgcgtggcgcggatcgcgtccaccatccgcgtcatccccgacttccccaagccagggattatgtttcaagatatcacaacaatgcttctcaagccagatgcatttcgtgacacgatcgagctcttcgttgagcgatacaaggacaaagggatcactgtaattgctggtgttgaagctagaggattcatttttggtccgcccattgctttagcactaggtgcaaaatttgttccattgaggaagccaaaaaagttacctggtgaggtgatctcggaagaatattctttggaatatggtacagataaaatagaaatgcatgtaggagctgtggagccaaatggccgggccgttgttgttgatgatctaatcgctacaggtggaaccttatctgcagccgttaaacttattgagcgtgctggagcagaggttgttgagtgcgcatgtgtcattgaactaccagaactgaagggtcgggacaagctggggaacaagccagtttttgtccttgtgaaggcagactaagcggaatgaaacaactaagggcctctcaagttgtccctattaatatcagtgtccttctcgaagcatgttggaagcaactaagatatcggtcgtgacaatattagcttgttctatccagtgctctgcaataaaagtctcatctttaaatttgtaggcacatgagttatttgggaattcggacttgaatgatccttgtaatacatcaaaacacggcataattttttttaaaggagtgccaattattcatggggaatgagaatcacctattttggagttaaaaaaaaaaaaaaaaaaaaaaaaaaaaaaaaaattcccaattaacgctggaaaatccctttccagtgggtatagaaaggccccaatcccttccaattgccacctaaggaagggccccctggcggcctaaccggggtgggtggtcccagggcctactgaagcctacccgtttt

SEQ ID NO: 37563 - DNA, 852 bp, Oryza sativa
  Clone ID: PAT_MRT4530_41281C.1
atgcggcgccgcagcggcatacgcagcttctgccacggcgtcgactccacgtcgaccacgatgcagcgccggctggtcggcgccgacgcggcgtcgtcgtctttcctcaccgtgccgacgtcgacggcgtcgtccgtgggcgtcgctgagagcgaggcggcggcggcggtgacgctggagcagatgatcctgcagcttgacctcgaggaggcggcggcgaggaaggcccagcagcagcagcagccgcggcgcgcgtcgtgcgtgaacagctcggacgggcgcgtgctccggtcggcgagggacgcgctcagccagtacccgcgcttctccctcgacggcggccgcgacgccatgtaccgcgcctccttcagcgaccaccaccactactactaccacgacgccgccctcgcctcctcctcctccggccaccggagatcgccgccgccgtgccgcgggatgccgccgacggtggccggcgagagcgtggtgtggtgcaagcccggtgtggtggccaagctcatgggcctggacgctgtgccggtgccggtcaggggaggagggcaacggaggggcggcgccgccgccaccgccggcgggaggaggaaggcgagcggggcaccgccgctggcctcggtgatcgccggcggcggcggaaggaagcggagggggaggaggacggggagagaggaggaggagctcgagaaggagaggctcttcatggcgctgcatggctatgacgtggcagtggcccgcgcgtgccacgctggcgcccttcaccccagcgtggcccccaacgtcagtgggatgggcaggggtgcggaagatggctggggatttcgacttcctcactga

SEQ ID NO: 37564 - DNA, 628 bp, Oryza sativa
  Clone ID: PAT_MRT4530_41282C.1
gcttggtttgtctgatgccttcatagccctaccgggggggttcgggactctggaggggctgctcaaggtgattacatgggcacagcttggcatccatcataagccggttgggctgctcaacgtcgacgggtactacaactcgctgctgacgttcatcgacaaggcggtggaggaagggttcatcaacaccagcgcgcgggggatcatcgtcatggcgccgcccacgcgtcagcccacgcgtccgctcacgcgtccggtgccttaccacgacagggtggcatcgaagctgaactgggagatgggccacctaggttactgacgtactcacttacagctgcagcaaattgccagacagcaatggcgatcgatcgatcagaagacgtaggaggaggaggaagaagaagaagaagaatcaagtcgatcgactcatcatcaagaagctgggaaagatttggttgatgcagctagaaagccaagaacgagagtgtggcgtgcgtgcgtccattttgtatatgtttgcttcgatcaggggcagcttgaatactgtagtaacttggatgcttgatgtcctcttgatcttctacctagctaccgagataagaactagtagtagtagtagtagtagtag

SEQ ID NO: 37565 - DNA, 702 bp, Oryza sativa
  Clone ID: PAT_MRT4530_41283C.1
atggctgttcgaacagaacccgggttggctccaaccgaccccgccccggcgttccccaactattggcatgcgaggaatcggtccttatatgcgaatacgggacagcgccacgcaggcaccacctccgcatcagagcacggataccgaggtaccacaagagtggagcgacaaggaatcagggagcaattggttgaaggggtgacttgccttgctcaaggtcttcacggagcttcacgaatcttcgagaaaacccgcgatcggcgaaaatccgggttgaaggaggctcggccgagccattgggccgggcgcggccacggggaggcggcccaacagagggggcgcgggggagagagagacggcccggtggaccgattccaccgcgcggggtcccggtggggcccacttggttcgggggggaagcggtccacgcgcggcccgcgggtggacgcggtgtgcggcgggcccacgcgcagcatgttggctctccgtggaccgcgcgcgagggtgggggacggagggaggcggctgaccgaggtcagctttgacccggtcgcgtcgaggtggcgccgacgtggcgcctacgtggcagccacgcgggccgggagagaggaggaagaagaacaggagctccaaccaacggtggccgacggcggggtttcactggagcacgacgcagcgattcgatcgagagggagttcaccg

SEQ ID NO: 37566 - DNA, 1647 bp, Oryza sativa
  Clone ID: PAT_MRT4530_41284C.1
acggcgcgaaccgcttcctacgaaaccgcgatctcagtatcagcattggtgcggcccaaagggttgaaggaggctcggccgagccattgggccgggcgctgccacggggaggcggcccaacagagggggcgcgggggagagagagacggctcggtggaccgattccaccacgcggggtcccaggtggggccctcttgtcggtgatacggcccacggtgggatgggcgcacgcaagggcagcgctagggttcggggggaaagcggtccacgcgcggcgcgcgggtggacgcggtgtgcagcgggcccacgcgcagcctgtcggctctccgtggaccgcgcgcgagggtgggggacggagggaggcggctgaccgaggtcagctttgacccggtcgcgtcgaggtggcgccgacgtggcgcctacgtggcagccacgcgggccgggcgagaggaggaagaagaacaggagctccaaccaacggtggccgacggcggggtttcaccggagcacgacgcggcgatttgatcgagagggagttcaccggtacaaaggggagcacgagaggggttgagccaacggctcggatccttcgaagaggggctgacgacgacgaatcgcggcggcgcacgccggcggcgagaaaagggggaaatggcggaggggtgacagggattcaattcaaggcggtgggagcgtgtccggggttcaagaaatccgtttccggcatcggatggggcggaggagcaccgaggagggctagcgacggcggcggcctccggaagcgggcggcaatggcggcgaggccatgccgagcggcggcgaagctcggggcagtgtctacgcgagagggcgagggagaacgaggaaggagaacggagggagtcactaccgagtcgggacggcacggtgacgagtggccgacggcgcgggagtgagttctccgttctcaggccggggaaggggaagaaggggggtgctcggagtcccgcgtcacgcgtcctcgcacgcaccggcctccccggtgcttggcgacgaacggcgacggcgagagcagagcgagcaacaataatagcgcggcggtgatggaagtgaaacgagaggagggaggggaaggaaccgactcgggagaggcggtcaaggagaggagctggcggtcacgcccgtggtccaggcggcgacaggcggtcacgggcggtgtcgggcaaaatggaaaaaggagggggaaaagggaactctgttcttgccgaaacggggaatgggagagggagaggagagcgcgtgaggcagagagtcgcgctgcctccacgtcttggacgcacgcgcgtacagggtgggggcgagcggcagggcggcatgggcggccagggctgacgcggcggcgaccgggcggtctgccacgcgcgggcgagcgcgtgcgcgatgcgagggcgcggcggaattcagaggcggcggcgggaatcggcgccgggaggggagagagcagagagagagagcgaagacgggagagagaaagaacgagagagcgagagagctctctctcggctcggctcggcgcgtgcaacgcacgtgcgaggctgagagaggagaaacggctgagagagggaggtgggctaaggggggaaaacggcccacaacacccgagggagg

SEQ ID NO: 37567 - DNA, 184 bp, Oryza sativa
  Clone ID: PAT_MRT4530_41285C.1
gcttagggcccatagcatatcattatagcactaacaaggttacaaatacgcttgcttaacatttacttaacaagagggggtcaaattcttgatcccacataacattagtagggggtgagaggagggtaaatatgttaccttgtaaatttacattttggggaaagaatagagtcataattttttt

SEQ ID NO: 37568 - DNA, 1643 bp, Oryza sativa
  Clone ID: PAT_MRT4530_41286C.1
tcactctgcgccaccgcccgtgaacacatgccgctgcctctccccaccatctgcgccgcctccacccgccatctgcgccgccaccttccctgaccgcgtcgccttcccccgccatctgccgatcttgtgcccgtcgaagaagcgctcggtggtgagctcgatgttgtcggtagtggaagtcgtggctggagatggcctcctggacacgcaccttctcatcggcctacttgcgggcgcgcaccttcccgtcagcctcccggcgggcgcgcaccttcttgtcgccctcctggcgggtgcgcacctcggaacttggtcttctccatctcggcgagcgctagcgcctcctcctctgcgtgttgtgcctcctctagatttcacgactgtccttttgcgatcattacgacgtgtattgttgttatactctgcagctacagccctccaatagtactctgacttcttgtcattgctatctattggatccactgaattgttcaaccaagaactaaggagccgtagattttcttcttcagtccagttgacccatgtccctttcctcccagcttcttcattgttgccactagactcttcaatgttaacaacacttttggcttgcgatgttgcagggcatggagaagttgattcagatccatgagaagaagcagatccaccaacctgatttggtgagtgcatccaactttcttgatgacgaaaaccttgaaagcttaatgctgcagattttaaccaattgccttgctgctgaaaaccatgaaaacttggaggaggattgccatataattgatagtttgcggggaggccggtgcgtgcgaggacgcgtgacgcgggactccgagcaccctccttcttccccttccccggtctgagaacggagaactcactcccgcgccgtcggccactcgtcaccgtgccgtcccgactcggtagtgactccctccgttctccttcctcgttctccctcgccctctctagcttgcgtggtagctctactagcccatcgaacgcgcgtagacactgccccgagcttcgccgccgctcggcatggcctcgccgccattgccgcccgcttccggaggccgccgccgtcgctagccctcctcggtgctcctccgccccatccgatgccggaaacggatttcttgaaccccggacacgctcccaccgccttgaattgaatccctgtcacccctccgccatttcccccttttctcgccgccggcgtgcgccgccgcgattcgtcgtcgtcagcccctcttcgaaggatccgagccgttggctcaacccctctcgtgctcccctttgtaccggtgaactccctctcgatcaaatcgccgcgtcgtgctccggtgaaaccccgccgtcggccaccgttggttggagctcctgttcttcttcctcctctcgcccggcccgcgtggctgccacgtaggcgccacgtcggcgccacctcgacgcgaccgggtcaaagctgacctcggtcagccgcctccctccgtcccccaccctcgcgcgcggtccacggagagccgacaggctgcgcgtgggcccgctgcacaccgcgtccacccgcgcgccgcgcgtggaccgctttccccccgaaccctagcgctgcccttgcgtgcgcccat

SEQ ID NO: 37569 - DNA, 504 bp, Oryza sativa
  Clone ID: PAT_MRT4530_41287C.1
cttcgttctcttttcccttttctttacaggatgtaaaccaagccgaaaatctcgcaaattttgagctgttttcttcttttcctttcgcttcttgctttcctcctcctcatcgatcgatcgatctcttgctgatggtgattgtggtgggttaatttgcgaggaggagagtggcgccatggctgctgcagagggacgcagatctgcccctaccgccatagctatctcgcctttcaagatctggaaaacctccatctccgttatagctgaatggggcgtcattggcacaacgtctccatctcaactgaaacaacagtcgcgcgtttgggtcacggagacaggtgttctatatacgcacgagcgattgcatagcggctggaagacaaagaaagctctatgcgcattgcttgttgtatatgttacgattacggatcggtgcgactgtaagagtgctatgatcctgagaggcgcctgcaactcatgtagcgtgtcattcaccattcctac

SEQ ID NO: 37570 - DNA, 276 bp, Oryza sativa
  Clone ID: PAT_MRT4530_41288C.1
atggccacggcggatgaggtcggcggcggcggcggcggtggtggcgccggagttggagcgggcgatcaggtgaggagggcgaagacggcggcgctgttcctggcggccgtcgcgctcccgtgcctcgtgctgtaccgcgccgccgtgtcgccggcggggctgttcctccggccggccgccctgccggcgccgccgcgcggcgacgtcgacccggtgcttgtgattcatgttcatgatcaccagaaaatgcaggaacacctctttgcatctcattga

SEQ ID NO: 37571 - DNA, 1747 bp, Oryza sativa
  Clone ID: PAT_MRT4530_41289C.1
tttacctccctcgggtgttgtgggccgttttccccccttagcccacctccctctttcagccgtttctcctccctcagcctcgcacgtgcgttgcacgcgccgagccgagccgagagagagctctctcgctctctcgttctttctctctcccatcttcactctctctctctgctctctcccctcccggcgccgattcccgccgctgcctctgaattccgccgctccctcgcattgcgcacgcgctcgcccgcgcgtggcagaccgcccggtcgccgccgcgtcagccctggccgcctgcgccgcgtagccgcccatgccggcctgccgctcgcccccaccctgtgcgcgcgtgcgtccaagacgtggaggcagcgcgtctctctgcctcacgcgctctcctctccctctcccattccccgtttcggcaagaacagagctcccttttccccctcctttttccattttgcccgacaccgcccgtgaccgcctgccggccgctggaccacgggcgtgaccgccagctcctctccttgacttcctctcccgggagtcgggttcgttcccctcgaagctcttcacccggccacctataaaaccagagcccctcccctcgaatcctcctctcgtttcactaaacataaacgccgcactattgttgttgctcgctccgctctcgccgtcgccgttcgtcgccaagcaccggggaggccggtgcgtgcgaggacgcgtgacgcgggactccgagcaccccccttcttccccttccccggcctgagaacggagaactcactcccgcgccgtcggccactcgtcaccgtgccgtcccgactcggtagtgactccctccgttctccttcatcgttctccctcgccctctctagcttgcgtggtagctctactagcccctcgaacgcgcgtagacgccgccccgagctccgccgccgctcggcatggcctcgctgccattgccgcccgcttccggaggccgccgccgtcgctagccctcctcggtgctcctccgccccatccgatgccggaaacggatttcttaaccccggacatgctcccaccgccttgaattgaatccccgtcacccctccgccgtttcccccttttctcgccgccggcgtgcgccgccgcgattcgtcgtcgtcggcccctctccgaaggatccgagccgttggctcaacccctctcatgcttccctttgtaccgatgaactccctctcgatcgaatcgccgcgtcgtgctccggtgaaaccccgcgcgtcggccaccgttggttggagctcctgttcttcttcctcctctcgcccggcccgcgtggctgccacgtaggcgccacatcggcgccacctcgacgcgaccgggtcaaagctgacctcggtcagccgcctttctccgtcccccaccctcgcgcgcggtccacggagagccaacatgctgcgcgtgggcccgccgcacaccgggtccacccgcgggccgcgcgtggaccgcttcccccccgaaccctagcgccaccctcgcatgcgcccatcccaccgtgggccgtatcaccgacaagtgggccccaccgggcccccgcgcggtggaatcggtccaccgggccgtctctctctcccccgcgccccctctgttgggccgcctccccgtggccgcgcccggcccaatggctcggccgagcctccttcaaccctttgggccgcaccaatgccacccgagaaaagtccaaatcacaatcccttcc

SEQ ID NO: 37572 - DNA, 1620 bp, Oryza sativa
  Clone ID: PAT_MRT4530_4128C.1
tattgaaaccgaacaaataatcctcctaactcagtctggtgtggttttggtcctacgtggtaatccagtcagcatttttttattaaaaaatcggtagggcccacctgtcatatgccattgccgcccatgtcgcccccgattctggcctctcccgctcgcgcccttgcgcccaaaccacgtgggatcagttcccctccaccccctccaccaaatcccccacttttccccaatttttggcgccaaatcgagcccccactccgctcacgttgagctccacgtcgccggctgttgccgccccaaattcgccgctccccggctccccgttgctccctcgcgctataaaaagccaccccgtgctgtcctcttctgtttccccctcctcccccgaggtcctcgcgccctctcctgtgcgagcccgcgctccgccgctcaccaccgtgcctcagccgccgctcggttgtcgcctcccgccaccgaaatcaccccttcaacgcgtacccgaggcacctccgccattgctgcctccggccgcgtcgcgtcgcctcttcgatcgacgccgacccatgccaccacctccttcggcttcacaggagcgagagctacctcggcaaccactccccgtcaccggaatcccaccggaacttggttcccctcgctcgccgatgagtttcaccatctcttcctcctctggtcggcgtttctcgctgcgccgcaactccctcccctaccctaaccttccctccttgttccccaggtccttccggccgccgtccgccggttcccgctcacggaataccgccggaccgccgttgccgtgccaccccgaggagccaccgccgccttcccgtcaccttctcgccgttgcgtgagcacggtgagcactcccctccctctccctctatctccccttcaccggccgtcctatgccgtgtcgccgccgccggtggccgtccggccaggccgctgccgctgttagccgctgctcggccgggccggtctcggccacacccgtgccttggctaccctgcccatggccgcccgtggaccactcccgtggtctcggtccatggtgccgccccgaccgcggtggaccgtgtccaccgtgtgccctccccttgtgccgctgacgcgtggggcccgtctgtcggcgccggtcctttgcttacgtcagcgcttaacttaccatatagtgcttaccataagcgggagtgggtaactgcttgatctgaagtatagctcgaccctttcctaggcaccagtggcgagggtgggcgtaatggagttgggtcgcccgaggtgtccggttgtccagttgccggattcaccgcggcgcacgaggggactgcccacctccggggttgggggtgggggtgaaactcgttcttgtatctccttgcacgtctacatcattggtgtggcttgctgagtactgtggttgtactcagccatgctattgttccccctttttagaagtgtagtgcttctgagctgaagacgaagttagagtaccaaggtggaccaaacttccttctctctagacatatgaaaattttaatatccaactaatatgactagatgaatactaattcaagtggcttttgaaacaataataatcaaggc

SEQ ID NO: 37573 - DNA, 290 bp, Oryza sativa
  Clone ID: PAT_MRT4530_41290C.1
aaaccaaaaacctgtttttgtaactgaaacaaagggaaaacaaagggagggcaaaatgtccatggttcaaaaaaaaaaaaaaaacaaaaacaaaaaccaacaaaaacaaaaagcaattccaaataattaaaaaactcataaaggggggatttgttaataataactggggggagcactcggggggaaacccctgggggaagccccagccgtgggcccaatatttggaggacatgtagttgcgctgggcccacccaacggggccgagttgggccccgtcaagctcggggggg

SEQ ID NO: 37574 - DNA, 2488 bp, Oryza sativa
  Clone ID: PAT_MRT4530_41291C.1
ttattttgcaagggacaatgaaatctgctactcattgttctcaccatcctgctgcaactggcactttcttcactgcaatgctcctggggctgaaattttgctcatgccagtctcagtctaacttgcagaaatgtaatatgggacttcagttattagaggacagggtataccgtgctgctttgggatggtttgcttatgcacctgagtggtatgaatctcaaaacaaaagttttgctcagagagaggcccaatccgtgtcaatatttgtccattgtctacaaaatgagcgccccagtggttctgctgattctgctccgaagtcacagggacgtgaaggtgaacccaatatgctggatcagaaccaccctgtctggggctcagtggataactatacaactgtacgggaaaagcgtaaacaattacttcttatgctttctcagaatgaggcagacagacttgaagtgtgggcacaaccgataaatacaaaagatgcagcaacatttcgtggtaaaattagctcagataaatggattgatcatgccagaactgcttttgctgttgatcctcgaattgcattctcaatgattatgaggtttcccacaaactcggcattatcatcagaaattacacaattggtacagacacatatattggaactccgtacaattcctgaagcattaccctttttcatcactccaaaggcagtagatgaaaattcatcattgttacagcaacttccacattgggctccatgctctgttacacaagcattggagtttcttacccctccttataaaggacatccccgtgttatggcatatgttcttcgtgtcctggagacttacccacctgagactgttaccttctttatgccacagttggtacagtctctcagatatgatgatgataaattggttgaaggatacttgcttggagctgctcggagaagtaatatatttgctcatattttaatatggcatctgcagggagaatgtgttcccgatgaacctgggaaggaagcagctgcaccaaaggccactgcattccattccttgcttcctgccgttagggagaaaattgttgacggttttactccagaagctcgtgacatgtttgaaagagagttcgaattttttgacaaggtcacctcgatttctggtgttctttttcctcttcccaaagaagagcggcgagcgggtattaaaagggagctggagaagattactgtgccaggtgatgatctgtacctacctactgcaacaaacaagtttgtacggggcattcaagtagacagtggcattcctctccagtctgctgctaaagttccaataatgattactttcaatgtggttgatcgtgatggggacccaaacgatgtgaagccacaggcttgcatttttaaggttggtgatgattgtagacaggatgtgctggcactccaagttattgctcttctaagggacatatttcaagctgttggattaaacctttatctcttcccatatggtgttttacccactggaccagagcgaggcataattgaggtggtaccaaatactcggagtagaaatcaaatgggtgaaacaactgatggtggtttattagagatatttcagcaagactatggccctgtaggttcaccttctttcgaagctgttcgcgaaatgttcatgatcagtagtgctggatatgctgttgctagcttgcttcttcagccaaaggatcggcataatggcaatcttctctttgatagccacgggagactagtccatattgattttggatttattttggagatttcgcctggaggaaacatggggtttgaaagtgcacatttcaagttaagccatgagatgactcaattgcttgatccatctggaacaatgaagagtgacacttggaatcagtttctgagattgtgtgtcaaagggtacctagcaggaaggagacacatgaatgggattattactaccgttaatttgatggtggacagtggcctgccttgctttagcaggggagaacctatcgctaatctgcgaaaacgttttcatccagagatgaacgagcgtgaggctgctaattttatggtcagaacatgtgtggatgcctacaacaaatggactaccgcagggtacgacttgattcaatacttgcagcagggtattgagaaatagtctatttctccttttgtaaatggggggtcgtgtacatcaattgtatgtagccactaattcttttatgtagaattatgttgttgagcggttcattgtatggtaagaacggtgatttcaagcgactaacagagggtgtatcagtgtaagttaaacagtgcctattcatttttttgttccttttgtaagacagccgagctagtaattctattggatcgcgtcttacagaacgaatgggtctttgtattggcatgtggatgtattgttatcttcttttcgcgaatatgtgaacatctttttcactaaaaaaaaaaaaa

SEQ ID NO: 37575 - DNA, 5941 bp, Oryza sativa
  Clone ID: PAT_MRT4530_41292C.1
atggaggcgctcaacgagctctgcgacctggtggcggcgcacccggatctcctcctcgccgacaagctcgcctggctcgcctcccgctgcggcgcccccccggcgtcggcgtcggcgtccgcgcagcgcgcgtcgcgggcgcacctccactccctcctcgccctcgcgcgcctcctccccgccggcgccggggccggatcctccctgcccgcgccgctcctcgcgttcctcgcctcccacgccttcctctcgccgtcgttctggccgcagtcgttcgccccggcgcccttcctctccaggctcctccccttgctcgccgcggcgccgacctgcccggcgctctcgtcggcgctctccgcggcgctcctcgccgcgctcgacgtcgctgacccggcgtccgcgcccctcgcccgcgcgttcctctccgccgcggcggccagcccaccgacgctcctccccgcggatgccgcgcccgtcgcctcccggctgctcctcgagttcgcgggctctgaggaggcgccgcccaaggccaaggggaagggggagtacgcggcgggagaggaaaatggaggggtcagggaggtggtgcagaagttcgaggaggaggaggtggaggagctggagcggaaggaggtcgccttcaggctcatcgtgcatgtgttggggggcgagggtggtctggagtccgataatgttgccaaggtcaggaatgccgccgcaaagcaggtccggtcgctctccgaattcctgaagattaggaaacgggactggagagagcagggggcacagctaaagacaaggataaataccaaattactctgttgccaggctgcggtagtggtgctggttcggagcgtttctgccatggatgttgatagcaaggcttccaaggatatgctccagcagactctagcttggtttatcgaggccactaagtcatgcatcctctcatcctggcgcaaactgaagatctgcgaggagctattttgcacgctgctcaatgtggttaagttgagctgtgaaattatagagtttggctggacaaaggatagggctctggtcgacacattcattatgcggttagctgcatatgtccgtgaacgaaatgattatgaggaggagagtggcaactttacgcccagctttcctgtaatgcgacttaatgttatccgccttcttgctgagttatgtgtatgcttgaaaaaatgggaagttgtagacatgattttgcctcttttcattgaacacttcgaagagggtgaagcatgattgtacggggcattcaagtagacagtggcattcctctccactcgtgtggcatgcttgggttttgaaaagtcatatcgtgagagcattgtcttgatgacaagaagctatctcgataaggctaaagctgtaggatctgcagaaaacaacacagtgccatcagaagcaacaactgagagaatagagactcttcctgcagggtttttgcttgttgctactaatctcaccagcacaaaactcaggtctgattaccgtcataggctattatctctatgctcagatgtgggcttagctgctgagtctaaaagtgggaggagtggtgctgatttgatgggtccattacttcctgcagttgctgaaatatgttctgattttgacccagtttcaactgttgagccatcattattgaaattgttccgtaatttgtggttctacattgtcttgtttggactaacgcatcggcataaatggcaaatcttatctttgatagccacgggagactagtccaatattgaggagagcatcagtgctatagctcttcaggctgtttctggaccctacatgtggaatagcgaatggtgtgtagcagtgcaacgtattgcacaaggaactccaccactggttgtcagttcagtgaaatgtcagtaagctgagattgtgtgtcaaagggtacctaagcaggaaggagacacatgaatgggattattactaccgttaatttgatggtggacagtggcctgccttgctttagcaggggagaacctatcgctaatctgcgaaaacgttttcatccagagatgaacgagcgtgaggctgctaattttatggtcagaacatgtgtggatgcctacaacaaatggactaccgcagggtacgacttgattcaatacttgcagcagggtattgagaaatagtctatttctccttttgtaaatggggggtcgtgtacatcaattgtatgtagccactaattcttttatgtagaattatgttgttgagcggttcattgtatggtaagaacggtgatttcaagcgactaacagagggtgtatcagtgtaagttaaacagtgcctattcatttttttgttccttttgtaaaagaatgaaaatattcgtgatgtgagtgtcaagctgttaactcagctaaaggaaaagtttccacaggtcctctggaactcatcatgtgtagatttacttctaatatctgttcataatgagttgacttctggtccagttagcgatcctgcttgggttgccactgtacgctcactatatcagaagattgccagggaatggataacgagtgctctttcatatgctccatgtacaactcaaggccttatacagatgtttgcacagtggtcacaggttcttcagagttcacaaccaaacttgaaaagatttaaatgtctgattggcagtttttctacaggaatactaaagatgattatggaaaatttttgcaagccaagtggagcacaaagatcacaacatacagcagatgttgtatcacttctatctgaaatacgtatttgtagtggaaagaatgattggaatggcatcaggacagccaatgtacctgcagttatggattctgctgcagcagcatcaggggccaaaaaagaagcacctgacatcaccctggaagtgctgtcaactgcagtagtgactgcaactgttaaatgcaaccatgcaggggagattgctggtatgagaaggttgttcagttctatgggaggcatgaacacgggcatgtccccccttggtatgcagtctgcacagcccaatcaatcatttgacgaagtttttctgtcaagatttgttcgtcttcttcaggacttcgttgttacggcagagaaaaatcaaatagataatacagtgttccgtgaaacttgttctcagtctacagcattacttcttgatcatatggtgtctgactctagagcaaatctagatggattttctcagcttatacgtcttctatgctggtgtcctgcttatatatgcactcctgatgcaatggagactgggatatttatctggacctggctagtatctgcagcaccttccttaggtcctcttgtgcttgcagaacttgttgatgcatggctgtggacaatagatacaaaatgtggtctgtttgcgtcagatatgaattactgtggccctgatgcaaaattgaggccacatctcatttctggtgagcctgaggcaccaccagaaaaggatccagttgaagcaataatagcccataggctctggcttggcttcttcatcgatcggtttgaggtggttcggcatgatagcattgagcagcttctacttctgggtcggatgttgcaagggacaatgaaatctgctactcatttttctcaccatcctgctgcaactggcactttcttcactgcaatgctcctggggctgaaattttgctcatgccagtctcagtctaacttgcagaaatgtaatatgggacttcagttattagaggacagggtataccgtgctgctttgggatggtttgcttatgcacctgagtggtatgaatctcaaaacaaaagttttgctcagagagaggcccaatccgtgtcaatatttgtccattgtctacaaaatgagcgccccagtggttctgctgattctgctccgaagtcacagggacgtgaaggtgaacccaatatgtacagaccactagtgatgactgtcattggtatgtggatgaggtccaagtatgttgtggcctggtgccgtgaacccatgctggatcagaaccaccctgtctggggctcagtggataactatacaactgtacgggaaaagcgtaaacaattacttcttatgctttctcagaatgaggcagacagacttgaagtgtgggcacaaccgataaatacaaaagatgcagcaacatttcgtggtaaaattagctcagataaatggattgatcatgccagaactgcttttgctgttgatcctcgaattgcattctcaatgattatgaggtttcccacaaactcggcattatcatcagaaattacacaattggtacagacacatatattggaactccgtacaattcctgaagcattaccctttttcatcactccaaaggcagtagatgaaaattcatcattgttacagcaacttccacattgggctccatgctctgttacacaagcattggagtttcttacccctccttataaaggacatccccgtgttatggcatatgttcttcgtgtcctggagacttacccacctgagactgttaccttctttatgccacagttggtacagtctctcagatatgatgatgataaattggttgaaggatacttgcttggagctgctcggagaagtaatatatttgctcatattttaatatggcatctgcagggagaatgtgttcccgatgaacctgggaaggaagcagctgcaccaaaggccactgcattccattccttgcttcctgccgttagggagaaaattgttgacggttttactccagaagctcgtgacatgtttgaaagagagttcgaattttttgacaaggtcacctcgatttctggtgttctttttcctcttcccaaagaagagcggcgagcgggtattaaaagggagctggagaagattactgtgccaggtgatgatctgtacctacctactgcaacaaacaagtttgtacggggcattcaagtagacagtggcattcctctccagtctgctgctaaagttccaataatgattactttcaatgtggttgatcgtgatggggacccaaacgatgtgaagccacaggcttgcatttttaaggttggtgatgattgtagacaggatgtgctggcactccaagttattgctcttctaagggacatatttcaagctgttggattaaacctttatctcttcccatatggtgttttacccactggaccagagcgaggcataattgaggtggtaccaaatactcggagtagaaatcaaatgggtgaaacaactgatggtggtttattagagatatttcagcaagactatggccctgtaggttcaccttctttcgaagctgctcgcgaaatgttcatgatcagtagtgctggatatgctgttgctagcttgcttcttcagccaaaggatcggcataatggcaatcttctctttgatagccacgggagactagtccatattgattttggatttattttggagatttcgcctggaggaaacatggggtttgaaagtgcacatttcaagttaagccatgagatgactcaattgcttgatccatctggaacaatgaagagtgacacttggaatcagtttctgagattgtgtgtcaaagggtacctagcaggaaggagacacatgaatgggattattactaccgttaatttgatggtggacagtggcctgccttgctttagcaggggagaacctatcgctaatctgcgaaaacgttttcatccagagatgaacgagcgtgaggctgctaattttatggtcagaacatgtgtggatgcctacaacaaatggactaccgcagggtacgacttgattcaatacttgcagcagggtattgagaaatagataagtctaattttcctcccttttttgtaaaatgggggggggtccgtgttaccatccaatttgtaatgttagggccacttattcctttat

SEQ ID NO: 37576 - DNA, 579 bp, Oryza sativa
  Clone ID: PAT_MRT4530_41293C.1
cggacgcgtgggccaagcgctgcaaccatctgccccagcagctgctgccgccgcctcttcttctgcccaagcgagtgccggctcttccaaggcagctgctccaggtgcattatttgaggataagccccaatctgcaaatgatgcatggagaaaactccacactgatcctcttctactaataaggcagcgggagcaggatgccattgcaagaataaaaaataatccaatcaagatggctgagataaagaaatcagtggaagctgagaaaaagcaaaaggaagaaaagaaagagaagagaaagcacaagaagcgccatcatcacaaatcaaagagtaagaggcatcactcaagtgagaactcagattcagaggaaagtgatggcagcgatgagagaagaaagagtgttcaggcctcagagcataagagagaagagaaaaggtcaagacatgataagaaggatcacggacaagattcagaagacgatgaacgaaggaaaagacggcatgcaacgtcagaagatgatgagccaaagaagtcacagaaaagatgtagaaggagacgagggaaacttgatgctag

SEQ ID NO: 37577 - DNA, 801 bp, Oryza sativa
  Clone ID: PAT_MRT4530_41294C.1
atggcggcgtggctgtatccgatcgtcggtggccaccaagtcgccgccggcgggtggctgtcgccggaggctggggatgaccggcgagccgcaccgccggcgccggagaagaaacagatggacaacatgccggcggtggcatcgccgacgatgaacaaggacgaagcaagcgacgactccggcgagaggaagaagaagaagaagaaggcatcatcagcggcaggaaaagcaagcaggcatcgccacgctgcaggagctcacaaccttacagaaaaaaggcggaggttcaagataactgagaggttcaggacgctgcaacgtctcgtcccaggatgcgataataagtcgaaccaggcgtcaacgctggaccagacaatccagtacatgaagtcgctgcagcaccagctcgaggccacgtccgccgtcggctcgccggcggcggcggttctgtaccccgccgccgtgcacccgcagtcgtacatgcatccaccggcgccgccgccaccggtggccggagcggcggcgccggtcacgatggcgccgatgcctgccgggatggttcttgctgctgctcctccgggggcggcgccgccgcccggccctccggcgacgatgatgccgttcggagctatgctcccttaccctccctacccggaggtgctgctgccgccgccgccggcgacgctgtacggacggccgccggccgccgctcccagcgttgcagctcgtcgacatggatccaccagcggcggcggcagaattagcaagagcagtagcagcagcctgcgcaaggaattgtaa

SEQ ID NO: 37578 - DNA, 1763 bp, Oryza sativa
  Clone ID: PAT_MRT4530_41295C.1
ttttttggcaaaaattgttactaaaacatatggattcaaaacatctggacaatgcgttgtacaacattcaaaaattcttccatactaaacaaggaacaatacaccagaaaggcaaaagaagctaaagcaaatgcagaacactgacatcaacgaggtcaggccgcctgagctgctgctctgcttcagggatttcaccgcctgaatgcattgctctcatgggcattacgctgcgaataatacgcacggcgccggatgctctcttcgatcgtggcgcttccgcccttctcggttccaaatatgctcttcttttcttcttccaagaagttcttccctctgaattggtttgcgttcacagatgccgcctccttggcatcgtcgtctgcagctttcttgagcctgctccatctttgttcttcgtggacctctgcgtcagcctgcatttgacgaagtcgagcttccctttcttcctctgacatgtgctggacaccccgtcgacggttgaatgtagggccgttcctgccctgctggctttcctgccttcgttggccttctgaacctagttcagaagtggaattgccgcgtccatattccggtcgcctatgccttgaatctgaactgtcgtgctttggataagcactgttgtggtctgacggagtatagtgtctccctctcctatcatctgacggagtatagtgtctccctctcctatcatcagcatccgaacgaccccgtcgtgaatattcgtcatgctttggcatctcctgccttcttctccttggttcatcatctccggaaacctcagattgtcttctttttggttcatcatcttctgacctctggtgttttctccttggttcttcatcttctgaatcatgtcttctgcggtctttccttgacttctttggcttgtcatcttctgaatcttccctctgtcctttcttctccttctgtgacttccttggctcatcatcttctgacgttgcatgccgtcttttccttcgttcatcgtcttctgaatcttgtccgtgatccttcttatcatgtcttgaccttttctcttctctcttatgctctgaggcctgaacactctttcttctctcatccctgccatcactttcctctgaatctgagttctcacttgagtgatgcctcttactctttgatttgtgatgatggcgcttcttgtgctttctcttctctttcttttcttccttttgctttttctcagcttccactgatttctttatctcagccatcttgattggattattttttattcttgcaatggcatcctgctcccgctgccttattagtagaagaggatcagtgtggagttttctccatgcatcatttgcagattggggcttatcctcaaataatgcacctggagcagctgcaagtaagaaggcaaatattttatcgtttttcttggaagagccggcactcgcttgggcagaagaagaggcggcggcagcagctgctggggcagatggttgcagcgcttggaatccctcggagctccccttgccaacagccaaccctgactcgtagaggaagtccaatctctcttgcctcggcttgaggccggcgtcctcctggagcttgcggaaggcggccttctcccgctcctcgtcctgctgcttcttcagctcctggatcttccgctgctcctccttctccttctcctcggccacccacacgcgctcgatgttccgaaggctccccgtgtgccaccccttcttgttcagaaatttcatccccat

SEQ ID NO: 37579 - DNA, 493 bp, Oryza sativa
  Clone ID: PAT_MRT4530_41296C.1
tgcatgcctgcaggtcgactctagaggatcccctcagcgctctgggcatccttattgtgatggtttgaaggccctcgtcgagcggactgtttccgacatgttcgatgcgtccaccttcttcatgccggggatggtgaatcggtgctcttctagactgaccaatggattgatggccgctcaatggcttccttggctcctgatctcctcttcgtcgtgccccagtgcatctgagtgtctcacttccagctctcgtcgggtgtcggagatcgtcttgtttggtgttggacaaaagcacgacattgacggtcactcggtcttccccttttgcgctcaagagcttaagacggcgaaccacatcctcctgattgcgttctcggaggtcctgcagtccatcctctcagagggccatctatggtcgttagctggcattgctaattttgggggtttttttgggagagtagtgggctccaatgttatcaagtcacccgactaa

SEQ ID NO: 37580 - DNA, 498 bp, Oryza sativa
  Clone ID: PAT_MRT4530_41297C.1
atggagcctcagctgaacaactcctccaaattccgttcgaagcaagctactattaaacccaaaagagaagctttcagatctaccagagaagttgagtttgaggcaaagaaaaaaatgggaacgatgagaaagaggatggtcatacctacactcaccgacaaggaggcagcgggagcagcgggcaaggacggccgcgctggtggctcgtgggaagcgggcgacggagacatcggcgttgctcgacgcaggcagagaggaggaactcgcggatggtttcaatcaatcttaggtgcttcgaagcaatgtaaacaacttcaaaaattaagaaaatttcgagatgaggccaaacccacctcagtcgaaagaaggtctggtgctatcatcaaagagattaacaagaaattcgatgttcttgtaacaaaggtttcttttgaagttttcgagaaattcaatcttatgagaaaaatttctaagtggtcctttgaatcgaaggaatag

SEQ ID NO: 37581 - DNA, 1323 bp, Oryza sativa
  Clone ID: PAT_MRT4530_41298C.1
atggcggtggcggcggcggacggcatcgccgcactcgtcgactggtccgaccttctgccggtgatcctcgaggacatctcccagcgcgtccatggcgacgaccgcgccgtgtttgccgccgtctgcaagtcgtggcggcgcgcggcgagcgcggcgggccctcgcctcagccgccactccctccaccttgtggcgctctgctccggcgccaacgccgtcgacttctcctcccgccacggcgacgtcgtcaagacggcgtacctcggcagcggcggcgcgcgcccccaccgcatcatcggctgctcccacggctggctcgtcgtcgtggacgaggcgtgccgcgcctccctcctcgagcccttcaccgacggcgcgcaggtacccctgccgcccgtcacgtcgttcgactgcgagtacttcgtcacggccgtcggtggcgacggcgacggcgtcccggaatacttcgcggtggacaatcacgcctatcaccaccatctccaaggccatcgcaagatcgagtggaagcctcccaaattggtgccggtccagtcgatgcgcgatgagttcttccagaaggcggccatcgccccggggagccaccggaaggagagctacgccgccgtgatggtaagccacagcggcggctccgggctggcattcgcgaggtccggcgacgaccgctggacgtcgctgcccacccaggcattgacgcggtacgcggacgtcatctggcacaacggcgcgttctacacgctcacccgcggcgacggcgccgtggaggcgtgggagccggacggccgcgccctgaagccacggctcgtgacggggccggtcatgaggtgggagttcaagcggctggtggaattccacagcgacacgttccaccagccggcgttctacgagggcgcgaggtacctggccaagcaggcggacggcggcggggggctactggtggtgagcaccgtggccatcctcgacgacagcaacgcgctgcgggcgcggcggttcaaggtgttcgacgtggacgaggacaagggcgagtggcgctcccgggacgacgtcggcgacgccgcagtgctggtggggatcaaccacggcgagtgcgtgtcgacgcgggagtacccgtgcctgaagcccaactgcgtgtactacgtggtcaagtcgttcgcggcggatttcgaggaggaggagaagggatgctcgcggtacgagagcggcgtgtgcgatgtcaagacgggggtggcgtccaggatgtcggtgtttcggcgcgccgccggcggccatcctgtttggtttgtgccctccgctgtttctcgcaggtga

SEQ ID NO: 37582 - DNA, 318 bp, Oryza sativa
  Clone ID: PAT_MRT4530_41299C.1
ctaggatggcgaatcgcagctctggtggtggaaacatcctcccgcaatggtcccgaagggtggtgaagattccagatctgagttgccttggtggtggtagaggcggtttcggcggcggtcgtcggtggtgccttgcatgcgagcgggctcatgctggctgtggtggcggcgtgtgcgctgtgctcggcgttgctgcggttgtcgtcgcccttcatcgtgctcccgctgtttgctgcgccctggcttgcgctgctcctggtgcagcatctgcctctgttggttggggtcttgttggaagcagtcctgcctcgtagccat

SEQ ID NO: 37583 - DNA, 2016 bp, Oryza sativa
  Clone ID: PAT_MRT4530_4129C.1
atggggagggaggcgtcctcgccaccgtgggcggcggcgacggcggcgaatggagtggccggctcatcgtcgtccggacagaagaggaaggccgccgtggacgacgacggccgcggggaggacgacaactggctgaaactgtcgcttgctccggtggactacggggatcccacgggcgacgtcgtcgacaacaactcctcctcttgcgctccggcagtgatgacgtcgacggaggagcggtcggggacggccgccggtgtggcctccggatcggcgcgcgccggtttgatccccaacggtgcagtcccgatattcccatgcttcaatttccttggaacttcaacgtcatcatcaagcctatcgcacctccatcaacaatcttcctcgactcgacgtcaaagcaacgcgtccacatcaagctctagcggcggcatcggcggtggtgacgacgatgaggcaccgaacgtcatgaacggcggcgacaagaacgatggtaatgctcttccggatccaccgtatccttgggctaccaatgaagtggccaaacaccactccctcgtcgagctcgctcgtcgcgacatcatcaacatcaatggcgaagctcggtgcaggcgctgcgacactcgcaagatgattgtctacaacattgccaccaagtttcgagaggtgtccgactacttccgccagaactaccagcatatgaatgaccgtgcgcaggcgcggtggatgaatcccgtcgtgccgaactgcgatagttgtggccatgagagatgcatgcgtccggtgattgccgctgagaaggaacgtatcaactggttgttcctactgctcggagagacactgggtttgtgcacgcttgatcagctcaagtatttctgtgcgcacaccaaccggcatcgcaccggcgccaaggatagggtggcggtaatcaagtgtgcaagcattgatctagactccatccttgatggcgtcccaatgttgcaggcccaattccccataaaatacttaggactgtcacttctacttgaaaggatgcgtaagacggcggcggcggtgcagggagccggctcgtcgtcgtccggacagaagaggaaggccgccatggacgacgacggcagcggcgaggacgacaactggctgaaactgtcgcttgctccggtggtctacggggataccacgggcggcgtcaacgacgacgacgactcttctcgcgctccgacagtgatgacgtccaccgaggagcggccggcgacggctgcctgtgtggcctcccgatctttgatccccaacggtgcagtcccggtattcccatgcttcaatttccttggaacttcaacgtcatcatcaagcctatcacacctccatcaacaatcttcctcgactctacgtcaaagcaatgtgtccatggcaagctctagcggcatcggcggtggtgacgacaacgaggcacttggcaacatcgtcgcaccgaacgtcccgaacggtggcggcaacgacaacaacggtggtaatgctcctccagatccaccatatccttgggctaccaatgaagcagccaaacaccactctctcgccgagctcactcgccgtgacatcaaaaccatccgaggcgaggctcggtgcaggcgctgcgacacacacaaaatgatcaaatacgacattgccaccaagtttcaagaggtgtccaactacttccgtcaaaattaccaacatatgaatgaccgcgcacaggcgcggtggatgaaccccgtcgtgccgaactgcgacaattgcggccatgagaaatgcatgcgtccagtgatagccgccgagaaggagcgtatcaactggttgttcctactgcttggggagacactaggtttgcgcatgcttgatcagctcaagtatttttgcgcgcacaccaatcggcatcgcaccggcgccaaggatagggtgctcttctctacctacgaagagctatgcaaccagcttgctcctgggctaatcacgtgccatgatcagtcaaggatgtgctag

SEQ ID NO: 37584 - DNA, 1153 bp, Oryza sativa
  Clone ID: PAT_MRT4530_412C.1
ccggccggggaacccctccgccgccgccgcctgggtgctcggccgctcctccgcttgctctcccttgcttccgagggctccgccgcacggggtcgtcgcggctagagggtgggctcgccgtcgaggaaggcgggggtgtctggctcatcgagaacagtgccgaggggaatccgggttgcgggggcgatggccatggccgcggcggaggcgcggatgcggcaggagaaggtgaagaagttcgaggacttcgtcgaccggagactgaagccggaccttgtgaacaccatcgcgcagcgggacaaggtgttccagcagcagaagaccttcttggacttgaaaaggaacatcgaaaatttggagaagaatggagtcaccagtatgcgatccatggtcaatcttggctctgaggtgtacgcccaggcagaagtgccagatacaagacacatttttgtggatattggtctaggtttccatgtggaatttacttggcaggaagctttgcagtttatatctgtaagagaatcaaggttggcaagacagatagatgagtacactcatctcatcgcaagcataaaagcgcagatcaagttggtatgtgaaggtatccgcgaactactcgagctaccagcagagtaaaggtgaaagttggcaatgcaatcgtatgggggtgcttggtagaatgacttgtgcttttgcttttctcacgaaggcatggtcgcccatcttcgaacatgaaagattttacatgtactgttgtgcaaaagatggtttcatacactcatccctgtaataacattcatctaatcagattaactacagtagaatttcgctatgtgaaatcaacgcaaacactgtgaaaacttgttggttgatgcaacttctgatcttccctagattcccaagtcatagtgtacatggcatgccttggaagctcatggcatgttccattttgtcattagattagaacaatgaaaggaagttaggaacatgccattttgcatatagatgtgtcagtcaagacagcagagcaaggaaagtatatattgggctattggcacttcatctggtaaggcataaagcttttgcctttgccgcgaagctgccttattgtcttttccactttccaaaaaaaaaaaaaaaaaaaaaaaaaaaa

SEQ ID NO: 37585 - DNA, 267 bp, Oryza sativa
  Clone ID: PAT_MRT4530_41300C.1
atggcggagaggcagcgtggtcacgacggggcgagagaggcgcgacgcggcgccggggcgcgcgagggcgtggcgtgggagcgcgacgcagcgaggaggcgggggagcgtggcacaatgcgatgtggacagaacgcgacgcggtgtggagagcagcgagggtgcggcgaaaaaattgcgaaccccagctcccgttgtcgtcgtcgtcgcgcacgaccttgcctccgccaccgccgccaccatcgtcacgcgaaatcacaacctctga

SEQ ID NO: 37586 - DNA, 708 bp, Oryza sativa
  Clone ID: PAT_MRT4530_41301C.1
atggccttggtgatgtcaatgctgctggcctcctcgctcctggctgcggcgtcggccgcgcgcgccgaccaccactcgccggcctacgcgccttaccctcaccaccacgccccgtggccggcgcgggctcagtcgccgagcgctcccgaccacggcgctcacggccaccacgcaccagcgccggcgccagtccacgcggaccagccagcgcaagccccagagtggcatcaccacgctccagccccggctccggtccgtgacgacaagccaagcccctcgcatcatcatcatcaccatggccatcatcaccaccgtcatgctactgctactgccccggcgcacgccccgagttcgcatcatgatcgccatgctccggcgccggtgcactccagctggccgtggccggcccacgcgccggcgccagcgccagcggtgatccacgggacgaacagccacctggcgccggcgccggcgccgtcgtcgcatgttcagtattcccctgctcctactcccggtgacggccgccatcagtcgccgccgccgccgccgtccccgcctagcgctgacgaaggcgctcaagcacctagctactacgggcactacccttcgcctgcgccggctccggcgcaggagagttcgtccgccgccgttgccttcgccggtggagccggtgtcctcgccgtgacggctgtcgcgctgcttctttag

SEQ ID NO: 37587 - DNA, 474 bp, Oryza sativa
  Clone ID: PAT_MRT4530_41302C.1
atgcaatcacgtcagtacgcaacaaacaaaaaaccccagatccacgcggaattcgacgctccagccaccggatctcggcacggcgcggcgaggcgcggccgtcgaacggttcgcctcgccacaccgatcccccattcgcggcgaaacctaaacagcgcgagcctgggggaaggcgagagcgagagagagccgcgggggggttgggggggggcacgtaccattgtggcgcccgcgacggccggctacggcggggacgcggcggtagaggtgggctgtgaggccgtcgtgggtggaggggcgccggagtggagagaggcggcggcgcgaggcctcgttttctcggctctcgcggtgtcgcctgcggggagggggagtaggacgcggcgccgggaaggaggagggcgcgagatgggggagaagggtcggaggaggaggacggtggtgggcaaacgggttaacgggtcccggatgtaa

SEQ ID NO: 37588 - DNA, 3298 bp, Oryza sativa
  Clone ID: PAT_MRT4530_41303C.1
ctactactactagctaccgagcactgagcactgcactctgctgctctagaactgaagctttgcattggttggttagtgagagattaattattccaagatgttgggcgggatcatcggcggcctgacgggcaacaagaacgcccgcctcaagggctccctcgtcctcatgcgcaagaacgccctcgacatcaacgacttcggcgccaccgtcatcgaccgcatctccgagttcctcggccgcggcgtcacctgccagctcgtcagctcctccctcgtcgaccccaacaatgggaacagggggagggtggggacggaggcgagcctggagcagtggctgacgagcctgccgtcgctgacgacgggagagtccaagttcggggtgacgttcgagtgggaggtggagaagatgggcatacccggcgccatcatcgtcaagaacaaccacgccgccgagttcttcctcaagaccatcaccctcgacaacgtccccggccacggcgccgtcgtcttcgtcgccaactcctggatctaccccgcctccaagtatcgctacaaccgcgtcttcttctccaacgacacttcactgccgagcaagatgccggcggcgctgaagccgtaccgcgacgacgagctccgcaacctgcgcggcgacgaccagcagggcccgtaccaggagcacgaccgcgtctaccgctacgacgtctacaacgacctcggcgagcccgactccggcaaccctcgccctgtcctcggcggctcccccgaccgcccctaccctcgccgcggccgcaccggccgcaaacccaccaaaactgaccccaccgcggagagcaggctgtcattgctggagaacatctacgtgccacgcgacgagcggttcgggcacctgaagatggccgacttcctgggctactccatcaaggcgctcgtcgacggcatcgtgccggcgatccgcacctacgtcgacctcacacccggcgagttcgactccttcaaggacatcctcaagctctacgagggcggcctcaagctgcccagcatcccggcgctggaggagctccgcaagcgcttccctctccagctcgtcaaggacctcatccccgccggcggcgactacctcctcaagctccccatgccgcacgtcatccgggaggacaagaaggcgtggatgaccgacgacgagttcgcccgcgagatcctcgccggcgtcaaccccatggtcatcgcccgcctcaccgagttcccgccgcggagccgcctcgacccggccaggtacggcgaccagacgagcaccatcacggcggcgcacgtcgagcgcgggctcgaggggctcaccgtgcagcaggcgatcgacggcaaccttctctacgtggtggaccaccacgatcatttcatgccctacttgttggatatcaatagcctcgacgacaacttcatctacgccacgcggacgctgctgttcctgcgcggcgacggcacgctggcgccgctcgccatcgagctgagcttgccgcacctgcaggacgacgggctgatcaccgccaggagcaccgtgtacacgccggcggcgcgcggcggcaccggcgccggcgccgtggagtggtgggtgtggcagctcgccaaggcgtacgtcaacgtgaacgactactgctggcaccagctgatcagccactggctcaacacgcacgccgtgatggagcccttcgtcatcgccaccaaccggcagctcagcgtggcgcacccggtgcacaagctgctgctgccgcactaccgcgacaccatgaccatcaacgccctggcgcggcagacgctcatcaacggcggcggcatcttcgagatgaccgtgttcccgcggaaccacgcgctcgccatgtcgtcggcgttctacaaggactggagcttcgccgaccaggcgctccccgacgaccttgtcaagcgcggcgtcgcggtgccggacccggcgagcccgtacaaggtgcggctgctcatcgaggactacccgtacgccaacgacgggctggccgtctggcacgccaatcgagcagtgggccaccgagtacctcgccatctactaccccaacgacggcgtgctccagggcgacgccgagctgcaggcgtggtggaaggaggtccgcgaggtcgggcatggcgacatcaaggacgcgacgtggtggccggagatgaagacggtggcggagctggtcaaggcgtgcgccaccatcatctggatcgggtccgcgctgcacgccgccgtcaacttcgggcagtacccgtacgccgggtacctcccgaaccgtccgtcggtgagccggcggccgatgccggagccgggaacgaaggagtacgacgagctggcgcgcgatccggagaaggtgttcgtccggacaatcaccaagcagatgcaggccatcgtggggatctcgctgctggagatcctgtccaagcactcctccgacgaggtgtacctcggacagcgcgacacgccggagtggacgtcggacgccaaggcgctggaggcgttcaagcggttcggcgcgcggctgacggagatcgagagccgcgtcgtcgccatgaacaaggacccccaccgcaagaaccgtgtcgggccgaccaatttcccctacacgctgctctacccaaacacctctgacttcaagggcgacgctgccggcctctccgccaggggcatccccaacagcatctccatctgatctcccttccatgagatgatgctgctttacggacgcgcgagcgtggacaagagtacttttacggtggtctttaccggtagtattttactttcaataattgccatgacacctacacccggaggtgtcatggaggatgaattcgttgtgtaatttccctttcagttcctaataaagaataacgaagcatatggttgtgtagcattttcaagcaaaaaaaaaaaaaaaaaaaaaaaaaaaaaaaaaaaaaaaaaaaaaaaaaaaaaaaaaaaaaaaaaaaaaaaaaaaaaaaaaaaaaaaaaaaaaaaaaaaaaaaaaaaaaaaaaaaaaggggggggcctttttaaggaaccaaatttccgggtttggattttttttatggggccatatacgtgtgctattgctagtgttgcgcgtttgccgtcgtcgatttgtttcattgtttgtatcagtgtgcattaccgtgattcttcgtagttcagggtctcagggataagtcgttgcaaatgtgagtaaccttgaggcatggataatttcattaggaattattcacatggaataatgaaagttaataaaatcattttgctttc

SEQ ID NO: 37589 - DNA, 300 bp, Oryza sativa
  unsure (1)..(300): unsure at all n locations
  Clone ID: PAT_MRT4530_41304C.1
cccatttgtccggaccgacgtcggagggcgggggggtccaancatccgatagctatcactgagttccgttttctctaggctttgtatatacttttgtgttcttcgattatgccatgggtctatggcccagctatttaatcccagcacaaacccatggcatacttttttttatgggggggggggggagcaaacattctatagactacaaacatttaaaccactccggggggtggggtcagaagctgatgtgagtgaagacttcgatgaaaacaatgaattattccacggcaccgttacttt

SEQ ID NO: 37590 - DNA, 1135 bp, Oryza sativa
  Clone ID: PAT_MRT4530_41305C.1
ctcatcatctgcatgcagtccgccgccccccccaccgcgctcctcgcccgccccctctgctcggcggagcggcgcctcctcccccttgcatagttcgatcgaactaaataactcaccaagttagctgtaatggccaagctgatcctcgccaccttcgccgtcgtgttcatggcgctcgccgccacctccctcgccggcgacccggacatgctccaggacgtctgcgtcgccgactacaagtccctcaaaggcccgctgcggctgaacgggttcccgtgcaagaggatagagaacgtgacggcgaacgacttcttcttcgatgggctgatgaaggccgggaacacggggaacgcggtggggtcggtggtgacggcggcgagcgtggagagcctgccggggctgaacacgatgggggtgtccatggcgcgtatcgactacgcgccatgggggctgaacccaccgcacacgcatccccgtgccaccgagatcatcttcgtcgtcgagggctccctcgacgtcggcttcgtcaccaccgccaacaagctcttcacccgcaccgtctgcaagggggaggtgttcgtcttcccgcgggggctcgtccacttccagaagaacaacggcaacacgccggcgttcgccatcgccgccttgaacagccagctccccgggacgcagtccatcgccgccgcgctcttcggcgccgcgccgccgctgccgtcggacacgctggccagggcgttccaggtcgacggcggcatggtcgagttcatcaagtccaagttcgtcccgcccaaatactagaattgcattgcatgcatgcatactgcaggaagaacaagatggcagctgagctagctagccctatcgcgataataataattaagaggacgtacgtacgtaccgttaaaaagtttgtgatttgattggtaggatttgtgtcagtgtgtgtttgtgtttgtgagtcctttgatctgtaatgtttagttttgtttttgagtcctcgtcgatcgatcgggtcgtgtctcgtaccacatgtgtgtggtacctggccggacctgatcgttactgtattattaacgtcctggtttaaatactaccaccgttacttcgtaaaaaaaaaaaaaaaaaaaataaa

SEQ ID NO: 37591 - DNA, 1339 bp, Oryza sativa
  Clone ID: PAT_MRT4530_41306C.1
gcacccgcgcgtattccaatccactcccaccaccaagcgcgagctcgattatttttttaatcgattttctccgatttaatccgtagaaaattccccactcctcctcctcctccaccgccgccgccgacgccgcactcctcactccgcagaagcaacaccaacgccgcactccaacgccaaccgcctccgcgcgcggcccgtcgccatcgtcgagcaccttcacgcttcctcctcccccgcacggaacggagacccctagcgccgctataagagggagagaggtgggcgggactcatggcgcccgcggcagcgtcgctcacggcccccaacgcactcgcggcgacgtcgttgcccttcttgcacggaaggaagagcggcggcggcggcgtgtccgtgcacgccggggcgccttcgccttcgcgggcggtggcggtggtggcgcggaggttgtgggggagcgctagcagtagcaggaggatggtggtggcggcggcgacggcggcggagatggcgcccgcggcgaagcggggaggaagggaagccgttcgtggaggagatgagggcggtggccatgcggctgcacaccaaggaccaggccaaggaaggggagaaggagccgcaggcgccgccggtggccaggtgggagccctccgtggacggctacctccgcttcctcgtcgacagcaagctcgtcttcgagacgctcgagaccatcgtcgaccgcgccgccgtcccctggtatgctgagttcaggaatactgggttggagagatcagaacaactgaagaaggatctggaatggttcaaggaacagggtcacacaattccagaaccatctgctcccggcactacatatgcttcctatctggaagagctggctgaaaaggactcccaagcttttatctgccatttctataatgtgtattttgctcatacggctggaggccgaatgattgggaagaaggtctctgagaatattctgaacaagaaggagctggagttctacaaatgggagggcaatctgtcccagctgctgcagaatgtccgcaacaagcttaacgaagtcgcctctagctggacccgggaggagaaggaccattgcctggatgaaacggagaagtcgttctcgtattctggagatctcctccgtcacatattcacctaagcttaattgatcacggtgtctgctatctagtcttgataaacgctgtaaatactaaagttcacgtcagtcagacagactgttactggacactgggcagaggtcatttacttactcaaccagttggccttgcctcccatcaaattgccaaattctaataaaaaaaaaaaaaaaaaa

SEQ ID NO: 37592 - DNA, 560 bp, Oryza sativa
  Clone ID: PAT_MRT4530_41307C.1
gagcaaatatttttctagaacaaatggtttactttgattatactccatcccactctaagtaacatctcaccacactttattatgtgagcaagcatatataaaccatgtgtgcaaccgtacctctgacatgcgtgttttttcttgtctgcgggttagttgaagatacacatgagaagggcttgattaggcctggtgttatggtccgtccgtgttgattgaaaaagccggtgataatgttggtaccttttggtattagttgctattaaagaaaggttgcaggtttcttgctattatgccggcttaatactcacttcacaggcagatactactgaggtttttttatgctaagtaacattgacaggtgataaccaggatcccacctcttagaaattgttagagacttaaaatgcacttaaatgcctcattcagtttttatttaatagatatgtttctggggaatggaccaaattaattttgtgcctttcttgtgcttaattttttattacatattatgctaaactaattactactctttccgttacattttaagaatcctctga

SEQ ID NO: 37593 - DNA, 395 bp, Oryza sativa
  unsure (1)..(395): unsure at all n locations
  Clone ID: PAT_MRT4530_41308C.1
ggaacgaacttgtttctgcactgactttcaggcaatatgtcattaatcacaaaaaaggaatactgacaaaataggagtactccagtaactgcatttctgatcccgaggatgaagagacagctactacagctgacaaaaataactgcacgcattcatcactctgctgcttgctggtggtttctgtggcagctaaacgctactggagatttccgtgattctctccttgcggaaaatacaagtgcgaaattaggaatcggattattccggnccttggggggccagatactccctttcagaatttttctctggggcctgtggggctggggctttaccttcttcttgcgtttgcgtcttttttctttttttttctgtttttttttttttntgtttttttt

SEQ ID NO: 37594 - DNA, 651 bp, Oryza sativa
  Clone ID: PAT_MRT4530_41309C.1
acagaaactgcagattctaaatagtgttagtagctccagaaattcagaccatggcagcctccccaatctctagcggtgagtcgttcatgttccccaccagtgccgtggagtcatcgacatctgcctctggctccagcaatgtcggctctgaagaaattgatcccaacacctgcaaaaacatcaccgaaatgatcatcaacatcagaggaggtcaccacatggctgcagcgtcacagtggcacatggcgcagagagagattgatgcgatggtgaaggagatccacagcaaggcaggaaggcagcatgcactcgtatggtcatacaagcttcgacttctcgcctttgcagatgagatcaccaagctacaattgtcccctgacaagctcttcgtggtgctgaggctgctcaaggtactcaacccagacttcttccttgtatcgcaatgtcgtccagaagagttcagcgtggcaaagtatgatgacacgctgcagaagctaaagatggccgtgtaccacatgcttcgtgagcttaaaattttgatccaaacccgtgcttctaggcgtgtaccaccaggtgggggaatccatgaagtgactcgctatgtcatgaattacatcaagttgttggtgcatcataagaccacacttggtc

SEQ ID NO: 37595 - DNA, 231 bp, Oryza sativa
  Clone ID: PAT_MRT4530_4130C.1
tcgtccgatcgtacgatgaggacggggaggctgccgtcttctctggctcacgccgtcgcggctgtccatagggtggcgccctcagaccaaaccctggatgcggactctcttgtttatccctgcgagggagactgcccgaacgctctcaggctgcaattgatcgagctatccctacacctccccctactggggtcctgctgggcgtatttcacgaggcgctatcttgggctg

SEQ ID NO: 37596 - DNA, 6693 bp, Oryza sativa
  Clone ID: PAT_MRT4530_41310C.1
atggcaatgacggcgcggcgggttcagctcgccgaccggtggcgcgggatccaggaggccgaggaggccgatgacgacggcggcggcggcgagccgtccgcgcccaggcagcgccgcctcaaccaggccaaggaggaatggttgctatgggccgatagactctcaccttcgtttcagacaacagagtggattgatatattgggtggaaacctctgcagggctcattatcattttgagcgtgagcactgttatgcacttatgctattggtagttttgtcactccgtcttgttagggcctggggaatgaataatctacatgcttcactgttcaatggaacccacatgtcagtttatagtgggagttggtggtggcagattcaccaatttcaagtccccacatgtcggttttcacattgttttaattttctgggaagtttgccaaaagaagagcatatttggtgtggatatgctgatattatgggaccatttctggagaccttccttggttactttgatgaccaagaggaaaactcacctcctaggacaatatggaaacggatttctgaagagctgaatgtttgcgcacaatgtgtttgcgaacaccaccaggcacagaaggattttgattctgaatatcggtctggcgttgacgccctcctgaaagtgttacggcttctcgatgaagagagggttacagaacatcttaggcagatgaatgcaaaagcacaattaaaggagtacaaaccttcatgccatgatgcagaagttagcataatgtttgaagttttgatgtatcccattttgttagatgacctgtcactggctaatcagttccagacattcattgaaagaattgatgaaatatttgaagtgagcctttctactaatcagcaataccctggtgtttatgcattacttttcttcaaaagttgtaaagctcgagcaattgggcttcgcttagcccggtctatggggaaattgaggaaagcagttgacttggaccctttgcaacccttactgcaaaaatatattaattttttggaagccgaagttcttccatctacttcagaatctccaaggcctagggtgcagctcaaaagagccgatatatggcttggatttaaatcactgtattcacttgaagcactgcaagacggtgatcatgaaaagcaaaggaggaacatactgtattttcttctttatcaagtaactcggagtagtaacttcagttctctgatgagaaaaaccgctactaagattgctcttcttattgtacaaagagggtacacaatgaaccctccttgcccagcatctgaatgtgtccatatgtggggaccatctttgattggctcattaaaggacaaatcattacataattctttgcgtcaacctgcactcgatctcatcaatatcctcataatttctgatgcttctgctttgatctcttttaaaatgaagtatgagtctttcacaaagggcgatgtaatcaattctgtcatatttgttgatgatgacgatgaattgcctgtcttctgtgatgctgaagagatggattacggctgttggaatgatttcaatgttctgtacaagttgacatgtcgggaatgcaaggattggagatgtgtccctttgttatggtacctcataatggttcagttggaaccttctgaactgcccatggccttttcaaaagcagtgttttgggctctatctcatatttctgtgttggagcctggagtatctacagagtcttcagtgcctgtgaatgattggttgtcatcacatgctgaagaagtattgccaacattttcatggcaagtcccaaatggtgcagatgatggtggagttggaaaggagtgtatcaatactctcaagaatctgcggcaagttgggcgagctgtcttggagcttgcgtcacaaggacggggtttgacatctgggcttcaatttctgtgctcgagtgcatcttccctgactgccacatttttgggtctaagatatgcagttcaatcggtggaaacaaaatcagttttggcagattttcctagtcttcatcacttgttttttgtcatatgcaaactattaaaggatgttgttgttcaacaaccttcagttgcactgcaagcaaaaccttttgaagggggtttcctgcgccagtccttttcaaatgtatcagtcaacctaccacaacattcagttgacattatttcttgggagaagttcagcaccttgctttcaggagctctctggccttttattttcacatgcctgcgaaagggagatgatctaatcaataccaaacagtgtcagatatcatgtgttcgattgcttgagttggttccccttgtgtatgaaagggtttcttcatattcttctgccaagtcatgtggcgtgccaacaatggttctggaccctactgatattacgtggctttttcacttgattaattggggcaaatcatcactccttgtaatcattagacattggaagcagtgcatgctatctctaattaaaatattaaaaggttcacttggtggtactgttcaacactacattgaagatcttggtagtatcatttcacatgatgcagtcaatatcgatgaactcagcgagaaaatttcagatctcaaacttgcattgtccaaggaggcttctgcaaaatccgaaaggagagtggtagctggtgtatcaatgttcacagaaccaattgctggtattccttctccagctactcagacggctcaggagagaaatactggcagggacaatgttgaaaccatgaagtcttctcgatcgacatgtactgaacatataattcttctgtcagatagtgaagaaaattcattgacagctgatgtgtctggtgaggatgttttgtcatcagttaaagatagtgatggatctggtacttcagatatgcagaaagaagtcgagcattctgaaccaaggatgcctactgaagatagacacgtgtcactaaaacaacagatttgcagcccggccagtgatattgtagcatcttctaaacctgtatcaaaagatagaagtataattgctgccaaagaaggattgggtagagcaaaaattccaactgttccagtgaatacaaatgatacttcccttttaccaaagaagattaaaccacccgctagcaccatttctcagccatcgcgttctaatttgtcatctggtgctgaaaaatttaaatcaatcttcagagatttatctgatgacgaagatgatcctttagaacatgcacttgatagctgccgaaagccacaaattcgtttaacaaagtcatgcttattggttcctaaaagacaagtagtccagcttcctttgtctgctgaaaagagacatacttctggaagaccagatgctagttctcgaagactgaaacctcctaaactggacagctggtttaagaacatcttggaaatggattattttgctgttgttggtctaccttcttctgagataataaagaaacttgctttgaaagaaattccggtatgctttgattcacaagctcaatatgttgagattttccagccacttgttctagaagagttcaaagctcagttgcagaatgcttatgtagaaacccctgctgaagacatgaattgcggctccatatctatcctctcagttgaaagggttgatgagtttcttgttgtacgtggccgcccagataaaaacgactgtctgaaatccaaaaactgtatggagaatgatttaatattgctcagcaaggatccactgaatagctctggacagcaagttcatgtgcttggaaaggtggaccggcgtgagagtgataaaaccaaggcgttaattcttgtaataaagttctttctctctaatgagaatgcacgtctaaataaagtgaaacgtcttctcgttgaaagaattttgaagtcatcatacaatgacagccagcttgaagctgttagtattgctatcagatcaacaagcttgaaagcaaaattcgatctctctcttattcagggccctccaggtttgtcctttagttacgtttaccagcaatttgtcacaattccaggcataaacaaaggaaactttacacttgtgttttctgcagccaactcctcacaaagaaatgaatccttcgctagtgctgaatttaacaagccaagaccaaggctaagccaatctgttgcagtaactagagcttggcaggatgcagcccttgcaaaacaacttataaacgattctcagagagaagtcccaacagatcggctttcaaaaggaagggttttagtatgcgcgcagtcaaatgctgcagttgatgaacttgtgtcaagacttagcgaaggattgtatgacactgatggaaagctgtacaagccttatatagtacgggttggcaatgcgaagacagttcattctaattcagttcctttctttattgacacacttgttgagcaaagattggcagatgagttaaagaagaataatgatagcaaaagtttatctgatactgaatcctctagctcacttagggctaatttggaaaagattgtagacagaattagatactatgagttgaggcgaaaattattggaggctgataaaacagaaaatgactcacttgttcccagtgattacgagacagatgaagtttctgatgatgcaattggtgcaaagctcaactttctgtatgcacagaaaaggaaagtttctgccgaacttgccactgctcatgcacgtgaaaagaaaatagctgatgaaaacagatttcttaagcacaaagtgcgaaagtcaattcttggagaagcagaaattgttgtgacaacactcagtgggtgtggaggtgacatttatagtgtttgctcggaaaccgcttcagctaataaatttgtgaatttttctgagcatgctttgtttgacgttgttgtcattgatgaagctgcacaggctcttgagcctgcaactttgattccacttcagctactcaagtcgaaaggaactaaatgtataatggttggagatccaaagcagctacctgctacggtgatgtctggattggctagtaaatttctttatgagtgtagtatgtttgaacgcctacaacgagctggttatccagtgattatgctcaccaaacagtaccgaatgcatcctgaaatcagcagattcccatcgttgcatttctatgaaaataaattgctggatggtgctcaggctgctgacaagtcagctccattccatggtcatgactgtcttggtccatacatgttctttgacgtagctgacggccgtgagcagtgtgggaaaaatgctgctacacaatcgctctgtaatcaattcgaagcagaagctgcacttgaaatactgggatttttaaagaacagatatccatcagagttctcctgtaggaaaatagggatcataactccatataggagtcaactctctttactgcgttcaaggttcaattccttttttgggcctgaaattgttgcagagatggaaataaataccgtggatggatttcaaggtcgtgaagttgacatcttggtgttgtcgactgttagagcctctaattcatcagacagcagacatcacactggtgaagcgcgcagcattgggtttgttgcagacgtgagacgtatgaatgttgccttaacacgtgccaggttttctctatggatagttggaaatgcaaagacattgcagaccaattcacattgggcttctttattacagaatgctaaagaacggaatctgttcatctcagttaataggccataccgttcgttgtttgagaaagttcgttcacattcagaagatattcatggttctaggcatacctactatacaagtcattgtaagaagaaggaaagtggaaaaaccagtatgaccaactcacagaaaattgatgcacgaccccacaaagaacatgcaagacatactgtcaggactgtggaaacagcaaatgaacgtttaccaaatgaccaagcaaaaagagcatcacgctgggatcggaagagtccaaaagctcatgaacccttccatagaaaatctagcaaggaaaaggaaccagtaattcaggatactgaccaggacaatgcggtgagaaaggaaaaggaaggagaagggctgactatccataatgataatagcctggagcttgctaatgttataaggcagagggaactgaataaacctgtcaaaccgaatattcatacagatgctggtaagaccttatgtaaccaagattctcttcagaattctgaggttagaaaggatgtcaacaaaaaatatgataatggaaatgtgaagggctcacaaaatcatgatacaaaagcaacagtcatgaaaattgatgcttctccaccagcacaagacatgcagaagttaatacaaaaggctaaaggagcaaggaagttctctgaaaaaccaagatttggtaattcgagtcaagttgattcctcagttaaacatgaggcaactctggaatcagccaataagaatggtggtgcttgtacaccaacaaactcagaaatgaagaaaatggccggaagcgacaacgggaggatattgagtcattactttcatcagctcttgtatcatcaaagaagccttcttcaaagtgtccttccaagaaacaaaaatgagatcctgcagcaaagagggggaatccttccatttggaagtcagtattgttga

SEQ ID NO: 37597 - DNA, 1494 bp, Oryza sativa
  Clone ID: PAT_MRT4530_41311C.1
ctctctcatcccctctctctctctctctctcttgtttctctctctctttctctctctcactagacccatctctagaaagataaaggagctatgaaagaaagctctaaaaaaaggccatgagaccttaaagattgacctgagatttgcacaggaaatttgcaacaacaacaacacaacgagatatatcaccttgatatatatatctgttgcaattgcaagaaaaattcttttctccccttgcaattattctgtgctcatctcaatcaagctagcatgctgagtagtggaggggagttgaagagctcctccttggtgcagcagatggtgtgggttggcacgggcaacagcagcagcagcagcatcatgggcagcttgaggcagctgccttgttctgaggagcaagatgcagcttcgtctccagcctccatgctctttctcccccagcagctgctgcttcatgcatcttctaattcatcgccatgtctgaacattcctgaggtgaatctcagcactggtcttcatcctcttgggagcttccatggcgatgtgcagcagcaggagatcatcagcggcatgccagatcagtcatggagacaactgcttcttggtggattagttggagatcacgagaaatacagtgtggccacagctctcctgtccaaagggctagatgatgaggcctctatgcctcacgaggcatcagctgctgcttatgatttctatggacatggcggcggcgccggcgatgggatcctgcaggcatcgccggaggccagcagctgcaagtcgcagctgagccagatgctcctgcaggcggcggcatcctctcctaggtcatgcgtcaccaccagcggcctcggcagcagcatgatggatttctccaacaccgcggcggtggcgccggcggcggagccggagttgacgaggaaacaccatgcaggccagtcagataactcgtcggagtgtaacagcacagagacaggttcagctcttaagaaggctagggttcaagcctcttcttcagcgcaatctaccctaaaggtcaggaaggagaggcttggggacagaataacagctcttcaccagatagtttccccatttggcaagactgacactgcatccgtactgcaagagaccattggttacattagattcctcctgggtcaaattgaggctctcagctacccatacttggggcaatgctgctctgcgaaccccatgcaacagcaaactggaataatggcaggagaaaggagcactgatggcctcttcccggagttcccagctggccaggatgcagaaaaggatggaaagaagcaacaggcgaagaaggacgacgacctgaggagcagagggctgtgcctggtcccggtctcgtgcatgccccacctggccgccgacaacgacgtcgtcgtcggctccgacttctgggccgccgccggcggcggcggcggcggcggcgcgccgcccctcgccggcatgaacctgcggtag

SEQ ID NO: 37598 - DNA, 2214 bp, Oryza sativa
  Clone ID: PAT_MRT4530_41312C.1
atgtttcgacaccctgacatctctggaatcttgagaattattctcagtgaagttagcgccgaaccttatggcaacactgaatcaggggacatacaacaactcattagaaaaatcactacttcccttaagaacaaaaggtatcttattgtgattgatgacttatggaatatagaaagttggaaaattattagatgtgctttttcaagaagtattactggcagccgaatcatcacaaccacacgtataaatgaagtagctgaatcttgctgcttcccacatgtgcatcgggtatataaattaaggcctcttcattttgttgattcaaaaaggttgtttctgaagagaatttttggtctggaggaatgtccatcacacctgactgaagtttgttgtaacatattggcaaaatgtgatggtttacccttggcaactattgcaatatccagtttattggctacaaaagcaccgacagaagatcaatggaatcaagtggaaaagtcaattggttatgcattggaaagaaacgaggatgtcaatggaatgataaggatactgtcgcttagttactttgatcttcctcataacttgcgtacatgtctattatatctatgtacatttccagaagattatattattcataaaaaacggttggttagaagatggattgcagagggatttattcacgaggaacatggacatacattatatgaattggggcagaggtgtttcaatgagctgatcaatagaagtttgattgagccaaggtatattggcaagttcggtgaggtgaaatcctgtcgagttcatgatacgattcttgatttcatccggtcaaagtctattgaagagaacttcgtaaccttgttaggaattcctaacgttcctattgatcggcagaagaaggtccggcggctatccctccttgttaatactgaagagtattatagcagtttggaggagaataacataaaatatgtcctggataaaaaagaagatgatagcaatgagcaggaagataacagtaacggttttcatatcctaaaaaagttgaatttgtgcaatgctcgattgctaactatttttccacattctgtgaaagtcccatctttgttgcagtttaggcggttgcgtgtgctcgactttgaaggctgtgagcagttagaaaatcatcaccttgcaaatatagagaatttattgcacctgaagtacctcagcatcaaagatacaattgttaatgtgcttccgactcagataacaagactacgatgtttacagacattgaatgtagatgtaagaggggcaattaacattccaacacatatttatcgacttcgacaactgacttatctacttgttgatatgagatgtcaactgccggataaaattgggaacatgcaagcattgcaagagctcaaagttgtgaatgtgcttgcgcagtcactgaacacgctgcaaggacttggtaaattaacaaacctgaggaagcttagtatatttatgcctggccatcacgctgatgcggcagaaagatacaagggtcatatgaaagcaatgatctcttccatatgtaagctaggcagagacaaccttcattgtctaacaattcatatttcatccgtatcagcagatgacttcatccaggaaccatggtgccctcctccattgagtcttcaagaacttgtcatcaatcaggcgccaatgtctagggttccaagatggattggctcacttgtcaacctccaacgattaggtttatatctgaaggaactctcgcaagaagatgtcagtacactgggaggactgccagccctgctctctctcattctctatgtggaagaagtaattacagaggagggaggaaggcttaggatcagcagcagttatggattcccatccttggaacgtatccgaatcggtggggaaagttgcaggcttgagttgacttttgaaattgggtgcttgccgaagctacaacaactgaacctcgaatgcatggtagcagaagaaaaccacaccagcagcagtaatgttgtgtttggcatagagcatctgtcccgcctcacaaccatatattgctgtattcattacaagtatgaaaccagactggccaaggtggctatgctggctgcattggagagatcaatcatcagccatcccaaccaacccacatttacaaaggaggaatatggtgattttgtagatgagtcctgttga

SEQ ID NO: 37599 - DNA, 987 bp, Oryza sativa
  Clone ID: PAT_MRT4530_41313C.1
atggcgctcactatggttagtctcgccgccatcgccgggaagcccaccgcggcgtcggctcagctcgtcgccgaggggagggagtcggcggcccgcctgtatgccctgctggtcggctcgtcggcgctccacggccctgtgggcctcgccgagcagatcctcctctgcttcgaccgcgcgctcgccaagctgcacggcgtcaacctcgccggagctgaggacgacgacgacgctgccggcaacggcaacggcaggaagcgcaagccggggcgtggtcgtggcttgactgccgcttcagctgcagcgagctccaaaaggatgagggtgagcaatgctggaggaaatggagcaaggattgagaggaaagcgacaatggatgacaaatttctgtggaggaagtacgggcagaaggagatcaagaacagcaagcacccgaggttttactaccggtgcagctacaaggacgaccatggctgcacggcgacgaagcaagtccagcagtcggagacggcggacgacgacactgcctcgcccgtctacatcatcacctacttcggcgagcacacctgccgccatggggacgacgccgccgccatggtcgtcgacggcggcgaggaggaggatcagctctcgccggcgcagatggtcatcagcttcgcttccagcaacggcggcgatgcttctgtgtcctggccgtgctccggcgacgacgcccagaacaacagcgagacatcgcatgaatcgagcccgccggaggcgccggccggcgaggaagaacgtctgcggccgtgcacagccgccggcgtgtctgacgaaccgatcatggagtcaacgccgccggcgccggagcttcttgcggatctgaagcccatggatgggtgcctccttgacggcgagagcttgtttggcatggatgaactcgtctactttcatgagctctcagctgctctcggcctactcgatcgagactggggtgcgccagtatag

SEQ ID NO: 37600 - DNA, 231 bp, Oryza sativa
  Clone ID: PAT_MRT4530_41314C.1
atgcctcagtatggtagtgccgacttgggagtaaatcaattgggacgacccagacaagcacctacgatctcaccggagcacagtgtaacagaacagcacaaccccggactggaacccgagctgagggagtctcagactggagccccgcatccacccgagcaccacatcagcgcggcgcgggaggggagtaagcgagggcacaccccggaccacccaccgcgcgccgtgtga

SEQ ID NO: 37601 - DNA, 4957 bp, Oryza sativa
  Clone ID: PAT_MRT4530_41315C.1
aagcagggaaaaaacttgcatttatcaaacttcacattctgatctatcctttatgtcataccagttcgtttgggaactaaaacaccataatcacacaaaatgcagaagcctaataccatcaccagaccagcatctttagcaacaaccagatgcatagaacagtgaaataaaccaaaggtttccataatttaacagctataccatactactaccctgtctaaaccccataaagtaaaacacagcacaaaactgtacactcaaatatctagagaagcaatgaagtgttcatgccaggtttctctggcagaaactgcttcatctcaagagcctggttgctagtcactacaccagggagcccaagagacagagacagcggtccatcatctcctgtatcagaaccggtaagattatgcttctttgaggccatagaaagggacagtgacagtagaggagaagggccctcttcttccttcagtgatgtcttattcagattattacgaggttctggggagtcttcatcatctgaagataggacatggatcacatgatccaagattggtttagttggagaacagggatctgctggaaccctaccaatatattgcacatcatctaatgaagtatgctgatcagctggcaagggtatcttggacaagcatttgctagtcagttgaccatctccaaaactgcaagtagagtattttccctcagaggtcttttgccgtttgtagatggaactagaatcaggcaaaacaaagtcctttaaaactgaatcacttggatcatcagaaagctttggcctgacagaatgctgtggggatacttcttgaaaggatacgcgtgcctgtgtatttgccaatatctcatcagatactgatctggtggttgcacctgtatgctgcttagtaaagcatggaactccattcttggtaaagctctcttcctcctccatgttgtccctgcccgctgttccttcgctacctattatatcacttggatattctggtttaatgttgaggcattcacgttttgaacttgtgtgaacatgaactccatagggaactgcagtaggagttcctaacaaaattttcccagtccctgcagtttctgggaaatgtatttcacataaattcagcctttcagcctcatggttggacctcaacaaagtctcatggtttacagatgcaccacgattctccatctccgtttgaactgatacagctggatcatacaattcatcaacagggcactcattcaaatctatgcccaaagactgaggcatcttaggggaacagacaagttgattaacaggtccattaatttgttctaatggactatgattcatccctttgacaagcagctcagttgaactacttgcctttctggcataaaggacaccccaaaagaaaagtaagccattccaccgttgagtcctctcaggcagcttatcagacgtaaaaatgagaagttcaatgccacaaatatttgctgtgagggacaaatctccagcaagcatgttttccaacagtttcccatatgctctttcataactttcaacatctttagcaaagaaataaagagcaatgttatcttcattcggctttacttccttaaattgcagtggccatgaggaatgccgtggaacttctaccaactgaattctctgaggtaattgtttcactatttcaagtactttcagcgatgcacaggtagataagtgagcctgaaacccatcgtacatttcaggagagcttccaggtcttgaaacctcaaaggtaccttgccagatgtaagactgctctggaataactaaagcccccaaagaacttccaacagtagaagattgatcaaccaaagcttgctgctttaagttcaggtcattcgatttagtgtcagggctgtacggattttgtgccactagacagccttgtgggctctccggcaaaaggtcttcggaagcctgaatcgccgctgcacttttacaggagatgttcccatcactttccacaactttctgttcatactgtacctcttctggaggcaaatcttctgaggaacttgttggcgcaatatcttggaaatcagatccacaagtctttgaagcacgtggaatggaaagcacctcaggtttagttgacatttcattatcgttattcaccaaaattagtggactttcacatgcaccatctgtgctatcattttttattttatccattgggattagtggatctgatgccttcaccacacaggtgtctttagaacaaacaactcctgttgaagtaatcccttgctcatcacttttagataaaatggagctatgcttattttcaacaattcctggttttttgctacttttaagtatgcttggtccaggcctcgggctgtcttggtcatttcttggatcccctgattttattgaactatcaggccttggagatgaagaaatgtttggtttttgaagattaaatgaagcccccctttctaacaaaattgttggtttcacgggcttcaatattctcggttgttcattttgagatgaatgaactgattgcttttgctttgatgaacttgagcctttgcaaattgaagcctcatgcttaagaggcccagatttcataactttccggatggactctctaggatctcttggtgaatgttttgaaggcttcaacttgctcaacacaggttcagctaattgcttgacctttggttcattactggagttgttgaaagatggttgctttgataaaaggcctcgtggtgaaggacctggtgttttaacatttgccaagttccccaaggaatatgaccgaggtaaggtcacggaactattaactgcttgagacctcattggagcattatcaggcgactttatacttcctttgttagagcttttaaatgagttctccctggagaacacatcatgattcctagggctgtccgccttcaggagcctgggagtagaggataaagtattttctgcatatctcttgcatgatttaggtggactccgtacaccatcatttgatagaggtgattccatatcagtggcaactcgcaacttcttacgttttaacaacacttctgaactttgactcctcttgtctaagctttgattcttcttatccaagcttccagacgttggtgtcctacaagaggattgtcgtgcttccaagctagatgtaacaacttgcaacttcttgcgatttcccataattcctgaatttttgttcttcacatccagtctttcagcagttggggtggcacacttcacttgccgtgcttccagatcagatgacgcaagatgcaacttttgattgctaccagccaagggatcatttactggagtgccacaagtgatttgttgactgtccaaatcagtcacaacaaccttcaatgtcttagagttgtttgtactttctgaattttggttcttcccgtccaaaaccttattccttgatgtgccaccgttgcttcttgtttggttttcatcttctttaagacagcattcttcgcataaccattcaccatctggaactttctctaacttcactcgcatgcaataagtatgctctgccccttcaaggcacctagtgcatgtagccagaagatattcccttccaacatctccacatatatcacaaacattaacatctattaagccctctgaattcccagagtccgtcatcacatcattctgtgtattcaactttctaccactacctgtatccattgaacaaccttgattacgttcttgtttatcattgtcattcctattgacagcatcattagattggatgtcagcatgttctagacttccatttcttgagcatgaggtgccattttccagattctttgttaaagatccagccttgattttatccctattactggtaccacaactagtcatcatgctgtgcctctcaccaccaagcacagaaggatctgattttcctcccagtgaacgctctacggtcttgtttgaagaagctttctcacaaggttggtgagctaaattattttgtgcattcccaaattcatgtgttggtctcttaggagataatccatgtgatgcactgagagaggattgggtacgcagcaacctcttggttgcaaaaggagactcggcaggcaatgatctatcagatgaacttcggtgcatggcatgaacatcagatctcttctttcctgtagattcttcggcgcagtagtttcttagtctgttaatgccattgtccttatagttaacagtaaggtcacgacttgatgctgatgtagatagtttatcctttttcttgtctaacagaagcttgcttgctgctgatactccagtaacacatgagttgctatcatcatggcattctactataggtgatctagaaccgtgatttactagccttctacgttttgctggcttgtcaacctcggaatctgctgcaacagatgatcttgcgatgactttattttcaccattttcagaataggaagcagggcttgaagtagcactgaattcatcgtcattttctccccccttagccttggtacggagccctttatcaacacgaacaaacgaactgttttttgtttctgaccttgcaaagcatgtttgagatgatccacagtccatatttgaatccgtgagtgcaatatttcggtgtaggcacgaggagcaaggagcacaacagacattacaagtgccagattctgtcttcacattaggactgtcgagtggtactggtctttttcttgctgtaagcttgtcccttattgtagacagcattgtgggatcagaatcacctccaagcatctccatcttggcgaccacttcccgatgccccggcccctccacccgtcgtccactgccacgcccctccactgattcctcggggagcgcgagatccttgtgtcgcgtgcgatcgtagagatccctgacggtgcgctcctgcggcgccctcat

SEQ ID NO: 37602 - DNA, 305 bp, Oryza sativa
  Clone ID: PAT_MRT4530_41316C.1
ccgctgagatatataattatgaggtcagagtcactcatccactcgtttgcattaagtttcccatctctcctggtgcgaaccaaattaagaggtgctagatccaacccccccatggcccatcaccatgagccttgaacaacactcctaggttatttcaagatataaggcgaagagtcagtactacttacagacgacacctacatttggttccgggacagactatttcttctatggatggacagcagacgaccgatctgccctaccgggatcaatggcccagtccacatacaagcgaggacacacca

SEQ ID NO: 37603 - DNA, 414 bp, Oryza sativa
  Clone ID: PAT_MRT4530_41317C.1
gacccggactttttggtcctggtggagatgaagaacgaggcacaggccgttcgcgtccacgacctcactggcttctacctgtggatgaagaacgaaccggatgcctacgtgaccatggtggtcgtctgcttcaaagacctgctcggaccagcactagtcatatcccccattacttactgcatgcgccacatggacttcatgcacatcctcatggaggagcaggccaaggcaggcaagccacggacggagctgatggacatcactctctagatcgacaaggagaaccaggtgatggtggagctgaacgtgtacaggacgaactccaccgaggaggacagcctgatccgcacgcaagagttcgacaacgcgtgcatcgaggcacgactggagagctacagcggaacatgatccaga

SEQ ID NO: 37604 - DNA, 1269 bp, Oryza sativa
  Clone ID: PAT_MRT4530_41318C.1
cggacgcgtggggaaatacagacaactttccagtggagtggaactacaagcaaaaagaagggtcagaagtggggaatggacaactcaaacaagaaaagctctgatatcagctatcatgggaggataactggaactgacactgaagttaaccaccatgtggctggcaactctaagactagtgataatgattttggtttggccagtaatcaaaaggttggtgagagcagtcatgttggatcagcaagtgaaaagattgttgctgagaaagggaagtctagcagtgaacctttagattttgacagcctgtatcccctaacacgacttcccaaggaaggagatctgattgtttatcggttggttgaactgtcttcctcttggtgtccagagctttcttcataccgtgttggcaaagttcttatatatgatcccatatctttgaggatcattctcttacctgttcctgagtatccgttcactgctggagaaaagaatggtgaagacgagtcagagatgctggtggacatgtcaccttacaaggaagatggttccttggagatcgagtactcttcgcttcttgatattagactgctcaaggacactgattccgtgcaaccggctgttagtactcccctgacagaaacaggcattaaaggtggatcccatgcccaaaagccagctaatttagataatcataaaggtaaaattcacagcgaaaaactgccaaacaacaccaaagatccagaagccacgcaagaaaaaacacaaaacacggtctgggaggaaaatggagaggtcgcaaatgacgagcctgctgttcaggaaaatggctggggaacttggacaccaaatgccagtacatctgcttggtcatatagagcactaaggagcagtgcccttggtccaacacttgcacatttgagaggaaaaaataccaagaggggtagaccttacaatcggaagtatggcaagtgaggttgctgtatgtaatcgccgcttggcctgttcttttgtagtttttgtttgtatgtaatggtgggctgagctaggattgctatgttactgcctgttcatggcgatatgggatctgaatctaagacacctaaattagtccctagagaagggttctaaactgttgagctctgacatttatgtgaaactggagttcaacaagtctgttaaagatggatgccattaggcacctggttggtaagattgcattagaagcgttattggcaacgagctgcaaataaattagatcacacttggctt

SEQ ID NO: 37605 - DNA, 435 bp, Oryza sativa
  Clone ID: PAT_MRT4530_41319C.1
agttcacaggacacttaattccaaattactccagtcagcattggccttcatgaattgacggcacaaaaaggttcaacacattcaagtggtttagctttcaaaacatttcgaaacctatagaaaatcacttaaaacactcggtacccctttcccatggtgctctgcaagtacaagcacctaacgttctggcaattatttttcaaaaggtaaacaaggaagttgacgctaatctgcacttcttggatgctcttttctatctgcatggcctggatacaagcccacacgtccatgccgtgacccttattcagcccaaatttcactgtagccttaggataaataaccttggactcaagtgatgcttgctgctgatcctgccatggctgaactgcctcgttgccttaatccttgtcataccattcttggacgatcttaaac

SEQ ID NO: 37606 - DNA, 1257 bp, Oryza sativa
  Clone ID: PAT_MRT4530_4131C.1
atggctgccgcggcgggggtggctgctggaacgggaagaggtagcggggagggagaggagctgctccccaacgccgtggagggagacggcggctgcggcgggggcggcacgtgcgcgggggaccgcccgtggcggctcaacttcgacggcctccgccgcccggaggcgcaccaggagaagccgccgcgccgcttccatgaccgcctcggagggctagctgaagatattatattgaaaggcggaaagcgtacacatcctgagacctgttttcttaagaaattgttgtacccttttgatgctgtgctcaggaatctggatatttcagttcaaagccctggagatgatgttgcagaatattaccagcaacagtcggaattgttggaaggttttaatgaaatggatacactcacagatcgtggttttcttcctggaatgtccaaggtctacattcttgctctagaagaatgtgaaaaagttgccagaagtgaggcattagccatccggttatctaatatagcaaacatggttctttttgctgcaaaagtttatgcctcaataaggagtggttctctagctataattgcctccactttggattctctacttgacttgttatcaggttttatcttgtggtttactgccttttcaaagaaaacatcaaatccatacaggtacccaattggtaaaagacgcatgcaacctttgggaatacttgtttttgcttctgttatggcaacgcttggccttcaaattatcctagaatctacacgctcattgttttatgatggggatactttccgcttgacaaaagagcaggagaagtgggttgtggatatcatgctttctgttacatcggtgaagctcctactggttgtatattgccgttcattcaccaatgaaattctggcgatctacacaatcagaacatggtcaatgacggtgctagaaaacgtccactccttggttggccaatcggcttcaccagagtaccttcagaagcttacctacctgtgctggaaccatcacaaggctgtcaggcacatcgacacagtgcgagcatatacattcggctcccactactttgttgaggtggatattgttctgccatgtgacatgcccttgcaggaagcgcatgatatcggcgaggctccgcaagagaagctggagagcttgcccgagattgagcgggcttttgtccatctcgactacgagttcacccaccagcctgagcatgctcgatcccatgatacattatag

SEQ ID NO: 37607 - DNA, 201 bp, Oryza sativa
  Clone ID: PAT_MRT4530_41320C.1
tactgtttttttcaacacatgataagctaattgcttttcattcatccatgttttttttgggatggtctgaacaaggtttgaaatcactgatactaaactaacctagggatacaccgatacctgtcgggggggccttcttttcaaaaaagggcaatttttttgctgtccaaatatttggcccctactccaagcatcaaaact

SEQ ID NO: 37608 - DNA, 2112 bp, Oryza sativa
  Clone ID: PAT_MRT4530_41321C.1
tataaggacagatttgagtctctgctgtttcctctttttttctttctgcgttgggcagacattattttttttttttttttttaactcggaaattattttttatttgattatacaagaatggatacagtgtaactctaccagatcatgtatagaagaaatgcacatgactgatgatatcttcatttacaaatacccaccatattgagaaagagggtacacaacaactaaagtgtctatgccaattccaaaacgtattcaatatcttgccgaatgcattcttgacaagcttaatatattgtggagtagtagataattgattggcatttcatagtttggatgtggcaagcttaataagatccttcctcagtatcttcccggatgcattcttgggaatgtccgtcacaaacgccacctttctaaccttcttgtaaggcgcaacctgttttgccacaaactccatcacctcgcgctctgacaagttgcttcctttcttcctcactatataggccatcgggaactggccgacctccctatcaggaaacggtataacggcaacatccgtaacctctgggtgcgtcaacaaaagagcttccagttctgccggaggcacctggtaacctttgtatttgatcaactccttgaggcggtccactacgaagagatatccatcctcatctatgtagcagagatcaccggtctttagccatccatctggtgtcagcgttgactgtgttgcctctgcgttcttgaagtagctgattccatgaaactcattctgaataaatatgcttgcaactttcatgacgtacggtccacggatccagagctcgccggtgcggtttaccggcagcgcctcgccggaatctgggtcgacaatcttagcctcggtattgggagacagaagcccggccgtcccgtaccggcggctctcctcggcggagtccgtggacgcgccgatggcggtgctctctgtcagcccgtacccctgcaggatctccacctgcggatacttctccctgaacccttcgatcagctccttgcccagcggcgcgccgccggatagcaccttgcgcatctgcccgagcgggagcggcttcgggtgcgccaccatggcgaccaggatcggcggcacgagcggaaggtaggtcaccccgtaggcgttgatcgagcgcagcatctccgggagctcgtacttggagagcacgaccaccgtggcgccgcaaccgagcagccccgtggcgaaggcgacgaggccgtagacgtggaacatgggcaccgtgcagaggaatgtctctgtcttgtccgagccctcgaggcggaatcgcgtcatgatgatctggaccatggagatgaggctccggtgcgtggcgacgacgcccttgcttggccccgtcgtccccgaggagtagagcagggtggccggatcgtcctgcgtgacgcggtccttgcggcgcgccgggtcgggcgtcgtggcggagatctcctcgatggtggcgacgatccgcgggtcggagctgtcgccggggaggcgggcggattccaggaggacgacgcggaggtcgtgggcacgcgggagcttggggaggagctcgcgggtggtgaaggcgaggacggggcgggcgtcggcgacctgcttggcgatctcggcgggggtattgagcgggttggcggtggtgaggacggcgccaagcgacatggcggcgagggcggcgacggggaagtggacggagttaggggagaggatgagcgcgacgtggcccttgcggagggagacggggtgcgcggcgagggcggatgccgccccggccacggcgcgccagagctcggtgaaggtgatccggcgcccagtcgcggcgtcgacgagggccacaacgcccgagtggcggcgcgaggcgaggaagctgaccacgtcgacctccgggtcggcgggcagcggcacgtcggcgcgcctgctccggaacgtgcgggtggcggcgcagtagccgctgcgcgcgtccacctccatctccggtgagcgtcccatcgcgatcagacccacagatcaccgagctccagccaactgccccttgcagttgctacctgcgtttgtttccggtgtcgcgtcgcggctgt

SEQ ID NO: 37609 - DNA, 194 bp, Oryza sativa
  unsure (1)..(194): unsure at all n locations
  Clone ID: PAT_MRT4530_41322C.1
aattcggcamgagctcaataacmncaacaacggaacaaacaagacaagacaagacaagcaattgggtgacaacmgggtgaggaagaagartgatgacmtttcgattggtttcttggaggcaaacaacagaaacaaaaaactgatatatagtttccttgcatttgttcgatcacgttgctactagctaagcttac

SEQ ID NO: 37610 - DNA, 416 bp, Oryza sativa
  Clone ID: PAT_MRT4530_41324C.1
tccacgcgtccgtgctgttattcttggtgtctcgtcgtctgtctggggggtggtgtttttatgctagagggtcgatctgattcaaaggaggtgctaaaagcttcaatacctgaaaatttagtttgtgaattttaatttcgttgaaatgctgatacaaattttatatttattgtatgtatacctataattttttattgtttattaaattaaattacttactatatttttaatctattatattacttcatatatatactagttaatattttttaaatctattttatttttttattaataatatttatcttttataacataatttaattttcttatattttaattttataatttattttatttttttaagaatatttttaaaaaattttactttacctctaaatttttatatattatat

SEQ ID NO: 37611 - DNA, 996 bp, Oryza sativa
  Clone ID: PAT_MRT4530_41325C.1
ctcatttgagcatcggatttatgatattgacatggggtttgcccgatctggtagttcacggaatcaaatgccaaaatatcaatcactgaagaatcaggatatgtcaagcttaaatgtccaaaaagagcatgaaaattaactggcccagaaaacacatgccatccgagctgttgaagctccaaaacagtctacgtggcagggcttgctcaaacaagaaattagctgcaaaacaaattaacaataatcacaaagaacatctatcttttgtaagggatccagaacagatgccacgtccgcaggttaactcaaacaaagagtttgagactgttggcaaatccagccaattattgccacgggtacagctctctcttcataacgacagaagccttacagcatctacttgtcagtcctcattccctgtgacaaaaggatctactcaattcaacgacttggagatgccttcactagaaaatattgagtttggaactttggggtctttttcattgacacttgtgtcaccaaaatcgaataagaatcccaacacacactcaaccagtaagacatgtgccgatgctgctgcattggcattgcaaagccatccaacacaaagcaggtcaccaggattctacaaagttggagatgaagatcacttcccacctctccgtgctgggactcgctgagactttcggtacatacacagatgatacagttgatcataggtttagagaactaaaaggtaaagagaagagctaacaggttgagcttttttcataacctcaggagagcgcaaatgcgaggattctaatagcatatatattcgtccatgtaaagttctgtcgatctcttgtcctcctcaattgtctatagttaggccaagaaggctaatgggtagcaactaattataccattgtagttcttttaccttaagtttaacttgaaagaagaaaaaatcgggggaatatgttagcttaaaaaaaagcaaaatattattgctct

SEQ ID NO: 37612 - DNA, 387 bp, Oryza sativa
  Clone ID: PAT_MRT4530_41326C.1
tggatcccccgggctgcaggccccgtggcgtccttcacccaccacaactcctccagcgagtcggggactcggggtagatcgtagaaatacggagtatacatacgtacaccgctacatttctagattacagtatttacagatacgtgggcaacgtgatcacgcagcttattagcatttgttaagtgcgtagttcgttcgttcgttgattgattgtgttgaattaattgagaggggctaaagatagtagtagtggttggttggtgcggttgcggcgggtgatcgaacgatggaggtgtgctgctgctcgacgtcgtcggccgtgcccgggaggaggttcgcggcggccggggcggcggcggcggcggtggcggcgaggtggggcgccgt

SEQ ID NO: 37613 - DNA, 449 bp, Oryza sativa
  Clone ID: PAT_MRT4530_41327C.1
tctaagaaaaccgagcaagctcagctcaactgtcacggtgtcacctgtcagcgcccacaactgctcgctccgtcctccaaagcccgcgagatccaaagccgaacgccactagctagctgagagagaagcgccggccggcgagggggctagcgcgcgggaatggcggcgggcggaggcggcggctacagggcggaggacgactactactacctgttcaagacggtgctcatcggcgactccggcgtgggcaagtccaacctgctgacgcgtttcaccaagaacgagttttgccttgagtccaagtccaccatcggggacgagttcgccacccgcagcatccaggtcgaccgcaaggtcgtcaaggcccagatttgggacaaccgcggccaggaaagataccgagctttacaagtgcctattacagaggagcaataggtgcactgcttgcc

SEQ ID NO: 37614 - DNA, 2063 bp, Oryza sativa
  Clone ID: PAT_MRT4530_41328C.1
gtgtaatggataatttggatgtactttgtatccggtttcactttggtggggaatttgattatgatggatattctgtggtttataatggtggtcaaactgagatgtcatacatagagagggacaaggtggcattgccagagatcaaaggataccttggagaccatgttttactaagtgaagaagatgaagtgattttccattggttatttccaggtgctgaactaaacaatggcctgaaagcactatcagatgataaggaatgcttatatatggctcaatgcataatcatgggtgatcacaatgaagatgataatgttgtgcttagcaatggtgtcagtgatgacagtgatgttgaagatgacattgaggaagaatatgacagtcatagtgatgctgaagattctagtgaaacagatggtattgctgaagatgatgaggagagatctgaagatgatgaggaagcacaagaaaatagacagcatgccaacaaggttaagaagaatccatgtgccactattactgtaaccagtgacaacgctgttcttgtcagtgacccaccaaataaacaagatgataagggactggatgatgacactgatacaccatttctggactcaagtgaagaagcctcttatgatgatgcagaagatggtgaagcaataagaaggaagagtagatttccaaagtatgatagcaaagcacacacacctaagtttgaaataggcatgacatttgcaggaagagcaaagtttaaggaagcagtaatcaagtatggtcttgtaaccaacaggcatatcagattccccaaggatgaagctaagaagatcagagctagatgttcatggaaagattgtccatggttcatatttgcctcaaatggaacaaactgtgattggtttcaggtgaaaaccttcaatgatgtgcacaattgccttaagagaagagataacagattggttactagccgaagaattgctgataagtacgagcacatcatcaagtctaatccatcatggaaactgcaaagtttgaagaagacagtgaggctggatatgtttgctgatgtgtccatctcgaaagttaagagagctaagggtattgtcatgagaaggatttatgatgcatgcagaggtgagtactctaaagtgtttgagtaccaagcagaaattcttaggagtaatcctggtagcacggtggctatttgtttggatcatgaatacaattggccggttttccagagaatgtatggacttgtaagtgcagttgaggaatttttgccacaaattgagcacaggatgtgcactagacacatctatgctaattggaggaagaagtatagggatcaagcattccagaagccattttggaagtgtgccaaggcatcttgtagaccatttttcaacttttgtagagccaagcttgcacagctaactcctgctggtgccaaggacatgatgagcactgaacctatgcactggagtagagcttggtttaggatagggtccaattgtgatagtgtagacaacaatatgtgtgagagcttcaataattggataattgacatcagggcacatccaatcatatctatgtttgagggcataaggaccaaggtttatgtgaggatacaacagaacaagagcaaagcaaaaggatggctaggtaggatatgtccaaatatcttgaagaagttgaacaagtacattgacttatctggaaactgtgaagccatttggaatggaaaagatggatttgaggtcactgataaggataagagatacacaattgaccttgagaagagaacatgttcctgtaggtattggcaattggcaggtattccttgtgcacatgctataactgcattatttgtgagctcaaagcaacctgaagattacatagcagattgctacagtgttgaggtgtataacaaaatatatgaccattgcatgatgccaatggagggtatgatgcagtggccaattactagtcatccaaagccaggaccaccaggttatgtcaagatgccaggaaggccacggaaagagaggaggagggatccattggaa

SEQ ID NO: 37615 - DNA, 2316 bp, Oryza sativa
  Clone ID: PAT_MRT4530_41329C.1
atgaccggcaaagagggtgggctcaatcgacgcgtgatcactgcggcgaccgaggaggaggatgaggaggcggcattggccagtgagaagatatcaatgaaggcgtgctctgctcgaggcacggcggccgagaaggcgagctggttgacaagatactggccatcaagaggaccctccacatcgacgatcctggaagaggagcccaaccctctggtgccgccggagctggaggagaagctcaacgaggacgcgcgcttaacggccgagacgctctatgcccgccaggacaagcttgtccagtgccagaccatgatccggaaccattggccatcgccacgagaagggctacaccatggtgtaatggataatttggatgtactttgtatccggtttcactttggtggggaatttgattatgatggatattctgtggtttataatggtggtcaaactgagatgtcatacatagagagggacaaggtggcattgccagagatcagaggataccttggagaccatgtttcactaagtgaagaagatgaagtgattttccattggttatttccgggtgctgaactaaacaatggcctgaaagcactatcagatgataaggaatgcttatatatggctcaatgcataatcatgggtgatgtagctgaaatatatgctgaaatactcaagcacaacgaagatgataatgttgtgcttagcaatggagtcagtgatgacagtgatgttgaagatgacattgaggaagaatatgacagtcatagtgatgctgaagattctagtgaaacagatggtatagctgaagatgatgaggagagatctgaagatgatgaggaagcacaagaaaatagagagcatgccaacaaggttaagaagaatccatgtgccactattactgtaaccagtgacaacgttgttcttgtcagtgactcaccaaataaacaagatgataagggactggatgatgacactgatacaccatttctggactcaagtgaagaagcctcttatgatgatgcagaagatggtgaagcaataagaaggaagagtagatttccaaagtatgatagcaaagcacacacacctaagtttgaaataggcatgacatttgcaggaagagcaaagtttaaggaagcagtaatcaagtatggtcttgtaaccaacaggcatatcagattccccaaggatgaagctaagaagatcagagctagatgttcatggaaagattgtccatggttcatatttgcctcaaatggaacaaactgtgattggtttcagggtgcttgcaatggtgagctgctatgtgcattaggaagagaccccaacaaccaaatgtatccaatagcatgggcagtagtcgagaaagagacaaaagacacttggagttggtttattggactacttcaaaaagatctgaatattgatcctcatggagctggttgggttattatttctgatcaacaaaagggacttgtaagtgcagttgaggaatttttgccacaaattgagcacaggatgtgcactagacacatctatgctaattggaggaagaagtatagggatcaagcattccagaagccattttggaagtgtgccaaggcatcttgtagaccatttttcaacttttgtagagccaagcttgcacagctaactcctgctggtgccaaggacatgatgagcactgaacctatgcactggagtagagcttggtttaggatagggtccaattgtgatagtgtagacaacaatatgtgtgagagcttcaataattggataattgacatcagggcacatccaatcatatctatgtttgagggcataaggaccaaggtttatgtcaggatacaacagaacaggagcaaagcaaaaggatggctaggtaggatatgtccaaatatcttgaagaagttgaacaagtacattgacttatctggaaactgtgaagccatttggaatggaaaagatggatttgaggtcactgataaggataagagatacacagttgaccttgagaagagaacatgttcctgtaggtattggcaattggcaggtattccttgtgcacatgctattactgcattatttgtgagctcaaagcaacctgaagattacatagcagattgctacagtgttgaggttcaggaatgtagcaggccgcacaaaaggtttaggccatctgtagctgcaggaacttcgcagcaaaaagttcatgtgcagattgatttgccatcccagagcagcagcttgtcaataacaaagaagggacaaacgatgaaagttgcaagaacaaacacaacaaagaagtga

SEQ ID NO: 37616 - DNA, 405 bp, Oryza sativa
  Clone ID: PAT_MRT4530_4132C.1
ggggggggaaaaacactgattgctggggagccgaaccaattttcccttggcattggcctctaccagggggggggggtaaaccctcaagccctcaacccccggggaaaatacccctgcctctcttaagggttcaacaaaggggccccccattgatctttactggaaacccccctggaaaacttgaataccaaaaaggctcccgcgacaaaaaacccgagcccccttcaccccctgggggaagagggggggccaacacccaaacccccccccccacccggtccaaagcccgggttacccccaaaacccccgaaagaaggcgggaattttggaggagccccacccttttcaccaccaaaaatacccggccccccccgggggcccccacgggagccctcccgggctcca

SEQ ID NO: 37617 - DNA, 177 bp, Oryza sativa
  Clone ID: PAT_MRT4530_41330C.1
tcgtttcgcccattttttttttttttttttgagcgttgtttaatcatattcccagtcgcaggcacaacgacatgattaaacttattaaagaaattttacatattgcactttaacacttgatgatcgtggtcgaaaagggtaaattcttaaacacgtaccaacccccctcttaccaaa

SEQ ID NO: 37618 - DNA, 1773 bp, Oryza sativa
  Clone ID: PAT_MRT4530_41331C.1
atgtggcggcttaggagcgattgtgtaatggataatttggatgtactttgtatccggtttcactttggtggggaatttgattatgatggatattctgtggtttataatggtggtcaaactgagatgtcatacatagagagggacaaggtggcattgccagagatcagaggataccttggagaccatgtttcactaagtgaagaagatgaagtgattttccattggttatttccgggtgctgaactaaacaatggcctgaaagcactatcagatgataaggaatgcttatatatggctcaatgcataatcatgggtgatgtagctgaaatatatgctgaaatactcaagcacaacgaagatgataatgttgtgcttagcaatggagtcagtgatgacagtgatgttgaagatgacattgaggaagaatatgacagtcatagtgatgctgaagattctagtgaaacagatggtatagctgaagatgatgaggagagatctgaagatgatgaggaagcacaagaaaatagagagcatgccaacaaggttaagaagaatccatgtgccactattactgtaaccagtgacaacgttgttcttgtcagtgactcaccaaataaacaagatgataagggactggatgatgacactgatacaccatttctggactcaagtgaagaagcctcttatgatgatgcagaagatggtgaagcaataagaaggaagagtagatttccaaagtatgatagcaaagcacacacacctaagtttgaaataggcatgacatttgcaggaagagcaaagtttaaggaagcagtaatcaagtatggtcttgtaaccaacaggcatatcagattccccaaggatgaagctaagaagatcagagctagatgttcatggaaagattgtccatggttcatatttgcctcaaatggaacaaactgtgattggtttcaggtgaaaaccttcaatgatgtgcacaattgccctaagagaagagataacagattggttactagccgaagaattgctgataagtacgagcacatcatcaagtctaatccatcatggaaactgcaaagtttgaagaagacagtgaggctggatatgtttgctgatgtgtccatctcgaaagttaagagagctaagggtattgtcatgagaaggatttatgatgcatgtagaggtgagtactctaaagtgtttgagtaccaagcagaaattcttaggagtaatcctggtagcacggtggctatttgtttggatcatgaatacaattggccggttttccagagaatgtatgtatgttttgatgcttgcaagaaaggttttttagctggatgcagaaaagttataggactagatggttgttttttcaaaggtgcttgcaatggtgagctgctatgtgcattaggaagagaccccaacaaccaaatgtatccaatagcatgggcagtagtcgagaaagagacaaaagacacttggagttggtttattggactacttcaaaaagatctgaatattgatcctcatggagctggttgggttattatttctgatcaacaaaagggacttgtaagtgcagttgaggaatttttgccacaaattgagcacaggatgtgcactagacacatctatgctaattggaggaagaagtatagggatcaagcattccagaagccattttggaagtgtgccaaggcatcttgtagaccatttttcaacttttgtagagccaagcttaagtacttgtcaaatatttggtggaaatggtag

SEQ ID NO: 37619 - DNA, 399 bp, Oryza sativa
  Clone ID: PAT_MRT4530_41332C.1
atggagggcacgggagggagcggcggaaagaggaaaaaggtggaggggagtgcggggatggtttatatgggctcaggaggggcggacgaggccgggaggcagccggatttctcgccgacgtgggagaggtggggagagagagtggggagaggattcaaatcgaatcccgcccattctcgggtgcgcgcgagggcgggaaatggcgggacgtgggcggcgacgtggggagaggcgtggggcgcagagtgggcgcgggaggagcggggaaagcggcggtggcgtgacggttttggcggcggtggtggcggttgccggaggaggaagacagggccgacaggtgggccccacctgttggtgacccggggagaggagggaggcggcttgggccggcccagctga

SEQ ID NO: 37620 - DNA, 448 bp, Oryza sativa
  Clone ID: PAT_MRT4530_41333C.1
ccggggccactgcgtatccgagcaccctcccagagcgtcctcacgcaccttggtccacgacgcccacccctgcgtccatgactactccttggcgccccttgcgcgctctaccacctctatggctcggctacctcaacatcagcttcccaacttcggctacaccgaccatggctactctacgcacagcttcatcgaccatggctccatcgcacttttcgcttcggctacgtcgactatggtacaaagggctatcatccgtattgagcatttttgctggtttcttctccaatccaagtgtccgcacggctcacgcttgtactgcgggcttaagatccaatacatgtattcctatatataccgacccccaagcctcaatacaacgtgtcaatatttatagtatttctctccttgttttatgcaacattaataaacaatattatacttagaa

SEQ ID NO: 37621 - DNA, 389 bp, Oryza sativa
  Clone ID: PAT_MRT4530_41334C.1
cccacgcgttcgctgatgcattagcaaatgcatgaggagaggcacgagagcaggctcataggctcaggcatgacagaggagctgagactggcgtataaactacgatctaatacaacagctaccaagacgcggattacgtggaggaagcctctgcagttggcgatgcgcttaatgaataactaaataaattgctagctatagcgcaagcgatagcgtcggtgctatgtactgataaagtcacttataatagcagatgtcaatgctaaggacatccctcatgatggtgtgtctatgttcgagtgcactgtccaatgcattgtggagatccacttggagatgcatccatatgagagaccaccgtacggtcatctcctcccttatcttaaaaa

SEQ ID NO: 37622 - DNA, 354 bp, Oryza sativa
  Clone ID: PAT_MRT4530_41335C.1
atggagaaaatccattcacaatttcgacccagatgtacgagaaagattagagagaagaggaggcagcctagcaggggtggagccgtggaggtcgctgctgcagtcaccgatctgtgggcatcgtcccatcaccaagctgcgatcgtcaccatcaccgaacagaggactaggcggcgaactgcaactcccgagattaccagcaatggatctacccctcctgagcccattggcgtcaaattcgcttctcttgatcttgttgcagttgtcaccgttgcaatcgtcgccgtcgttggtgctatcgtcacgtgcagtagaggtagggaggctggagggagtagggagggtccagggtga

SEQ ID NO: 37623 - DNA, 486 bp, Oryza sativa
  Clone ID: PAT_MRT4530_41336C.1
ttgaggcggttccgtttgagcgcgacaaggtgtggtggggctctgtgtggttgttggttgggcgggatttggttggtcgctcgctcgggatgaagctgctgttgaggggaaactggtgatgttttagattcggttggtgttctgatgctaattccaaaaccttcgtgacatgggaagaggggaatagtaggggggagagagagaaaacctcaagtgtcaatatggtctctatgattgtctgcatagatgctggttttagtttgatttagggcaccttgatgtttgccttggtaatccctgatctaactgtaaggggtttcgagtttttaggattgactccagtctctatttttgaatatgcttaaagttcaaagaaagtatggagtgactatagtcccaattcttgacccaatactgacatcacttcatagctttttctatgaaagtaaacctagcattggctatggtggtattggcctataggta

SEQ ID NO: 37624 - DNA, 219 bp, Oryza sativa
  Clone ID: PAT_MRT4530_41337C.1
atgaggtcgccagctagcccaccccctgcgcacgcacgctgccgcaccatcgtgcttctcagccgctccgagtcccccatccatcatgcatggcgaggacgtgcggtgttttccctcctgcaccgcttcctcttccgcggctactcgcctcttcgcggtgccgcgaggaaccatcaagtacatccattagtgtcttgccttcgtcgatctatcaggtag

SEQ ID NO: 37625 - DNA, 432 bp, Oryza sativa
  unsure (1)..(432): unsure at all n locations
  Clone ID: PAT_MRT4530_41338C.1
aactgagaagctccatacaagtaagcagcagctagttgccgacaagggcagagaaggaagaagaagctctcatcatcatcaccatgtcgtgctgcggtggcaactgcggatgcggctccagcggccagtgcggcaacggctgcggcgtntgcaagtactctgaggtggaacccacgagcacggccacctnccttgncgatgcaaccaacaaggggnctgngngctgcttccgnaggatcanaggatgggggngcgggggaacggcnancngcggctngcaagcaccctgcaangnggcgggcaccaancnngcgggntgnanccctgnngngnaaagtngcangcgangnangnanacnngancnngccangccnagttccnncaccgnggtccancggaggttaccanggnannccagnnncngnnntgnt

SEQ ID NO: 37626 - DNA, 618 bp, Oryza sativa
  Clone ID: PAT_MRT4530_41339C.1
acctcaagggattgaagaaagcagaccagctaaccatactggaggacttcaacaagcatagccccgctatcaaacaccctgccgttgctccaacggttgcaccaccagttgccacttcatccgcccaccacattgcaccggtcaccaccccgaccgtttcgaccacaccaagcatggctaccttgacaggagctctggccaaccgggaggacgtgctcgcccgcgccgcggcgcttgggcggggcgcggccactacagggttcaagaggttccttgcgttgacagaggcggccaaagatcggaaggacgggccatttcgcaagctgttcaatgcttaggcttttttttttattattattttgctcgtgcttgttgttcatagttgcccgcgcctgcagtgcacatagatataggaaattttccccccacacacataaccttcggtgtataatgagctaacattttgatcccatcttgcggagtacgagtaattgaattgtattggaaaaaggtatcatcatagtttcagtaataatagtaggttctggggggggggcctgcagcccgggaaaaaaaaaaaaaaaaaaaaaaaaaaaaaaaaaaaaaactcgagggggg

SEQ ID NO: 37627 - DNA, 605 bp, Oryza sativa
  Clone ID: PAT_MRT4530_4133C.1
atggcacttaaggaccggtttgcgggatgccctggaagaacttatcgtacttaccacaagccagccgcatccaggcaagggtgggcgtgatggagtttggatgggccctgcggcggcctatgcggcttccggattcacctaggcacgagaggggactgcccgctgccttgcgaggagtgggggtgaaacctgaggtgcggcgtgcttggttagagggggttatgcgaagggtcctgtcacgtttagtctaatggaattgattagttcaggtggatggttaggcctgttgcaacgtggtgtagcgttggacagtggatggttaatattgattaattattacaattgttttactgctttcaactactgtttataaatgctcgctttatgcaaatgaactgctctagctatcctttgattataccctgcatcatacccctattccgatatgacttgctgagtatggtggttgtactcagtcttgctctattttccccaaaaccccagagttcgagtatgcgtcagatggtggcttttccgaggagtaggcttcgtccgtgccgtcgaggatgcctatggagtggtgttcccgctacagtcgaagtcaa

SEQ ID NO: 37628 - DNA, 269 bp, Oryza sativa
  Clone ID: PAT_MRT4530_41340C.1
cctcgagagaagagagagatgagagagagctccggtgagagcgctcgaagatggtgcagcggctgacctaccgaagcgcacactacccacgatatcaaccagaccgcgtgtaagaccccggggaggcttgtgtaccagtacccaagagcggcagcgcgcgaatccagtacggagagtcaggattcaactaactctggtcagagcaatgtagatggacgacgctacggttctctggctcgtaaaagactcgcttttgtcgcaagtgaggc

SEQ ID NO: 37629 - DNA, 1361 bp, Oryza sativa
  Clone ID: PAT_MRT4530_41341C.1
atgggcccgaccatgatcgagccatttgccacgaaaagaggtagcaaaagcgcgggaaaaccggttttccccgataaaccgcataaaccacctaccctacgcgccccaagagccccaagaggtactcggcctaagactaccctagaatttgacccagagacccagagaagagcagttatataccggcaggctgtgcacgagtgcgtccttcccctttctcgtcctccatcctcgcggcggcggcggcggcggaagcgaaccccgatggcactgagaggcggccacgcggcggcggctgctggggtaagctctgggtcgccctcctctggcaagaagcgcgcccgcgccgccggcaagctctccgacctcaacctcgtcgacgagcaggtgctgcgagcatccctcgctgagatccccccgaagcacgagagagaggtggaggctctggcgagaagctacaaggagcagtaccgcaactggctgttcgagctcaggtgcggatttgggctcctgatgtatggatttggatctaagaagatgttgcttgaggattttgcgtccacgaccttgagcgatttcaccgtcattgtggttaatggctatctcccttacatcaacttgaagcaagtcatagtgacaatagctgaaatattttagggacaaacaaaacttaagagaaaacgccagacagcacttggtaccttgtggcagacttttgatttctacatcaaagctcttaattctgccaaattttctgccttgttgccatttcaggtcatagtgacaatagctgaaatattttgggaacaaacaaaacttaagagaaaacgccagacagcaacaaggtcccagttgcagccatttgcatcccaatcaatagatgatattatctcctttctaaataaccagacatctgacaatggggatgacaatgtatgccttcttattcacaacatcgacggacctgccttgcgtgacgctgaatcacagcagtacctagctcaagtttggtgctgcccgcaagtccatgttgtcgcatcagtagatcatgttaatgcacctttgttatgggacaagaagatggtgcacacacagttcaagtggagctggtatcacgtcccaacgtttgcaccttacaaagttgaaggtatgcatttcagtagcttgtataccaaatgccgtgagcgttttcttgtaagcagtcaagtgacgctgaactcccacctgacggagtttaaagaccatgatctggtgaagatcagaaagcactctgatggccaagattgcctccacattcctcttgtttctgatgcgctggagaaattgcttcaggaattgacctgaaaaaaaaaaaaaaaaaa

SEQ ID NO: 37630 - DNA, 330 bp, Oryza sativa
  Clone ID: PAT_MRT4530_41342C.1
atgcgggcgatctcggcggcgccggcgggcatgctgcgggcgcggctccgcgggggcggaggcgacggcgcggggcggtggacgacgcccgggcacgaggagcggcccaaggggcacctcttcaaccggccgccgccgggggagtcgcggaagtgggaggactgggagcttccctgctacgtcacctccttcctcaccgtcgccatcctcggcgtcggcctcagcgccaagcccgacctcaccctcgagacgtgggcgcaccacaaggccctcgaccgcctccaggagaaggacctcgccgccgccggtcaggttccccgcgaactctag

SEQ ID NO: 37631 - DNA, 401 bp, Oryza sativa
  unsure (1)..(401): unsure at all n locations
  Clone ID: PAT_MRT4530_41343C.1
ctccttggggggtagacaatttcattccgagagatagcaacaagcatttgaaacaccataaccaaagcgaactctattcatggtaacattacggacgaagaacaccttacactggatggatggatagagggcttatctacttgagagagccactggccactataaccactagactagatgataagatgatcctgacacagaacgctctagataactgggcacgaagggcccccccaatggggtcctccagatgccgcatgtaaatcgatgggatccaatagcacgcggtgccatcgatcgatcggtcttccnattatacggggcctcggaagcgtgcgccttggaggcttttttcatctcattaccagcggccttcgtgaggtcagaggtccaaagggtca

SEQ ID NO: 37632 - DNA, 308 bp, Oryza sativa
  Clone ID: PAT_MRT4530_41344C.1
ccggccgggcccatttcgaagcccaccgaattccattcctcgcgattcccctcccctcggctcctcgtcctccccctcctatgggacagccgaataggaatcgcgcggaggaattaactttaaaagggattcctcgtcttctacgatacaaggataccatggagcacaaggagcctggatgcctccaaccatattgcccgatcctttgcatcagtaactgcgccttctttgggagtgcggataccatgcacgtgcgcgcaaagtctcacagagccatgatgacgcaggaggagcagggcctgctagcg

SEQ ID NO: 37633 - DNA, 3398 bp, Oryza sativa
  Clone ID: PAT_MRT4530_41345C.1
atggagagcggcgcccacaagagcagaggcgccgccgccgccggaggaggaggaggaggggagggggcgagcggaggaggaggaggagggaaccacatggtgtgccacctgtgcgggtaccagtacccgaacgcgcaccccagcgcgaagcagcggcgtgcgcaccgcaagaactgcggcaacccgtcgtcgccgtcccccaccgccgccgctgcccacgccgccgtggaggagggcgacgggaagaggctgctgctgctgcgagatgacggtgaagaggcggcggcgggaggaggaggaggaggaggagatgtgggagatggcgcgagcgcggtggcggcggattccggtggcgtcttgcccggatctgcgcgggaggttgggaatgtagcggatgacgatggcaatgcagagcgttcttcttctcctcctcatgttagtgaggttcaagtcggcctcagtaaatgcacggaagattgtgtcgtcattggtgaccacatccctccttccggaaacgactctaaggccagtggaactgagaatgatgagattcagagtggagtcgttacgcggttaaccgaaaatgtaccacatcttgaagatgggcatcactctgagtcagctgttagttctgatcagtgtatgggtagcacttcttgtctggtgcctgagcatggagatggtgcaagattgagctcagagttctctgcagatgaaatcaataagttaagtgtgatgtctctagaaacagttactggattaagtaaagatggtattggaaacaatgaggatgatttctccggtgtggagagaccaaaggcagtggaggaagatcgatcagtcaatgattctaatgtggtttccaaagagcaaatcccctgcgaagaaactgtgtcatccatggagcaaagtgaagttatgtttactattggaaacaatgaggatgatttgtcctgtgtggagagaccaaaggcagtggaggaagatcgattagtcaatgattctaatgtggtttctaaagagcaaatcccctgcaaagaaactgtgtcatccatggagcaaagtgaagttatgtttactaactcagtggaccatgtttctagttcaaccaaggaacctgtcaatttacttgaggataagatgtcttgtattgagaagcatgtatgcctagacgaaactagtagtaatgatttattccaacttgctagtggtggtagccattcagaggcatcaggcattgacaaaccccggcatcaagctgattgtgcctctctgacgccagatcagttggtaatccccaaggagatggatattgatgaaggacttcattgtactgatgcagatgtgggcatcaaaactttgtcaagtgcagttggacatgctgatgaagatattactgctgttaacctttcaaagaatgtttgttcacctcatttgacagtgggcgatgacatacaggatagtgtcaggcaaacaattgatatcactcccatgccacctcaagttgatctagcagaggttagcacatcctctacttctcatgagatcgataaagtaagtagtaaagatggtattgatgaaagaaatccaaatgtaaaccttacttccgatgaggtaaatgaggtgcatggcatagatgttgaggaaattccacatattgaagatattgctgcatataatgattatcaagagcctaatacagtgcgtggtactcgtgattttgaagaagatacgcagaatgaagaaattattgcagaagctagttctcacaatatcactgctgtacagagcacatgtaatgttgaagaaaaggaacagattgaagaattcgatagcaattcttcctgtaacaagatccatgagataagcagcaggggcgttgaagaaacaaaactgactgatgttaatgtggaaactgcagatgagataaatgtggcaagcagcctagaaaatgttgaagaaaagcagagcaatagagaaaccattgcagacccttcagttgagattgatgtggcaaacttgccaagtagccttgaattaagcaagcttgatgtagaaactagcacataccatactgcttatgaggccaatgcagtgaatgccatggaaaatgttgaagaaatgaagcagaaggaagaaatcgctgtagcgcccacttctcatatcaacacgatatcgagcaccactaatgatgaccagaagcagagtgaagaactctctgttggccctagttccgatgagattactgtgccgcatggcgaattcaatgttaaggagaagactgaggagactgtgtcagaccctacatccaacaaaactgatatggtaagcactagtggcggcgttgaagaagagaaccacggtgatgaagtaacttcaggcacgaatactcatgaggaaagtgtaatattagtacacaccaccgataatgtcgaaaagaagatgaacaaagatcttacttcagaacctgcagacaatgttgaagaggaagtgcagagtgaagatatcgcaacagaccctacttctcatgagagcagcacgctacatatcacagacggtgctgaaagcaagaaacaggatgcgaaggtcgctgcagatcccgctgctggcaaaattgatgtgccacggagcgcagatgatgctgaagaacagaagcatgaggcgaccgtcagcacggatgatgatctcaaaggagatgatccgagcgaaagcaactcgccgcagatcatagacggtgctggagacaaggaacaggacgcagaaaccgctgcagatcctcctcctggcaaaaccgacgcgccacccagcacagatgacgctgaagaaacgaagccgaaggaggaggagttggagacggtcggcacggtggtcgacgatcctaaggaggaggacaaggaggagatcgccgacaaggaagtgatcgtgaattcagacaagaaccacgtctcactgaagtccctcctctccgagaaggccgcagaaaccaaggagtcgaagaagccgagcaccaaggatcgcgtgctgtcgttccggcggcgggtgtcgaaagacggcggctctccggcgaagccaggctctcccaaagcggcggtttcagggcagcagcaggattggaactctccggcgaggttaccggtggagaagaagcctaaggggaagaagcagcagtgggtgcccttcatttgctgcccctccatgagctgatcgatcgatgatgttatatatgaatataaatctttagtgtgccacattcttgtttcgtttttttttacccattttgctcgtggactaagaagaattgcattttgtttatgcacgctacatgctacttctacctctgcatttcatgcaagtattaaagcagtgtcagtttatacgtaagctgtctttggtgatct

SEQ ID NO: 37634 - DNA, 202 bp, Oryza sativa
  Clone ID: PAT_MRT4530_41346C.1
agacgaaaaactggtcaatattcattgaacggagaggaatgaacccaactaaatcatagcactatactaaaaaactgactacaacaaacatgcaagagaactagtcatacataaaaggagaaccgctgagcggtaactgacacgatgagaaccctagcaaaggagtggaacataacaacgcgtatgtggctgacgatttaca

SEQ ID NO: 37635 - DNA, 1664 bp, Oryza sativa
  Clone ID: PAT_MRT4530_41347C.1
tcaggccaaaccatgctgcaagatgaaaccatgcccatcaaatgccaagggccatatctcaaacagttaaattcacaagaatcaggtaagattgccgaattcctaaacttgttaactacaaactttacagaaatacgatgttcaagaaaattgtgtaacaagtcaaaaataataggggtgtacggtggatggtggattcttcatctaagctgtacagaaatacctatacttacagagtcctaaaaaactggctgttggtaattgctcaactcaaacctcttgcacatgcttcatttgcaaaattgtgcgaagatcctgaatcatgtgaaaaattcgaacacttgaaacttcttctgccaagaattgcatgtctaacgctgcgcggaaaagtttgcagtctgtagttctgtttctgcaaagagttgagcttcacatggaatggatgttgatcgaatgcaattctcatctcaccagttactgaaccgtatgtactttccattttgaactgtaagcaggctatatacaagcatcaatcgataattttttcaccggtcgagaataggtaggacaccaaagtccccaacagagacggcaccccagatactttcgaagacatgtttcagaaatgggggaaatgcaagccctgtcactgacccaaggtacattccactatacacgagagccaatgatctgctcctctctgatacaggaacccatttcgaaagaatattattcatcgcaggcatggcaactccctcaccaactcccatgaaagcacgggtcacaaggaggaatggtaaccccagcttcgccgcaaaaggcgtaagagctgtggctatcgaccaccaaatgacgccgaagccaaggacagtctctccctccaactgtatctgcccagattcatcatgctatctgagttagcaggtagccccagaagaaagatgactgaatgaggccaacagtttgtgggttccatccgaattctgcagacacggattctgtgaggttgaatttcagaacctggttgtagtagtgttggcatccatgtgagcaagatgaaagttccccagttatggcagaaatgagatgaccctggtgcccaacctccgcctccccctccgccgcgtcgtcctgcgccgacccggagagcagcagcctcctcaccgacgccagcagcgccccagcgtcgccgtcgtcgccgtatcccccgtcgtgtcgcgcgtcgtcgtggcggcccttccgcgacgacgacgacgaggtgttcgaccggacgtcggtccctcgcagcgcccgcctccggaacaccctgacgccgcctaacccatccccaactccccggccgccgccggggtcgaggaagcgccgcgagcgcggcgccggcggcgagccggggacccggcaggagacggagagcggcagcaggtagagcatcaggcatggcaactccctcaccaactcccatgaaagcacgggtcacaaggaggaatggtaaccccagcttcgccgcaaaaggcgtaagagctgtggctatcgaccaccaaatgacgccgaagccaaggacagtcttccctccaactgtatctgcccagattcctcctgctatctgagttagcaggtagccccagaagaaagatgactgaacctgcagcccggggatccactag

SEQ ID NO: 37636 - DNA, 313 bp, Oryza sativa
  Clone ID: PAT_MRT4530_41348C.1
aaaaaaaaagaggtttttaaattggcaaacgcagacaggaacacaggaaaaggggggaaggtgcaaaatagaagaagggactacgcaaacaggaataggagaagcaggggaggcatgaggctgatagggagaggaaagagtaccaaggacaagaagggcgctagaacaacaaagcaaaccaaggagaagaatgaagcaaatggggagactggagctggaggaaacaaaaacaggaaagaggcacctgatgaaaacatgcgcaagggagaagaaggcaatgaaagcaggagagaagaggtaaaataagaagaaa

SEQ ID NO: 37637 - DNA, 288 bp, Oryza sativa
  Clone ID: PAT_MRT4530_41349C.1
catatacgttgcggtatacgcaagaaaagaaggcacccggacggatccccccacggtctccgcccgctgtttcctccgcaccacacggtagatgccgctccctccctccacaggccggcgtcgccgctcctccctccgcgagccagcgccatgcggatcccctccctccctccacgagccgccgccgccgccgcacctcgcggtcgccgccactctccctccacgagccaccgccaccaccagcactcagagagagagacggaatacggggagagacgtagatatgga

SEQ ID NO: 37638 - DNA, 801 bp, Oryza sativa
  Clone ID: PAT_MRT4530_4134C.1
atgggcgggatgacggccggcgagagcggcggcggcggcggagggcgagcgcggccgcggcaagcgaagcaggcaggagcggggcaacggccgacgagagcggcggcggcggcggagcgcgagcgcggccgcggcagcggcggactgcggacgaccgcggcgggaggtgggggcgggatccgggaggtggcggcggaaccgcggcgcgttagggtccccgaacacgaggtcatccttgagcccgcagtccaccgagcgcggcctgtgggcagaatggaggcgggtggcgcggcggcacgcggagcggcgttggacggcggagggcgagcggaaggcaagcgcggcgggctgcgagcagagcggacgacgggcgtcgagcgagcgaatgagcactgcaggcggatgaggaggccgcaacggcggaggtggccaaaggaggagcgtggcggcctactccgccagtcgcgtcggtggcggcggcgagagcggcgcgcaaagcggacagagcgaacgagcacatcgttcttgctgctggttcccgccgccgccgtcgcactcatcggaggagcccaacgtggtggcgcgccgcagcggcgggagcggacggagttgggggagatgaggccggcgggagagggggaaagaggtgacgcgtcgccgccgctcgcccgtcgcgcccccgcccctctgctccgcccgcgctcggagacaccgccgctccacctgctccggccgcgcaccgcccaccctcggagccgccgcttgcccgccgtcgcgctcgcccaccgcttgccgtcgccg

SEQ ID NO: 37639 - DNA, 276 bp, Oryza sativa
  Clone ID: PAT_MRT4530_41350C.1
tcgaccacgcgtccgcttcgcagcaggagcttccgatccgggggcgtgaatctatggggcaacgcgcacaagatcgacgccaactggtcttttgagatgggccagaaaattactggtgcttgttgtaaagcagttgtgagttagaatgacatgggcgatttttacagactacagtatgcgaacggagttgaattggtcagtggcagaagatacagtctccagtcatagggcgtgtgcatgtgcttgcatacatcgctttaccgcaagaaggtagac

SEQ ID NO: 37640 - DNA, 734 bp, Oryza sativa
  Clone ID: PAT_MRT4530_41351C.1
ccggccgggaaaaatttcagcttcctcgacggctcgacgccatggcgcgccgccgcggcccgcggcccaagccgccattatccgctcgacgaacgtcgccgcgtcgcgctcttcccgggggctctctcttttgccggtctctgtagggctccactaatggcgaaaacgcggcgcggcacgtcagtcgccaagggttcgggagataagaggccatccacttatccaccctagcctcctctgtagggaagacccccgccgaacgctgcgccggtcgtcgccggagtccgggctcagcagatcgaccccccgtagagtcattaaggaaagggtttgagtgctcagatggggtgagaagaagctatccaaggcggcgcagacgttgtatcggttccgtactatctctctcttttagcaattggtggtatttcttttggtaatactattgcgggacttcgggatactattgctgtggtatcgcagcgtttggaccaggtggcacaggagtttttcacccaggagcatgggtggcgatctagtctacagattgatagtcactagtttctgtgttttgtgatgaggaagtcttcttaggtccagttttttggctgtgtgcattctatgcaaaggccgggggtagactcagttggaatgtatcatcttggtgtatttaaccgagtcttaataaagcttccattatccaaaaaaaaaaaaaaaaatttgcagccaaaaaaaaa

SEQ ID NO: 37641 - DNA, 908 bp, Oryza sativa
  Clone ID: PAT_MRT4530_41352C.1
aaatcgctagcagcatggcctaaggtgtgtaggccaaaagaaaagagtggactgggagtcattgatttaagaattcagaatagggctctcctgataaagcacctccacaaattctactgcagagcagatatcccttgggtgaacttgatttcgtccacatactacccaaatgttgtccctcaaacgctattctcgtatgttaagcacaaggacgattcggtggcccaacatctagcaagagaaccacaagatcaatttcacctgccgctctctcaacaagcttaccaagagtataatttgatgttaagtgaaattcagtcggttacactttcagatatcaatgactcttggcagttcatctagggttcaggaatctacacctctaagagattttacaagctctcgttctagtctctaactccccctgtgacctttaaatggatccggcaaagcaaagtcacatgaaaattaaggtttttggttggttgcttctcatggacagagtgaacactagagacttattgcatagaaaacattgtgctcccttgggcgcgttgatttcttgctcctcatgtcaggagaacgctagagaaaccagggagcatttgttctttgactgcgacttcagtaaagggtgttagaacaagttgggatggtactggaacacttctttggaatttaatcaaataatacatactcaacactcctctttctcccaacaaggtttcattgaattgtttcttctagcggcttggaacatctggaaggagagaaatggtctgatctttcaagggattcagccctctgtgactaattggctggccaatctcaaattggatctgaacctacatttaattaggttcagggaaagcgatcgacccatagtgcaatcatggattgatcatttg

SEQ ID NO: 37642 - DNA, 1538 bp, Oryza sativa
  Clone ID: PAT_MRT4530_41353C.1
atcctctcctgtttattttattttcaatatgggtttatcaaaggaaaatcgattcaggattgcttagcctaggcgtttgaatacattcatcaatgtaaacactcaagaagggaaatagtgttgctaaaactagattttgaaaagtcatttgatactattgagcatgaggtcattttaaaggttatgacaacaatgggtttcccgaccaaatggaatgattggatgaaagcaatcttttcctctgcctcaactgcagttcttcttaacgtagttccagggaagttcttcagatgcaagagaggagtcagacagggtgatcctttatcacctctgctctttgttttgggtgttgatttgcttcagtctatcatcaataaagctcaccaaagaggtgttctgaacttgcccatcccagctcgcggtgatgcttgtcttactagaagcctttgctccgcaactctttgcactaaaggctcttctaaactcatttgcaacctcttcagggcttcgagtgaattactctaaatcatgtatgatccctttaaacctgtcagaggagaaagcgtcgttgctcgcttcaacctttggttgttctctgggttctcttccttttacttatttggatttacctcttggcaccactaagccaaaagtggctgatttctcgccgctcactgacaagattgagagaagattcacagcaagctcctccttcctctcttatggtgataggcttactctggtgaattctgtcctgtcctctctcccaacctgctacatgtgctccctttctttgccgatttcagttgttgacactattgatagagccaaaagacattgcctatggagagggaatgacctaaattacaccaagaaatcactagtagcatggcctaaagtgtgtaggccaaaagaaaagggtggactaggagtcattgatttaagaatttagaatagggctctcctgataaagcacctccacaaattctactgcagagcagatatcccttgggtgaagttgatttggtccacatactatccaaatgttgtccctcaatctgcgaaaagttgtggttctttttggtggagagacatttttcaatatgatgttttgttcagaggaattgctaagcccgttctgggatcgggaaatgatttacttttttgggacgaccaatgggagagtggagtgttctcctctaaatatccaaggctattctcgtctgttaagcacaaggacgactcggtggcccagcatctagcaagagatccacaagatcaatttcacctgccgctctctcaacaagcttaccaagagtataatctctaagagattttacaagctctcgttctggtctataactccccctgtgacctttaaatggatccagcgctcctctttctcccaacaatgtttcatggaactgtttcgtctggcgtcttggaacatctggaaggagagaaatggtctgatctttcaaggcattcaaccctctgtgactaattggctggccaatctcaaattggatctgaaccat

SEQ ID NO: 37643 - DNA, 337 bp, Oryza sativa
  Clone ID: PAT_MRT4530_41354C.1
acgaaaaaacacaaaaaaacaacaacaaatacaagcaccaaaatacaatataaactaaaaaagcccacaacaacaggaagcggagttcaagtgctaccatatgcggcaagtccttcaactcctaccaggctctcgtcggcctcatggcgcgccaccgtgtgaagctgccgactcctaccgcagctcccgtcttggctcccttccacatgggcgccttgataacttccgccggggcaccgtttcacaacctcgtgatccaaaaaaaccttcgtcgaccgcattattaacagattgcacagaacccccttttgccaaaatgagtttaacaccaaggagg

SEQ ID NO: 37644 - DNA, 778 bp, Oryza sativa
  Clone ID: PAT_MRT4530_41355C.1
cttaccggacacgactcttatctgggagagtggagtgttctccaaatatccaaggctattctcgtatgttaagcacaaggacgattcggtggcccagtatctagcaagagaaccacaagatcaatttcacctgccgctctctcaacaagcttaccaagagtataatctgatgttaagtgaaattcagtcggttacactttcggatatcaatgactcttggcagttcatttggggttcaggaatctatacctctaagagattttacaagctctcgttctggtctataactccccctgtgacctttaaatggatctggcaaaacaaagttaacatgaaaattaaggtctttggttggttgcttctcatggacagaatgaacactagtgacttgttggatagaaaacattgtgctcccttgggcgcgtcgatttcttgctcctcgtgtcaggagaacgctagagaaaccagagagcatttgttttttgactgcaactttagtaaagggtgttggaacaagttgggatggtactggaactcttctttggaatttaatcaaatgatacatacccagcgctcctctttctcccaacaatgtttcatggaactgtttcgtctggcgtcttggaacatctggaaggagagaaatggtctgatctttcaaggcattcaaccctctgtgactaattggctggccaatctcaaattggatctgaacctacatttaattaggttcagggaaaatgatcgacccatagtgcaatcatggattgatcaattg

SEQ ID NO: 37645 - DNA, 440 bp, Oryza sativa
  Clone ID: PAT_MRT4530_41356C.1
tctgactgctcgtaaaccaccgcggcggcggacgctctataactactggatcccccgggctgcacgaaattcggcacgacgttacacgtgatacctctggtgagcaccttggacggggtactaacatcaccctctacctcaaggatgatcagctggaataccttgacgagcgtcgcctcaaggatctggtgaacaacattctgagttcatcagctaccctatctccctatggactgacaacactactgacaacgacatttctcatcatcaacactacgaaacacaacaacgatctcacgacggaaacgttcaacgatcttcatcacgaataacgaactacaccctatactacctcctaacaactatcccccggaacttctctccaccaaattggaacctttgattcaaaccaaccataaaacccccttttttggttttga

SEQ ID NO: 37646 - DNA, 399 bp, Oryza sativa
  unsure (1)..(399): unsure at all n locations
  Clone ID: PAT_MRT4530_41357C.1
aagaaggagacacaagcaccaacgcacaacgccaacgacaacaccaagccaagaanttatccaatcccatccaatccaatggcaatcccaaaaattcaaaaagccaaccacccaacaccaaattcataacaattccatcccccatatatccatatggcacntatacngaatttacaacaggatcccccataaccagaccaccacaatcccccccaaaaagaacaaagaacaagaaacgactcgatctatgacatagccgcgccgggcacactagcaagcctgcgagcaagcggctgccagaagcggcggcggctgcggcggatgcaagatgttccctgatgtggaggccacaagcccacacaaccaaagaacccctatccgattcccctccgagcccta

SEQ ID NO: 37647 - DNA, 480 bp, Oryza sativa
  Clone ID: PAT_MRT4530_41358C.1
cccacgcgtccggcggctagccgctagctcaacacggcaacagcgttgtacgcgtgcgcccctccccagcaggcggcagcggcactgcggcagcacgtccctcctctccggtcgccctctccaccgtcctgtcccctcctttcccctctcttccggcggtgcagaggcgcggcgggacagcgcccgcggcggcgcggcggcggcgcagcgtcgcagaggcgtggcggcggcgcaccggcacagcacacaagctgagagcgtctctgagacgcacgtcgagagaaactctgagaggacacgggagtggggacggctggctgcgggtgtgagcgtgcgattgcggcgggcgacgggcggtacggcggcgacggagagtgcgcgagctgcgatcccgcgactggcgaggggccggccgccgatctgcttcgctagccggcgaggagcccagagccgcgggaggccgatctgcttggctagttc

SEQ ID NO: 37648 - DNA, 249 bp, Oryza sativa
  Clone ID: PAT_MRT4530_41359C.1
gcgaggaaagaagagaaaaagaaaaataaagactgacagagtcgaattgatgttcttaccgaagctgggagttcaatcacataagttagtttcattctaacttaattcgcaaatatagattagacagatggtttaagtctatagccaaacattagagttaagtcattctatagcttttgctgtaatagttagccacaaccttgtaaataccctattattttacataaaaaaatctcctttggagccttt

SEQ ID NO: 37649 - DNA, 823 bp, Oryza sativa
  Clone ID: PAT_MRT4530_4135C.1
ccggccgggatccatcccttctacgccgcacacactgcggcccctgcatcgctagcgtgagcgagaacgagaacgagagacgcacgtagtggtaccttttgcgaacggtagcgagagcgagagatcgcgtggttttttttgatcgctagctgtgttagccatggcgccgggtgctgggtcgtcgtcgtcggcgaggaggggcaggcgcgtcgccgccgccgagccgccccgccgcgcgctcaggatgcgcgcgtcgtcgccgatgtactacacgtccgacgacgaggacttgccggagattgtcctgacgcccccggctccggcgccgccgcgcaccggtacccgctcgctgcggatgcacgcgtcgccgcccgactatgggcgccgccgtaccaaccgaccccgccgcgtggcacggacgaggtcgccgccggtggtgcaggaggcggagagggagccgccggcgccgcagcagccggcggcggtggtggtggagcgcgtgttttacatggtgggtagcccgccggacgtcatcacggccacgggggaagggccgggggggcgcacggtggcgggcttccgttgcaggaggctcacgtccacgcgcaccctcgtcgacggcgaggacgccgccgcccgcgccgccgccatcagcggcgcccgcgccctggtcatgtgcagctgccacggcgcgcccttcacccacgccgagttcctgctccacgccggcggcaccgacctgggccgcaacgtcaccggctacccgtggcttggcgacgagatggagctgactcctcccggcgccggcggcccccatctgtag

SEQ ID NO: 37650 - DNA, 429 bp, Oryza sativa
  Clone ID: PAT_MRT4530_41360C.1
tctaaatttcctttgcgtcctctcgattcctcagcaaccatgtcggcctactgcggcaagtacaaggacgagctcatcaagaacgctgcctacattggcactactggcaaggcgatccttgctgatcatgagatcagtgcgaccatcggtaagcgctttgccagcatcaatgtcgacatcgttgaggcgaaccgccggtctctccgtgagctgctcttgaacacccctggtgccctccagcaccataagggaggtgatcctcttagaggagaccctgtaccagaagaccaaggacggcaagccctccatggatgttctaaaggaggccggagcacatgctggaattcaaggcagacaaggataccgttgatgttgaccgccccaccaaggagaccaccacccagggccacgatgatcttggcatgcgtt

SEQ ID NO: 37651 - DNA, 293 bp, Oryza sativa
  Clone ID: PAT_MRT4530_41361C.1
aggacatgtagaatgtcactcgtacggactcacagcgctattgcatgacacactgtgcttttctattagatacgtggcctcggagggcgcggtgcactgataccgcaccatgcggatgttgactaaggatgctgacctctcttatctctggctcttggcagcggtcaccctaatccgtctgagggcacacgcgcgtgcaggattacttaaataggatgttgtgctgcttattgctgcacgacttatatagagtattaccatgctgagtgctctgcttcaggacattaatattc

SEQ ID NO: 37652 - DNA, 1101 bp, Oryza sativa
  Clone ID: PAT_MRT4530_41362C.1
atggcgtcgaaggccggaggcgggggcgtcgcgcggcgcggaggagggcggatgcggagtctggggaggcagggatccatgtacagcctcaccctcgacgaggtgcagagccagctgggcgagccgctgcacagcatgaacctcgacgagctgctccggagcgtgttccctgacggcctggccatcgccgacggtgccggtgccaccaccagtagccagcagcatcagccgggctcgggcctcctgcggcaggggagcatcacgatgccgcctgagctcagcaagaagacggtggacgaggtgtggaaggggatccaggctgctccgaagaggaatgccgaaacgggcggcggcggcggcggaggtcgacggcggcgagagaggcagccgacgcttggggaggtgacgctcgaggatttcctggtcaaagctggggttgtcacccaaggatctctcaaggagcttagtgatgtaggcaatgtggatccggttggaagaggtgttacagcaaccgggactgtggatctggcacctggatcacactggatagagcagtataagcagcagattgcatctactgatgctcatcaccatgggcagcaaggtgtgcagggtgcttattttccgaatcgattggtccctcagccacttaatgttggccccggtgctattctggagccatcctactctgatggccagacttcttcaggaatgatcggcggaatgtccgattcgcagacgcctggaaggaagcgaggcatgtcaggggatgtggcagataagttgatggagagaaggcagaagaggatgatcaagaacagggagtcagctgcccgttcaagagccaggaagcaggcctacactaatgaacttgaaaacaaggtttctcgtttagaagaggagaatgtgaggctaaagaggcaaaaggagtcagactatttgcattatactaggagtaatcttgtgatggaaaacatagaaatacatcgcagtctaatcaacagcaatattatcatctggtatgatgagctgtactacttcataggtagtgtatcaagttacaatcaagaggtcttcgtcatggtcattgtttgtgtgtag

SEQ ID NO: 37653 - DNA, 549 bp, Oryza sativa
  Clone ID: PAT_MRT4530_41363C.1
atgcagccgccgcggagctccatcggagcatgggaggcgagctactcctaccacgaccccgccgtcttcgtcggcggcggggaacacttcaagcaagaggccgcggccgagctggacggcgtcgccgccgccgccggagctaacgccttcctgcggtactccacccgcctggccgagctcccgcagctggagagcccgccgctgccaagccaggggagccaggcggcctcggccgtcgtcgacggcgaggaagataacgccgattctagcaggcgccctggcggcggcggcggcgccgccgccgcggtgaccacggactggagggcgttcgacaagttcgtcgcgtcccagctcagccccgaggagcagcacacctgccgggccaccgacgacgacgacatggcagcgctgctgctcctcgacggcggcgggcaggaggacgacgccgggaggtggctgggctccgccgggttgctgagcgccgtggcggccgacgcgacgacggactgcggcctcggcaccagctgcgtgcctggcgacatcaactga

SEQ ID NO: 37654 - DNA, 188 bp, Oryza sativa
  Clone ID: PAT_MRT4530_41364C.1
ctccttaggcgattgggttgctgagccgccgggacattgccgctcgccgcgccacgccacgccacgccgagttgccgagctgagccatgatggagttgcgcaagtactggggcgtcgggggcggcggtgcggtgcgtgcgaggcgtcgccggcggccgtgcctgcctctgctgctgcgtgtgttcctg

SEQ ID NO: 37655 - DNA, 426 bp, Oryza sativa
  Clone ID: PAT_MRT4530_41365C.1
atgcacgaatctgatgccgacgtacgcgcgctcgggcgctcgctcggctccgcgccacgggagtacgggacacccggccccccagcagttaacggcaacagcatccgcccccgcgaccgcgtatccgcgccgaaaacgacgtgccgccgcgcgctcgtcgcccgactcgagcgcgcgagacgcgaaacagctggtggttacccgggacgtaacgacgcgacgtacggcggaggcacggcgcgcgggggggaaaaggccccactttacacagtggaaaggcgagccgtgtctgatagcgtggagcggtttttggcgacgacggtgcccgccgccggtgcattaaccgtcgaggggtgcaatcaagaagatgcaccgtacatgacacaggaactgacggggaggtatggagaggcggcggcgcagtag

SEQ ID NO: 37656 - DNA, 451 bp, Oryza sativa
  Clone ID: PAT_MRT4530_41366C.1
ggcgataaaggactagatgtgcggacatatgaggcgcgtagagatgaaatggcagctgggagaaggattctgttctcaattgagaaattatagacattagttctgtacttgtagtagctcacggacatgttggaagaacccatgaagctgattgatgcacgtcataccgagacttacccactttacgtaatgctacaatggcattgcagttaccgaacgcttcgtttgatgatacactactgacaaacactattacagcctcacgttcatgaatgcatacaaggatgttgtgagggtagggaaggtcatactgctgtcgatgtgtaactcattctggtgggacggaataggcggatgtggcaaagataatccgacaagagttgatagggtggccacactacttcttgaagatattgatcaaagactcttggctttacaaccttcttgatgc

SEQ ID NO: 37657 - DNA, 3103 bp, Oryza sativa
  Clone ID: PAT_MRT4530_41367C.1
atggcttgctccggcgtgctccggtttgacggcgacaaagacgatgtcccgccggagcacgagcgggagcgggagcatctcggcgagccgccttcgctgcccgagttgctcgaggaggcgccctcgcaggcggagacgctcgatactccgccgtcgcctccgcctccgcctctagaagatgacattccggaagaagaagaagagggcaccggaaccgtggctaataattctgccaaagatggagatgacattcttagaaggtctgatagctatgacgttatggatcttgaagaactattgaaacagaggacattcacgaggcaagatcaagttgcttcacctgcagaacttgcaaaggcatacatgggttcaagatcttctaagggatcaccattacgtcttagattgcatgacccctctgtactttccaaatcgatagaagctaatacaacacaaataacgaggcctcccaccctctctctgctcgcgagtgcaagaaatcatgctccaaccacctctgatcgtcttgggagcaactacacgacaccaaatagatcagcaatatacaaaatgtcatcatctccttattttaagagtgctgtttcttccagggatttgtttggtactgtatctccatatcaggctccaagcagccttcatacatttggaaggcaggttctgaagaggaagagtgctgctctcaataacgagagtgcctctgttggtcccatacgcaaaatgcatcagaggtacaacagagtgtcaccactgttgcaaactcggtcaggccaccgtggatatagtggtagtcatgctagcaaacttgatgaaggtttggaacactcagtacaaagtcaaaaacgtaggtgtctggataaagttggtgatattactcgaagtggtgtacatgacagagcaaatgatagcagttttggtcaggcaccagcacagtcaattcaaatggctgcaaagatattgaagcagcttgatacgataattccttcacagaaggaaggcacattagcaacaaggcaaaagcatgtggacatcttagatgttgaggatcctatttctcagaaaactgaagtatcagcacagggcagtcttttgaaaccatcttcgtcacgagttaaggagtctttacctaataactccaactgcgctgctaaatttacctccgccgcaaaagacagcaatactgttgatgctacatctgacaaatcagctaaattgatgcccaaggattggttggagatggataactgtaggggaagtacaaagttgtcactcaaccaaggaaatgataaaactgagagaaagcaatcaccaatcccagagaataatgatatgagttctggaataataaacaaggagaaacctccaacattgcctttgagaagtcatgctccttcaaatctagtattatccagtgagattgaccgatgcattatcctagcatcatcaaatggcttttcattcccggttccggctgctctgactggccattctcaggcccctccaacacctactttggcatctccacctgtactatctgttgagaagcagcagctgtctgcatcatctagtgcaccagttacttcagtggaaagtattccaagggttgtctctcctcggtcggttgaagcctcagtttctaaccaacgtgatacaaagtcgaatacagataaaccaccaatttctcaaagctctgggcaaattgtttctttcactagtaatccagtatttaacgtcatctcctcaaaaccaacaaccttaagcaatggcctggcagatacaacaaaatctgcttctgctgctgtatttccttccaatggatcaaccaagtcagtttgttctacaaatgctggctcttcaacaccttcgttcccaaagttctcatttcagcctggattccgaacatcaacctcttcagtgcaatctagcggtattcaagagcctgctataacagctccattcagcactgtgagtagtttagctgggggcagttcatcgccatcctcaatgatatttgctggtgctacttctcaatctagttccatcaccaccagtggcagtgttcccttccaattctcttctcaatctagcagtgaaagttcattagctggccaagacaaatccaaggcagcaagcagcagtgccccttttagtttctctccacagtttggcagtacaagtccgtttgcaggccagggcaaatccaattcagtctcctctcagtctactttgctgtctggaagccaatttagcaattcactatctgcacagacttcaacaagcaattcaaacctattatcttcagaaaaagtaaatcctgggagctcgccaagctttgcatttggttcatcagcaccaggctcaagccctgtgttttcgttagcagttggttctggcactacttctgcaacacctgcttcagcatcttcaccaattttttgcaaccgtttaactagcacaaatgctccaccttttggctcccctgccacttcaccttttagctcaacctcgagccctgtattctcatttacctcagctacgcctacgataccaaatgcatcacctacaacaccactttttggtacaccgagcccgactgttggtttaagtacaggaactgatcagatgaatggaggtcagatggctggggacaagaacccgtttgctttttcagcagcttcaccctttggtcttccaagcagttcaccatccactccaactctgtttagtacgccagcaactcagtttgcttcagctacatccgcttcaccgggcatgttccaatttggccagcatagtcaatcatccccaggtggcttctcaataggcactactggtggcaacagtgaaaagtctgcaagaagaattctaaaagttaagcgaaagaaataacgctcgccttcagtttttcccaggtctgcttgcctgacctggcgtggttgcccgtgctggcttgtgccccagtgttttcttttggctgatccgaattttggcacatgaggtacccatggactgttttttgaactgaatttttgtatgatttatcctctcatgaacccttgcgaatttgttaaaaaaaaaaaaaaaa

SEQ ID NO: 37658 - DNA, 345 bp, Oryza sativa
  Clone ID: PAT_MRT4530_41368C.1
ttgtggtttttttttaggccaggggacaaaatgaaagtttcaaagagattgaatttacattatattcattttggatccagttccaaaacaattgagatccaagcatatgcatggtctcatgatcgagctaataatttagtttatcaaccggggttattgctgttggaatgtgtgagatgcatatatatatatatatataacatcaagtatatgtatatgataataaataattgggggccggcaattgatgcatgtgagtgagagattgaagattcatatttagtgtgtagaacgtaagttcgggttgggggctggggtgtttatggttatagtacaggagttgaa

SEQ ID NO: 37659 - DNA, 272 bp, Oryza sativa
  Clone ID: PAT_MRT4530_41369C.1
gcaaaatgttcctttgcacaccatggtacatatgagatgagtgcatcagagccttggaggggatgcactcatctcatatgtaccatgaatgacaaagttcctttgcacaccaatggagcgatcttttcaaagatggaggtagaccttccagctatgatggtacagaaagacatggttgaggttcgtctgactaaggggatctgaaggtctatccaagacgaacaaactgacgtatgtcaaaggctttgggaaacttgcttccctctaaaggt

SEQ ID NO: 37660 - DNA, 795 bp, Oryza sativa
  Clone ID: PAT_MRT4530_4136C.1
atggccgccggccgtgcttctcgtcgccgttccgccctctccctctcctcccgagctctcccgtggtccctagccacctccccgccgtcgtcccctctctcccgtgccgccggccgtcttcagccgcccctgccgccgcgttagcacgccggccggccgtgccgtcgcctcctccagcatcgcagccgcctcctcttcgccggcttgccctccgtttcccgcggagacccccggagctacgttcccgccgtcgcccttctctttccttcgcgccggctgcctccagccgcttctccctcctcgccggagcgtcatccggtcgcgccgtcgccgccagcagcgtcgcagctgcttcccctccaccggcgtcgcctccgtttcacgcggagaccaccggagacgcgtccccgccggcaaccagtggcattggtgccactgtactccctccagccggctgctgtccctcgtcggagcgtcggccgacgtcgccgtctccttcgtcgacgccgtggcatcgtctccttccccggccacaactcggtttcgccggaacaccgccgtgtcgccaccaacccctcgatccgcctcaccggagttgttcggccgcccgtccctcctcgcccgtgcaccggtcggccgcacctccaccaccttcggcatcgcagccgcgacgtcgtccttggcatcgcttccccttcggccgaacaccgccggtgtccgtcgtcgtcttcaccgttcatcctcgccggctcgtcgtctcgcggcgccgcctccgtcgtcggcattcgcagcggg

SEQ ID NO: 37661 - DNA, 308 bp, Oryza sativa
  Clone ID: PAT_MRT4530_41370C.1
tgttttgtgttgttgaggaatacattacacatgaatcgtcgcatggacacgatcagccacacacgaacagggcgtgcagtggcttactacgaagcagagatcaaaaccgacttctacccaccacagctccattacactgtcatctcaccacactcagagccaatgtttaattatgtacacagacgccagacagcgaccttactcatcttgggccatcttgcaccccggggcatcgacggcgacgacgaccactaccatgggactgtgccactattacatggacctctcggggaacacccactggtgga

SEQ ID NO: 37662 - DNA, 810 bp, Oryza sativa
  Clone ID: PAT_MRT4530_41371C.1
atggacggcaaggtggaagaaccccgccatgcgaccctggtccattcgccgctgttcgtcctcatccgcacccatcaccatcgtctctctccccacctgcttctcgcctccttcgtctcctctcctctcccgctagcccacgactttgacatcgatggctgcgttgcgcacgaccatgtggggaggaggagcgacactgaatcagctatcagcagctcaacgtcgaacatggcaacgacctcctcgatggtgtcgaaggtgccgagccacaaccacttctggctaagttcacggatctatgccgagaacctgcctcacagacgccgccacacgccgcattttccgtttcaggatccgccgtgcgccgtcgcctcggccgtcgccggtcagcgccgacacctccctcggctacacaaagtcgagctctaccccggcctctggttgttttgcgccaaatcccaccggaggttgcccgtcgacgtgaagtggagcaccgccgtcgccgccgtgcctccagccgcgccgttcgtcgtcgtccgtcgtctccactggattcgcagctgcgaggagaacaccgtccaccacctcttcttcgccaaagatcgccggaacaccgtcgccatcgttgaccagtaccacgtcgcccttcggagctcatcgctggccatctccttcgcggtccgtcgtcgcgtaagtgttggtaagaatagccgtcgccttctctacctcatggtgctctccatttgcatcatcatgctgtggttcgccagcaaccgctgttctcgtgctcttcgattaagatcaatctaa

SEQ ID NO: 37663 - DNA, 810 bp, Oryza sativa
  Clone ID: PAT_MRT4530_41372C.1
ttcgttatcaatacaaagactacttcaagtcaaacaagcaggattctacctgatgagctcatcaagttgcacgggttcacaactcttggtggcaaacggccagcatatgacggaagagagagtctctataccaatggttcacttccttttgaatcaaaggagtctgtggtcaaagtatttgatccagaaaagaatgctaaagaaagggcgcaaaaggaatttaagatcacaattgaaattgttggcaaaacaaacttgtaccacctccagcgctttctgctcggaaagcacaggggcatagcccaagaaatcatccatgtttttgatgttatcctcagtgataaactttctcggaatcatgtcacagggcccagatcctttctttgtactcagattggtcaccagggttacattggtgatggacttgactcttggagaggttaccatcaaagcttgcgcctgagaaagatagggatttcactcaatacggatatgtctgcagcatcctttatgcctgtgagaattatccaaattatagatgggttcctgaacataagttacacctcaagacctttgttagagcggaaccgtgtgcagctaaagaaagtattatgtcatgtttgcattgaaacaaaccaccatgatgaccaaatcggaagatataagataacagggatcacccctattcctatgagcaataacatatgtcctgttggtgaggaaggaacaacaatgactgttcttcagtacttctgtgatatggagaaaacaggtgtgcctagtgttggacattggaacatcgctgaagag

SEQ ID NO: 37664 - DNA, 292 bp, Oryza sativa
  Clone ID: PAT_MRT4530_41373C.1
acacacgctaccagcatatacagcagtggcttagcttgaagcagcagaacgaggaacacatggtcgccgtcaccatatgccctgtaagaccgcagcgctggacgaaaaggcccatcaagaaggtgcatcggcgaggggcacatcaccaatctgcagtcggtggcgatatccaagcgccgtcggatactgagcccctgatacggcgccgaccgtgtgctctaactgggacgactctccagggagccatcgagctacctgaccgaagagttacccggcaactacgggtgggaca

SEQ ID NO: 37665 - DNA, 560 bp, Oryza sativa
  unsure (1)..(560): unsure at all n locations
  Clone ID: PAT_MRT4530_41374C.1
gcacaaatggtgagacatatatatatatatatatatatatatatatatatatatatatatatatatatatatatatatatatatatatatatatatatatatatatatatatatatatatatatatctatctcacacacacacacacacacatacacacatacacatacacacacacacacacacacacacaccccccccctctctctatctctcacccacacatacatatacacctatatatacctatatatatanaaaaatataataaaattttaatcttcccacacatatatacacccccctcatacacatacacacacacccatacatcattcctcatatacatatatatataatatatacacaactttacacatatacacatatatttattctcctcattnctctaccatatactacatatatatatatatatatatatatatatatatatatatatatatatatatatattatatttttttatattgtcacttcaaatacgccatctagttacattatggcatagaagtgttccactcccgaagatccttgaat

SEQ ID NO: 37666 - DNA, 336 bp, Oryza sativa
  Clone ID: PAT_MRT4530_41375C.1
atgatggagtggcaacgattgtggaccagtgaggcgtgtggagcagcggttccgacgaaaagaatggaacaccagggtggcgattgtgatgaggacaaaggtggcgaagcagccccaccgtcaggaggacggaccaccgtggcgcctgcaggggaagactgtgatttgcgatgggaggaagtgatttacacgagaagaggcgtacatcatgctaggaaaacaacagacgtggtggagtggccacgctggcatcggcagcatgcccgttgcggggagcgcgggtggatgcaggagtggggttgggggcacaagcggtgggggtgggggcatgggtag

SEQ ID NO: 37667 - DNA, 750 bp, Oryza sativa
  Clone ID: PAT_MRT4530_41376C.1
atggacttggcggcgggcgggcagcccggcagcgtggagttggtgagccagtttgccacggctcagagcaccctcgccaacctagagcgcttgggcaagatcgtcgtcccaagggagccggtcagcgggactggccagaccgaggctacgatgaccgggggtcggggacggccgtgtgtaggcccttccgagcccccggggttcggtgcaacccggggcgcggcccgtgtttgggctccctttcggcgagcccccggggttcggtgcaacccggggcgcggcccgtgtttgggctccctttcggcggtttccaggttgccccacgcgccgcaggctttgttggtagcgcgcggcacgcagggccgcacgccttctccactcttcaagatagtcgaggtcgtcgcggcgaagttcgtcctggttggcctcattgtacagcgcgacgcgaggcgatcccagggaaagctccgaggctcggaagtcgagccgaacgacgtatttgaggacgtccccgcttgccgaagtcagcgtgactccggcgcctgcaccttgaaggttgagggagccgtcgaaatgcataacccagtgcccgctacgaatgtcggtgtttgggtcctctccatctccggggagggaggggctgttggtcagaataggttcgtccactggggtccattccgcgatgaagtcggccaggacctgacttttgatcgcgtgccgtggttcgaagtgcagatcgaactcagctag

SEQ ID NO: 37668 - DNA, 311 bp, Oryza sativa
  Clone ID: PAT_MRT4530_41377C.1
ataatgaacacacaaccccatatttcattgatcaggttcaaaacctgctcagacatccaccgtgccgggtccgatcttacctttttttcaaaactcggacattcatccacccgggccaaacgaattcttacatttatacgggacacgtacgtacatttactggaccgtgttcacaaaggcacacttttctgaagagacccgcattgtcgtaaacctagttagcttaggtgaagggtatgccctcgccatggcagcacggcggggggggggctcactttccggggaccaaaaaggtggcgtaggcccaggcg

SEQ ID NO: 37669 - DNA, 387 bp, Oryza sativa
  unsure (1)..(387): unsure at all n locations
  Clone ID: PAT_MRT4530_41378C.1
caagctatgaccaatgatttacgcccaagcttctaattacggacttctaactattagggaaagcttggtacgcctgcaagntacacaggttcacggaattccccgggtcgacnccacagcgtccgcccacgcgtcacgagcggactttagccattcccactatgttcttgttgggggaagtaggctgttattttgtcttgtcggttttgtccaggttcactaatttggtggtttcactccacagtataaaatgagatgtagaagacagcaagatgtacataaaaaggaaaagaagttccctaaaaaactgtagatgaaaaagaaaagtcaattgactaggaaagaggcttttcagatagttctctgttatgaaaaaaaaaaaaaaaa

SEQ ID NO: 37670 - DNA, 152 bp, Oryza sativa
  Clone ID: PAT_MRT4530_41379C.1
cccacgcgttcgtacaggaaccgtagcttaccccacctacggagttggtaaggcagctagcaaggtatactggcaggctcttgtttgcaaaaagctcgctcaacaacttaaaaccatccttctcaggcaacaactaaatctaactgccacag

SEQ ID NO: 37671 - DNA, 385 bp, Oryza sativa
  Clone ID: PAT_MRT4530_4137C.1
ttggagatggatgaagtccggggtccatggacattcttcagggcaaatgaaggctacacgagctgcggaccgggagtcgagatgtcatatggcagagggttggtgccctgctgctaggggctcagtcctgcctgtctgtcccggtggttacgggcgtaagcggtattggttcgagtctcttgtctaaggctaggatgggttgcaaactatgttacgtctcgcgtctgtataccgtggtggtatgtggcacgtggttacacgtgaggaagatgtgtcttgtggcattcgtgggtgtgccttgttgagtacggtggttgtactcagtcttgctcaatttttcccaagcccagatgaggagttcctggaagatgaaggcttcggtgtc

SEQ ID NO: 37672 - DNA, 480 bp, Oryza sativa
  Clone ID: PAT_MRT4530_41380C.1
ttacgagttccgattttgacgtatcaggcagcgactatgttatacctacatttgctagcaacttcaaccacctgtgggaccaggttggtgctgctggagaggaagcagaggagacgttgcagttgagtgccatgaagagcatagcagaagccacagaacagctgtccaaggcgttgtcactacagccgctggagggcacggacgtaccagtcaatcagacgacgcacaccctcaagctgctcggaaagacggtgaacggcggcagggtgttgcaaacgtgcggatggcatactcttccaatcgggtgtcactacaaagatcacagtgcgcagcgaggaagaaggggttgctgctttggtcattgcatcagtcgagtagaagaggtagttgtttttgtgacgcattttttattacttcgtttagttgtcactttgacagaaaagtaaccgcaggcgttttgctcgaaaaaaaaaaaaaaaa

SEQ ID NO: 37673 - DNA, 315 bp, Oryza sativa
  Clone ID: PAT_MRT4530_41381C.1
atgtggcggaccaccttgggcgacctcgaggccaagttggagcttcgcgcgacagccaacaagggtagtgtcagcaaggattcccccgtaatccgaagtccgaagcaattggtagatgtgtatgttgaagagccagaaattattgatttgtgtgatgggtcagatgatgacagtgattatgaggcatacatggaattaaaaatggacagtgaagaagagtgtgcaaaaaaggatgttgaagtagatgtatccaaaggtaaaggagttactaaggctgctggtagtggatgtaagggtaaagcaatggtagagtaa

SEQ ID NO: 37674 - DNA, 425 bp, Oryza sativa
  Clone ID: PAT_MRT4530_41382C.1
cgcacgcatgctcacacactaccacactgtctcctactttttccaccattgccttgcccacgcatagttccaccaccaagtgccacctcctctccacctgggcaccgtctaagcccagctcatccaccctctccatgcccaccatgtggacacccacgctcatcatatcagcgccgaagacagctccccgagcccgcgcacccggcgatgatcgcagcgcgcgagatgaacaaggcctcggcgtcggacctctacatggcgatgaagaccttcaccaccaacacgcagtccctcaacgacgtgtccatcttcatgatccatccacgataaaaaagaagatagaaaaaaaaacgtcgttttttttcttccttttttatttctctctctcattctctcaaactgtgtttattacgagagttttgaat

SEQ ID NO: 37675 - DNA, 420 bp, Oryza sativa
  Clone ID: PAT_MRT4530_41383C.1
ttcacagacgggaccagataaacgaatacgcacgcaccacctacaagctgaggagccgccatgctgctgacgcgcgcgtcccccaccttgctgccgtggacctgcgccgcctcgccctggccgtaccacagcgccgtcctccccgaccttaggaaggagcgcatgaccggcggggaggtggattggaggccgtgtcttttgcgggggccggtgcatggctgtgctgccagcagggggcccagagatctgcggcaggcgggacggacccagcgaagaaagtggagaacgccgacgagcttatcgtcttgattgagacgtgcatatatgaatgcaacagagtgattaggaagggcgacaagctgatcgacggattgacggacacgctcgagaagctcagatcaaagggcaagatgctgctgt

SEQ ID NO: 37676 - DNA, 697 bp, Oryza sativa
  unsure (1)..(697): unsure at all n locations
  Clone ID: PAT_MRT4530_41384C.1
gttcacagttggtctgtttttttaccgcagaaaaggggaaaccgctttatagacacctaatcgcagggaaaaccccacatgcatctaatcagaggagatcagatcgagtacaacaagagggcgtatgcaggttgcccatgcatgcatgaaaaccgaaataaaaggggattaaataattattaacatatatatatccatcaggggacttccacattccattgctccgacttcttaaaccgccttttggaggcaagccttatggggccgtcttttgcgggggggactacccgggggggntngatgcctttttccatgcccttgaggccccacatggaaacgtaggggttgacctttttgggcagtttccacagctgggacttgttctccggcggccgggtttggatgaacattttctcccccgccgggttcgtctgctcccgggtcaccgggaagtccaaccggaacctttccggggcgaacttcttcatccgctcgaactcctccctgtacagaaacgtgccgctggtgggcaccccgaggaagagccccccccggccggataacttggaggcggcgtgctccttgaaaaacatctttcacaggaaggccctgaagggggcgaaggcgggtcccccccgcccaaaataaaaaaaaggggggggtgggggcctttgggcaaaaaaaaaaacccttcccc

SEQ ID NO: 37677 - DNA, 729 bp, Oryza sativa
  Clone ID: PAT_MRT4530_41385C.1
cggcacgaggccccgcctccccgctgccgcctccaccgcggcgcatcacgcggcccgcctcactcctcctcctcctccgcgagacccgcgtgccactgcccgctgggtgccccccgcggccgcgcccgcgcggagccggagcccggcaaatctagggttgccgccccatcctccccgacgcctccgcctccgcctcgcgccgccgaggataaccgctgcagtcacgggagggccgcgccgcccccgccgccgagccccgcctcccttggaatgcgccggcggcagcagcagcagcctacgacgaccgcgtgaggaggaggaggaggaggaggaggaggaggagcgctcttcgacggcgcacgcgggggtgagcctaggtaacgtgccctaccaaccccgcgtgtcctctcctccctctcggtaatttgtttacacgatgagttgatgcaatgcggttgatctcctgttgaccggggagaccatggcccgcgtggtggaattggggcggcggaagaattcggttgcgtttgtatgcattgcatcactgcggaatcgtgtggcccgggcttgtctcctcggcgtccaagaaatccagtcacttgaatcttcccaactgcttgatttaatagtattggtttggggcttggatcctaagattgggtactggacttcctttttaattcggtgtactattatactagggggtcactgttttgcagcgcgaattgg

SEQ ID NO: 37678 - DNA, 319 bp, Oryza sativa
  Clone ID: PAT_MRT4530_41386C.1
aaacccgaaaaaggggggaaaacctttggaaccaacactttacaattccttttaatatggggcgacccaggggacaaatggttgcaaaatccctttgggggggcccgggggggggaaaaaaaagaaagggtgttttattcctggaggggaaaggtaatttgccaaaactttggttaacccccaaagggggggcccttgattattattcaaaggggaataagggtcaaatcccctggacagggggggggcaattttggggggcccaaagggaccccccaaaaatggcccccccctttgggaaaaagtaaaaaaagggggg

SEQ ID NO: 37679 - DNA, 300 bp, Oryza sativa
  unsure (1)..(300): unsure at all n locations
  Clone ID: PAT_MRT4530_41387C.1
tcgagatggcagggtgccgtggccacggattcggacgaggccttgcagtggccgtggcggcaacagtgctgctgctgctgccgctgccaagcatctcctccctgcagctgcaggccgtagcttcgtcttctgctgctccggcaacgacggccacggccacggcgacggacaagagtaagctgccgttcatgcccgtcccgacggaaccattcccaccttcgccgcctcacggccaccgnctcccggttgtgccgccgcctaagcccaagtcggcgaacagggaggcagcagcagcagccg

SEQ ID NO: 37680 - DNA, 632 bp, Oryza sativa
  Clone ID: PAT_MRT4530_41388C.1
atcgcacgaggatttgtgtttcagtgctttataggtgctcatccttcttgcatgttcatctggttgcaaattcggcacatgaaaaacaaagagggttcacaacttgcatagtaatgcagcaatgcatcagttctagcttgccacggcatacagtgggtgagaatttcttcagttaaacaatagcagtaaattgtgacaaagtttaaggactgcatcatctgatttagatattttctctaagatttgggaatgcaatcttgctcatataggcatatacatatgagtagtagaatgcaccctgaagacaataaattagtgctatgggaatatgggactattctgctacacattcctctcaaaattgtaaagaaaggaaaagattctatcatatggaatactggcgtataaaggttgaaggaactgggaggtgaattacagttacatcattattagcaaatgcagttcaaaagtaaaaggacacggttccttgtccttagatgagaatcactatctgaagcacccaaaacaacagaacaaattacaggtcccgatggataagaaaaccaatgtttcaggtaatgctaccaacagctccataactaagaactatgaagtgataaatgcagatgcac

SEQ ID NO: 37681 - DNA, 309 bp, Oryza sativa
  Clone ID: PAT_MRT4530_41389C.1
tttgggttttttttttttttttgttttttttttttttttccaaaaaagttgtctgaaaccttttttggcccggtctgggggagaaggaaaatgctggcactctcattatacaagcctggtactgaaaacacgattccatgggctcaactctcaagggaaggggtcacatgaaacctagaggtaaccccccttggtagggcaaaacaaggtcaaattttggccaagcagcattaagtcccgttgcggggccagaccgtgagacaacgcaggataaggtcaggggcccaaagattttccataataacctga

SEQ ID NO: 37682 - DNA, 2520 bp, Oryza sativa
  Clone ID: PAT_MRT4530_4138C.1
atgggttcttgcacattgtcctccggcggcgtctgcgtcgtcgtcgtcctcctgtgtttggctgcttgctgcctaacgtgcgcgcgcggcgctgtcccggcgatctacgtgctcggagactcgcaggcagacgtagggaacaacaactacctgctgcactcgctgctcaaggccaacttccctcacaatggcatcgactacccggggggaaagcccaccggcaggttcagcaatggctacaacttcgtcgatttaatcgctatcagtctcggggtgcccagccctcctccatacctctctataagcagcaaaccaatgaacagctccgtatatctgaagggtgtcaattttgcttcaggaggagcaggggtgtctaatctcacaaacctggcccagtgcatcagcttcgacgagcagatagagggggactaccacagagtccacgaggcgctggggaagcagctgggcattcctggggccaaggcccaccttgccaaatcgctcttcgtcgtcgccatcggcggcaacgacatcatcaacgacctcctgctgagtcccgtcagcgagctcctacgctcccgagatgagatcgtcagcaatctggaaaataccctcaaacgccagctgcagaccttgtacgaccttgggatgcgacggttgttcttcgtggggatagcaccgctgggatgttgcccgttgatacgggagctgaaccccaccaaggaatgtgatgctcaggccaactacatggcaactcggttaaacgatgcggcggtcgtgctcctccgcgacatgagcgagacgcatccggacttcacctactccttcttcgacacatacaccgcggtgctccagtccattcgttacccagaggcacatggctataaggaggttaaagcagcgtgctgtggcctaggagataacaacgccatgttcctatgctcgccggcgagcgtgtactgcgacaaccggacgagctacatgttctgggacgtcgtccatcccacgcaggccgcggttgagaagcttatgaagattgcgtttgatggatctgcgccgttggtttccccgaaaaatatcaagcagctcactgagagggagaaaaagctggccggcgtgctcgctgtgaagcagcaagcatcggcgcccatcaggccgcccatctttggcagtctggctgcctgtgtgctcgtcctctcggcctctcaggtcagacagtgctggcttgaagagtctcatcaaggcatccaagctggcggagttgaggagccagctctatttcaggacgagcgtgtgcgtggtccgatggagacgagagtgaagaagcggaagcaagagcgggatctattgtcgatccaagaggaggggacgattgttcaatcccctcaaacaggggagatctctgtccgcggcgccgatctagagtccggcgaggactcctccgactctgtcacctccgacgctggcagcgccaaggctgctcccgacgacgtgcttcatatcgcgcatgccctctacaaggtttgcgccaagtctcctagagccgtcatcgactttgttcgaagagtgagccctgccaccgtcggccgttcgattgattgggacgtcgtccgtgaggaagagtcatcgaagatgggcgatggccgtagccggtggaccgatatggaggttcgtgtgtttcttgagagctgcttggaggagatggcagcgttcaccatcacctccaactcccccaagccgcaggcatggcagaacctaatacacaagatgtacaccaagtgtaagaagaagcaaaataaaggtgtcttaagcttcaggaatgatcctctgaagcacattgaccttcaccacgcggtattcagtgggcgcacagttgtcggaaaccactccgccgtcgcaggggcagccccagccgcaccgcaaggagcagttcagtggcagaccatcgacatggcgcagctcgctgctgcttatagaccaccacctccaactccacccccaacggcagcagaccggggcaagggaaagaggccagcagcaaacactcctgcctcagggagttcttccaagaagtcccgaagcgactccgctggactggctttggagaggattgcggacatccgagagcagagctaccagagtcatgctgctcagatggaagcagagaagtctatgggcctgtgatgcatgcatggagttggtggaaaatgagtggccctgaaattggtaggaagtgtgttggtatctgcttgtgcgctattccgtgaccacattgacctgcaaatgcatttgttcgaccccacatggacgccgctaggcgcttggaatttatacgcactggtggtactggacagtcatctggtggcacccagtagtttgtgcgctgtactttactttgagttgtgatgtgtgatgttttccaaataaaccagtatttatgtttagaactctgtgtgctaacaatttttacattctgtgagtccctaaacatttgcggctttataaaaaaaaaaaaaaaaa

SEQ ID NO: 37683 - DNA, 219 bp, Oryza sativa
  Clone ID: PAT_MRT4530_41390C.1
atggtgatcacgcgcacactgccgcgcccggccggcgtcccgtacgtctcgtcttcctccgccgaccgcgcgctgccgtacgcgtcgcgctgcagtggtgaggccgaccttgctccttcacgtggctgctcacttcaatacttgtggccgacttcaaggacctgtcttcctgagcctcttcgcaagggcttcgtcttcttaatcctcctggtctcctag

SEQ ID NO: 37684 - DNA, 180 bp, Oryza sativa
  Clone ID: PAT_MRT4530_41391C.1
atgggtttcctcctgagggttgtgcagctggccatagtcattgcagctgctctcgtgatcgtcatcacatcatcaggcagccactaccgcgacagcgttggagtgactgatcacgaaatgtttgtttctgccaagaacgatgatatatgccagatcgtggtttgtatggtgtcagactga

SEQ ID NO: 37685 - DNA, 320 bp, Oryza sativa
  unsure (1)..(320): unsure at all n locations
  Clone ID: PAT_MRT4530_41392C.1
aaaaatatatttttattactctttattataccaacgtacttggttgagcactcctattttagattcactatagttaaatggttatgttatttgctttattcagcagccatgcaacttcaggttacactcagaggtccaaggctgtaatcaagaaagaaaagcagcatggtcactattctacttttaatatgatccagcataagtccacttcgtatgtacatactatctagaagcttgatatactatctaccaaagaaaacctaggcttcctatttcagctngtttagttcggttaaccctggggtgaatgaacatggaaa

SEQ ID NO: 37686 - DNA, 198 bp, Oryza sativa
  Clone ID: PAT_MRT4530_41393C.1
gcctcaaaaaccaccaaattggttcaaaagtaaaacggggttgagggatcttccaaccgggactgtctaaacctaaccccagacaatgggttcctttggacccaaattttttaaaaacaaatggttttgacggatttttccttgcaaccaaagggaactggcagctttgagtttcccaatttccccctgggaagctgg

SEQ ID NO: 37687 - DNA, 579 bp, Oryza sativa
  Clone ID: PAT_MRT4530_41394C.1
atggacttggcatggattactggaacaagtgtccgcgtgtcgttcgggcaatggtcgggcggctcggtggccgggagcaagcggcggcaagcgacggcggccggggggctcagcggcaccgtggcggccaggcgagggtggcggcagatcgcggctgggagcgagcggcgccagatgggagcgggcgacgagcgacggccgagcggcgcggatccggcgcagggggccctccctcgcgcggatccggcggcggctccatccccgacgacgacgacaacgcgggtggtggcggcggcggcaaccccgacgacgtcgacatgtggttggcgacgcgggcctcgtcctgctcagagtgctgccggggatggggtcgcggcgggcgaaggggacgtgtacgtggaggagctggagatgatgaagatgatggggatccccgtcggcttcgactccaccaaggggaagcacgtccctgacgccgatgttagtggggtgcgcgttgtcaccaagcggcagccatggcactacatgaaccgccgtggcgggttcaaccggccccttccaccggagcgcaaccgctga

SEQ ID NO: 37688 - DNA, 447 bp, Oryza sativa
  Clone ID: PAT_MRT4530_41395C.1
caccgacgctctattaacagtgaaatttggtaagcccaaaattactatcggcttagagtcagtatcgacttcaaagttttagaatcagccgatgggagtcaagttgccgcgatgtcgttagaaccataatctctagcctgctctttgactgccaataagggtttcagctggtgacttgtggatttcatgacatcagacctccagccgatgtatgctttaactatcggattagtgcttttttatcatatcaatgctagccgattggtttatactggattatattattattttattacatcatcatcagccgattgcctttatatcattatctacattggacatatagccgattgcttaaaccatatcgctatcggctagtatcggcatcggctattagtagctatcggctggaactactccatcggcatgtcagccgatcggatgttt

SEQ ID NO: 37689 - DNA, 6418 bp, Oryza sativa
  Clone ID: PAT_MRT4530_41396C.1
atgcaggattttggacaatggctgcctcaatctcagaccactgccgatctatatttctccagtattccaataccatcacagttcgatacttccatagagacgcagactagaacttctgcagttgtatcgtcagagaaagaatctgctaattcgttcgtccctcataatggtactgggcttgttgaacgcattagcaatgatgctgggctaactgaagtagttggaagtagtgctggaccaactgaatgtattgacttgaacaagacaccagcacggaaacccaagaagaaaaagcacaggccaaaggtgctaaaggacgataaaccatcgaagacacctaaatctgctactccaataccttcaacagaaaaggtagaaaaaccatctggaaagagaaaatatgtccgcaagaagacatctccaggccaacctcctgcagaacaggcagctagctcacactgcagatctgagctgaagtcagttaaacgaagtttggactttggtggagaagtactgcaagagagtacacaatctggatctcaagttccggtggcagaaatatgtactggtcccaagcgtcaatcaataccttctaccatccaaagagattcgcaaagccagttggcttgccacgtggtttctagcaccagctcaattcacacttcagctagtcagatggttaatgcacatttgtttcctcctgataacatgccaaatggagtattgcttgacctcaataattctactagtcagttacaaaacgaacatgctaaatttgtggacagtccggcacgtctttttggttccagaataagacagacatcaggtaaaaattctttgctagaaatctatgctggcatgtcagatagaaatgtacctgatctcaacagttcaatcagtcagacgcatagcatgtctactgattttgctcaatacttgctttcatcctcacaagcttctgtaagggaaacacaaatggccaatcagatgcttaatggtcataggatgccagaaaatccaattacacctagtcattgtattgaaagggctgcattgaaggaacatttgaatcatgttcctcacgcaaaagccgcagtgatgaatggccaaatgccccatagttacaggttggcgcaaaatcccatcctacctccaaatcatattgaagggtatcaagtgatggaaaatttgagtgaacttgtcacgacaaatgactatctaactgctagtcctttcagtcaaactggagctgcaaataggcagcataatattggtgactccatgcatatacatgcattggatcctagaagagagagtaatgcttcaagtggttcttggatatcattaggtgtgaactttaaccaacaaaataatggatgggcatctgcaggtgctgccgatgctgcgagctcacatgccccatatttttcagaacctcacaaaagaatgaggacagcttatcttaacaattatccaaatggagtcgtgggacatttttctacctcatctacggatttgtcaaataatgagaatgaaaatgtggcctcagcaatcaactcaaacgtttttacccttgctgatgcacaaagattgatagcccgtgagaaatcacgagcttcccaaagaatgatcagttttagatcatctaaaaatgatatggttaacagatcagaaatggtccatcaacatggcagacctgctccgcatggctctgcatgcagggagtctattgaagtacctgacaaacagttcgggctcatgacagaagaactcacacaattacctagtatgccaaataacccacaaagggaaaaatatattccgcaaactggaagttgccaacttcagtctttggaacatgacatggttaaagggcataacttggcaggtgaattgcataagcaagtaacttcacctcaagttgttattcagagcaatttctgtgttacccctcctgatgtgctcggcagaagaaccagtggggagcatttaagaacccttatagctccaacacatgcatcgacatgtaaggacactctgaaagctttaagttgtcaactggagagttctagagacattattaggcctcctgtcaatcctatagggccatcctctgccgatgttccaagaactgataaccatcaagtcaaggtttctgaagaaaccgttacagccaaactccctgagaagcgaaaagtaggacgtcccagaaaagagttaaaacctggtgagaaaccaaaacctagaggccgtccaaggaagggaaaagttgttggtggagaacttgcatcaaaggatagtcacactaatccattgcaaaatgagagtacttcatgttcttatggtccttatgcaggggaggcttctgttggaagagcagttaaagcaaatagagttggagaaaacatttctggagctatggtatccctactggattctttagatattgttattcaaaagataaaggtcttggacataaacaaatcagaagaccctgtgacagctgaacctcatggtgctcttgtcccttacaatggagaatttggtcctattgttccttttgaggggaaagtgaaaagaaaacgctctcgagccaaagtggatcttgaccctgtaactgctttaatgtggaagttactaatgggaccagatatgagtgattgtgctgaaggtatggataaggataaagagaaatggctaaatgaagaaagaaaaatattccaagggcgtgttgattcatttattgctcgaatgcatctagttcaaggagatcggcgtttttctccttggaaaggatcagttgtagattctgtagtgggagtatttcttacacagaatgtttcggaccatctttccagctctgcatttatggctcttgctgcaaaatttcctgtaaagccagaagcctctgaaaaacccgcaaatgtgatgttcgtccgaatttcagaaaatggtgattgttctgggttgtttggtaattctgtcaagctacagggtgagatccttgttcaggaggccagcaacacagcagcctcttttatcacaaccgaggataaggaaggaagtaacagtgtggaattgcttggaagttcttttggggatggagtggatggtgcagcaggagtttattctaatatttatgagaatctgccagctagactgcatgctactaggcgtccagtcgttcaaactggaaacgctgtcgaagcggaagatgggtcactggagggtgttgtttcatcagaaaactccactatttcatctcaaaattcatcagattatctatttcacatgtctgatcatatgttttcgagcatgttactaaatttcactgccgaagacattggcagcagaaatatgcccaaagcaacaagaaccacatatacagaacttctacgaatgcaggagctgaagaacaagtctaatgaaaccattgaatcatcagagtatcatggggttccagtctcatgtagtaacaacattcaagtgctcaatggaatacaaaatatcggcagtaaacatcagcctttacattcctctatttcatatcaccagactggccaagttcacctcccagacatagtacatgcgagtgatttggagcaatcagtatacactggccttaatagagtgcttgattctaatgttacacaaaccagttattatccttcacctcatcctggaattgcctgtaacaatgaaacacaaaaggctgactctttaagcaacatgttatatggtatagatagatcagataagactacttccctgtctgagcctacaccaagaatcgataactgttttcaaccattaagttcagagaaaatgtcatttgctagggaacagtcctcttctgaaaattatctttcaaggaatgaagctgaagctgcatttgttaaacagcatggaacatcaaatgtgcaaggtgataatactgtcaggacagagcaaaatggaggtgaaaattctcaatcaggatacagccaacaggatgataatgttggatttcaaacagcgacaaccagtaatctttattcttcaaacttatgccaaaaccagaaagcaaattctgaagtactacacggagtttcttccaacttgatagagaattctaaagatgacaaaaagacttcccccaaagttccagtcgatggatcaaaagcaaagaggccaagagttggggctggtaaaaagaaaacatatgattgggatatgttgagaaaagaagttctttacagtcatggtaataaagaaagatcccagaatgctaaggactcaattgattgggaaacaataagacaagcagaggtgaaggaaatatctgacacaattagagagcgaggaatgaataacatgctggcagaacggataaaagacttcctaaaccgattggtgagagaccatgggagcatcgatcttgagtggttgcgctatgtcgattcagataaagcgaaggactatctcttaagcattagaggacttggacttaaaagtgttgagtgtgtgcgtcttttgacactccatcacatggcttttcctgtggatacaaatgttggtagaatatgtgtgaggcttggatgggtgccacttcagcccctacccgagtctcttcagttgcacctgttggagatgtatccaatgctggagaacatacagaaatacctctggccgaggttatgcaagcttgatcaacggacattgtatgagcttcactatcaaatgataacttttggaaaggtattttgtacaaaaagtaagcccaattgcaacgcatgcccaatgagagctgagtgcaagcactttgcaagtgcatttgccagtgcaaggctcgctcttcctggacctgaagagaagagtttagttacatctggaaccccaatagctgcagaaaccttccaccagacatatataagttctaggcctgtagtaagtcagcttgagtggaattcaaacacctgtcaccatggtatgaacaatcgccagccaatcattgaggagccagcaagcccagaacctgaacatgagacagaagagatgaaagagtgtgcaatagaggatagttttgtcgatgatccagaagaaatccctactatcaagcttaattttgaggagtttacacagaacctgaagagttatatgcaagcaaataacattgagattgaagatgctgatatgtcaaaggctttggtcgctataactcctgaagttgcttctatcccaactcctaagctcaagaatgtcagtcgcctaaggacagagcaccaagtctatgaactgccagattcacatccacttcttgaaggattcaaccaaagagaaccagatgatccttgcccatacctactctctatatggaccccaggtgaaacagctcaatcaactgatgcacctaagtcggtctgcaattcacaagagaatggtgaactatgtgcaagcaatacatgctttagttgcaacagtataagagaagcgcaggcccaaaaagttcgagggacactgctgataccatgccgaacagcaatgagaggaagctttccacttaatgggacatattttcaagtcaatgaggtatttgctgatcatgactcaagccggaacccgattgatgttccaaggagttggatatggaatctccctaggagaactgtttactttggaacttcaattccgacaatatttaaaggtttgacaactgaagaaatacaacattgcttttggagaggatttgtgtgcgtgagaggctttgataggacatcaagagcacccagaccactgtatgcaagactccactttccagcaagcaaaattaccaggaataaaaaatctgcaggttctgctccaggaagagatgatgaataggccatctggaaaaccagaaaggaaataaagaggaggtacatatgatctgccagaagatcactgacctgaaatggatcgctgaccaataagttgccgtaggcaattcaattatttctggccatatacatctgctgaaagttatgaactccagccactgacgaattcgtggtgctggtattcttcggcaacatgatccatcatacagattctatgcttggttgttgcaagcaattcttatgcggtgacagttgctgctgatagggagaaaaggcatgtccggcggctcagcggctctaactgtactttcatatgagtggaaccgattgttgtacatgtgaaaagtttgccattcaaaatggtcattcatgttgttaggtcattcatgtagtcgatgtcaaattaatcatcaattatttgatttgattcattcacaagtttaattggctctagatacttgtgagctgcaggccagcaatgtcataatgtatgtcgggaaaaggtagatataaatcgtcagcatttacctgaaaaaaaaaaaaaaacaaaaaaaaaaaaacac

SEQ ID NO: 37690 - DNA, 306 bp, Oryza sativa
  unsure (1)..(306): unsure at all n locations
  Clone ID: PAT_MRT4530_41397C.1
nnctgttggaaaggccatacggtgcggccctctttcgctattcaccccagctggcgaaaagggggcgannnnnnnnnnnnnnnnnnnnnnnnnnnnnnnnnnnnnnnnnnnnnnnnngcgctccatcggtatcccgctgccagctgatcaacttgaggtgctgcaggataatttggaatgggaggatgtgcagtggtcgcagactggtgtttgggttgctggaaaggaatatcctctcgcccgatcgggaaacctgtcgtgcccagctgaaataatgaaatctgccaaacccccggngagaagccg

SEQ ID NO: 37691 - DNA, 480 bp, Oryza sativa
  Clone ID: PAT_MRT4530_41398C.1
atggcgatgcggctgctgaagaacatcggccggcgagctccagcatccatggcttgtgtaagctcggccttctcccccggtggctgcggcgtgcaggtcttgccggcgacgacggcggcgggcgtggcgttctccgagaccaataagggttactctgaactgaagcagatgtaccaagctttttgtttcaatcatcctgggctctatgacagtgatactggttgtgatgaatatgtgaagagaatgcgagcaatcgtcgagttagtttgtcgtcttgaaaaagaaggccaggactggacatcttgcaccattgaatgggacagcgagagggacttgccgattgtcccgcaatggacaccgtcatcccgaacccgaaccatgacagtcggtgatcgccatgccctgctcgccgccgccattgtcgtcgccggcgccgccaccctcgtcgccggcgccgctgttgtttcccgtcaaaaatga

SEQ ID NO: 37692 - DNA, 202 bp, Oryza sativa
  Clone ID: PAT_MRT4530_41399C.1
gagtaattaagaagtaattgaagccgacccatttgccaagtgagaattaacgtggagaaaatttttcatcccttatttctccatcttgcattccgagaagaccgtagttagggggaaaagagtaaaagaccaaagatccaacacgtcgtcgtctccaacgtacgtcggacttcccctaaacgtaaaaacctctctagaagag

SEQ ID NO: 37693 - DNA, 240 bp, Oryza sativa
  Clone ID: PAT_MRT4530_4139C.1
atggcggtgggcggagctcggggcggcgaaggggatgggcggaaggcggagctcgggacaagcagcggcacctccatctcatggcaagcaacggaggcggaggcgccccctctcttttccgtccccttctgtcaatcgctgtcgatgcacggcttgtccttggcttccaccgacgcacggcttgtcctcggctttcgccggtgcgtggcgcacgactcatcctcggcatctgacgcatga

SEQ ID NO: 37694 - DNA, 174 bp, Oryza sativa
  Clone ID: PAT_MRT4530_413C.1
atgtcccttgtacatgatcatctcacttctggtgctctctctggttctcgccaacaacacattcgtgttccaggttttggcctctttctgcccggggaatgtgggatccgccgcgtcgccctgcgctcgacagacaccgaccccggtgggggcatggaggccatgtccatatga

SEQ ID NO: 37695 - DNA, 437 bp, Oryza sativa
  unsure (1)..(437): unsure at all n locations
  Clone ID: PAT_MRT4530_41400C.1
acgttaanattatgccagaatggttggggcagcacgtttcccttgaatacattaccatcattaattgtcccaagctaacatctctgcctaaaagcttactgaaccttaccgctttaagagaactgcggttgaagggatgcgaagggctggagacgctaccagaatggctgaggcttctcagaactgccaaggtgacttttacacttgatcgcttgaagaatattatcgctctcagaactgctgttggagggatgtgaagggctggagatatcaccagaattgtttggacaccttgcttcgctaaaatgcattgaaatccaaggttgtcccgatttgacagatttacctgaaagcatgaagaatcttattgctcttgatgagctatggttgggaggattcagtagcctaaccggatggatgggaagttcatttgtctg

SEQ ID NO: 37696 - DNA, 639 bp, Oryza sativa
  unsure (1)..(639): unsure at all n locations
  Clone ID: PAT_MRT4530_41401C.1
taaacgcattnccaccattattatncccccatacccaacttactttctcgcccntttttnatttacgatacatnaccagacactttcatattncaacccnattaccnactaaggaacaaactgaactccacccgtttcgccacgcccctcccgacgccccccgtcgcctcccggctcgaattgaagtgctaacagcaagcagtttggtttgaaagcaaatttgggggattattatttttttggtgggaaatttgagtagggatctgtaatagcggaaaaaggaggagcttcggtggtgaattgagggggtttctccatggtggggaaggaattggtggtgagaaagaacggccccgtggacatccgcgagattgccgccaaggcgacgctgagggaggtccggcagaatgggcacacctacgttgagctccgccgtgtcggcaagcgcgtcatcttcttctgcaccatctgcctcaccgagtgcttcagcgacaccgtgctgtttgatcacctgaaggggaacctgcactccccgacgctacgcggaggctaaggtcacgctgttcgggcccatgccatggccgttcaacgacggcgtgctcttcttcaacaactcgcgcgagnanacgngcccgtccg

SEQ ID NO: 37697 - DNA, 639 bp, Oryza sativa
  Clone ID: PAT_MRT4530_41402C.1
atggcggaagtgagcgtggttcaaccgattaatgtttcttgtggtggaatcaacttatccaggagccacgacatcacagaaaggtccaacggcaacggccaacgacgcgacggcagcggtgacgcaggacaagggcagggtgtccgcggcgggagcgttggtggaggggctctgtgcgtagggtgccgcctgccccgagaagctgctccttgtcttcatccgggcactgacgcagaccctgcgcatgggctcgtggaggagttcaaggccgcggcaccgcccgtctccgacgagctggagttctcgtgggcgcagtgccgggagctgcacttacagtcgtgcagcttcagccacctcgccctcgcgagctccagttcgtcggagttgggcggcgccgtggccccgaactcctccacgagcccctgcgcagggtctgcgccaacgccgcgggcaaagacaaagagcagcttctctgggtgggtgatgcccgtgtggagcccgtcccaagcgctccaaccgccgacgccctaccctccatgtcgtcgtcgttgccatcgcccgccgcctccactggacctccccgagatgctgtggcgcctagaaagaggaaagggagagagatggagagaggggagatag

SEQ ID NO: 37698 - DNA, 366 bp, Oryza sativa
  Clone ID: PAT_MRT4530_41403C.1
atggcctacttcgccgtcctctcccatcgccgcaccgccgccgccgtcgcgtcgcatcccctcaccaccacacctgcctccttggctcctccactgtccatgtctccgtcatcgctgcctccctgtccaggccacgctgcatccctcatcagatccagccgcaacaaactcaatggcaccaaatccggccagcctcgtgggaggcagagtggtgcgtgccggtcggaagtcagcggccgtggcgggcgacagggtgacagtcaacggggcgtcagccgcaacggatccgagcacaccggtggtggatctggccctccggagcgcggatctagccagcgactgtccactgcgacgacagctggttga

SEQ ID NO: 37699 - DNA, 525 bp, Oryza sativa
  Clone ID: PAT_MRT4530_41404C.1
atggggccgcctaatgggcggggggagtgggagcagatcagtggcaccaacgacgagctggttcatgccagcgtgctcgccagtctagatttgactgttgtgacctcagtagatgaaataatccttgctaccgtggacaacccatcaaatgctgtagagtgggcactggcagagatggtgaacaatccaaaggtcatgaagaaagcagtggatgaactcgatatggttgttggtagagaaaggcttgttgaggaatccgacattcacaacctcacatacctcaaggcatgtatccgggaggcgttccgcctccacccctaccacccattcaacccaccccatgtcgcgatcgcagacaccaccgtcgcgggatacatgatcccaaaggccgctgtatcagggaacagatcactaattgaaactagtgcggacagtcgaatgggccggatgagcaacacaaagaaaagggtaatcaacaagataacggaagagatgatcatgttccagatggcagtagatctgtga

SEQ ID NO: 37700 - DNA, 940 bp, Oryza sativa
  Clone ID: PAT_MRT4530_41405C.1
caaaaccaacgcgaagctctcgtcgcgcacaaccaactcgacaccgcggcgaggcgaaccaacgcgcggcgtgggcatggggaggtcgccatgctgcgagaaggcgcacacgaacaagggggcgtggacgaaggaggaggaccagcggctgatcgcctacatcaaggcgcacggcgagggttgctggcggtcgctgcccaaggcggcggggctcctccgctgcggcaagagctgccgcctccgctggatgaactacctccgccccgacctcaagcgcggcaacttcaccgacgacgacgacgagctcatcatcaagctccacgcccttctcggcaacaagtggtcgttgattgcggggcagctgccggggaggacggacaacgagatcaagaactactggaacacgcacatcaagcgcaagctcctgagccggggcatcgacccgcagacgcaccggccggtcagcgccgggagcagcgccgccgcggcgagcgggctgaccacgacggccagcaccgccgcctttccgtcccttgcgccggcgccgccgccgcagcagcacaggctacacaacccggtgcacgccgcggcgccgagcaatgcgagcttcgccaggtccgcggcgtccccgccgtcggaggacggccacagcagcagcggcggcagctcggacgcgccgcggtgccccgacctcaacctcgacctcgacctcgacctgtccatgagcctgccgagctcgccgcccaagacgccggccgccgcgtcgtccacgaccgcgtcgcgccaccatcaccaccagcagcagaagaccatctgcctctgctaccacctcggcgtccgcaacggcgacgtctgcagctgcaaggcggccgcgccatcgccggccggcccacgcgcgttccggtttctcaggccactggaggagggccagtacatatag

SEQ ID NO: 37701 - DNA, 387 bp, Oryza sativa
  Clone ID: PAT_MRT4530_41406C.1
gtccgtaggctggcttcttttaaaggggccgcccttggtttttttttttttttttttctcggattcgggctcggtcttgtgtccccgggagggcttcccgaaccttcaacagtgccctgtgagccgtcgtaggtctcacttgccgcggcgtctgggacaccaggaggagaggctcaagggcctgggcgcgcccgcggggggggcctgggagtctcgcctaccgcgtcggctcacggcgggctcctgggtcccgcgggctttctcctccgtcgcccgcgccccccctgggtcgtggggccggccccccgggcgcccgctcgtgggggggaccccctccgtgcgctggggccgtcgcgagagtcgccccggccgctctttcccccgggg

SEQ ID NO: 37702 - DNA, 300 bp, Oryza sativa
  Clone ID: PAT_MRT4530_41407C.1
atggtgtctctcctgatcgatctggctgccacaggcgagcggtgccagctgctgcgcgcgacgaacgcgtcctgggagacagcgctgcacgaggtagtccgtgctgggagcaaggacatcgttgtccagctaatggcagaggattgcgagcttgcaggtttccccagagatggcggcatatcgccgttataccttgctgttttgctagatgaaattgatatcgcacggtcattgtatgtgatgagccatgggaatctctcatattctggacctggccggtgtaatgaagatgtgttttaa

SEQ ID NO: 37703 - DNA, 325 bp, Oryza sativa
  unsure (1)..(325): unsure at all n locations
  Clone ID: PAT_MRT4530_41408C.1
gatgtatccagtactcatggccttaagggctccattggatatattccaccagaatatgggtatgggagtaaaccatcagcaaaaggcgatgtctacagctacggaatgttgctcctcgagatgatcactgganagaggcctgttgatccgcagtttggaggggacatgaatctngagaaatgggtgcgagatggattcccgcatcgagctcatgaagtagttgacgaggcgcctangggaacaatcgttgatatctgccatgaatggcagcagcaggctagtgctgagcagaagcggcagcagctgatgcttaacaacataatac

SEQ ID NO: 37704 - DNA, 433 bp, Oryza sativa
  Clone ID: PAT_MRT4530_41409C.1
aaaaaaggtcagttggatactataacacacagtacatactggaaattggcaaaaaaaggggggggggacacagttaaaagggggaacatagggaccaaagttggcacaggggttacaaaaaaacccccccttaaaaggggcacaaaatagctccaccatggcccaagggacattttagggggaacgggggaaacaaacgacccctaaacgggtaaaccccccaagggaagaaggggaccgattttggaaaaggtaaactgggtggctaaattgggggggcctaaggacattttattttcctttcgaacggggggggggggcacacacgtacccataagggcggccgccctagttaatcgggttgaaattgaccctggggctgatcttgaaggggggggagaccttccccttggaggggaacccggcgcccccg

SEQ ID NO: 37705 - DNA, 872 bp, Oryza sativa
  Clone ID: PAT_MRT4530_4140C.1
ccgccggcaagagggacctataactcttaaaataacacctgcttatgagcagaaaccaaattgtagtggaacatctaataataaacccctccaaggaagaaaaaggctcacaaacgcgtcccgccccccggttccggcaccccggaaccccccgaacaaaaaaagcggcggcgcgctcggttaacaggggaacgcggggttccggccatcgccgaccaaacaaaaagtggacaaggtcggcgagacccgccaaaccaaaagaaaatggccccaaacgggaaatgtccggggcgacgacggcgcggaaccaaagctcggcggcgacggcgaaaagaaaagaacgccggcgcgagctcgattccgcggagagagagaccggcgattggcggaaacggtggagggaggtacggggagtgtttatatagggttgggaggggaagagagcggtcggatgagggggaaacggccgcggaagatccggccgccattgatgcgccggcgaggttagggggaaagtttccgaacgaatccgagggagagagagagggaaaaatgggggaaaagagggagggaatcacggggaatatttccccccactttattgcgcgcgcggacggcgggaggcggcgggattcgcggcggcggcggcgttagggcacgggcgaggcggcgggagcggcgggaggaaggggatgacgggtgggccccacccgtcagcgagggtggcgggcgggcccgcccgtcagcggcgcgcgcgcggggaggaggccgattgggccgcggggaagaggagagagagggagagagatgggccgagccggcccaagagggggagaggggggaaaaaggactttttagagtttttcttttta

SEQ ID NO: 37706 - DNA, 324 bp, Oryza sativa
  Clone ID: PAT_MRT4530_41410C.1
gccagccacaataaaacagtccatggcatattcatattataaattatagtattatactagcaggaatcagctggaagctatgaaaataggagctgctacataaaacaggactagcttggtccccggacaaatttaggaattagctttagctcttactgaaaaggtaacagcatgaatgaatgaatgagttctagggggctagactgctagggttacacacacagttcaaattacagctaaacagaggcaggaattttggcacgaagcagttcatagccagaaacacttcgatcaatttcatccgtaaaggaacaccagaaacac

SEQ ID NO: 37707 - DNA, 815 bp, Oryza sativa
  Clone ID: PAT_MRT4530_41411C.1
catacacatacgtatcacatactacatatacctatccttttttgtaaaaatcttgggtatacttctgaatacccttgactctaactagggcgccagtatggtaattagtaactgactgactgaaagactgaaagattcactagtccactatatttcagatcataccaatggatgaaccaataagaactataaatcaaggaaacagagatcatcatttttcagtgcataaacatgtaggcaacaaaaaggcatgaagaaccttatgaaagaacaagacagcctagtttaaaactcaaccaacctaggagcaactatctggttttcttaattaagaacaaataggcagttaggcacccaaattcgcctcgacaaggatttggacctgggtggtctaggcatacatccacgacctcgaccaactgagctaggctcagttcccaagatagccaagtttaaacaagcattgtacagaaccatggtcctagttaaacgccttttgaatggtttgtatcttacaagcacttgttaccacttgggaataaaattcgttgttaaatcctcatcttaggacatatgacatatcagcattttaatggagtgaataaacatgtaaaatgctccacgtgattcattcccatttatatgttgagtatcactgctttcatcaatcagacattcataacacccagatctgctagatggtcaagacttttgaagttcacacgaatgtgtaatgcatcaggtctcacaaaagatacataaagcatatcagctgggtttaagcctgctagtgagcttcagaccccacgcgtccg

SEQ ID NO: 37708 - DNA, 296 bp, Oryza sativa
  Clone ID: PAT_MRT4530_41412C.1
gctgagcggagcagaggaggacgaagaagtagggggcggatttagagcacggtgacctagcccgacctcgcaaccatggtaaggggttttgaagatgcattttaagagtctaaatgttttctagtattgatttgcttttaaagtttgaataatatttttgatttcattaactaatttgtaaatttcttttttattaattttttttttttcaaaaaaaatatattttttatttttcatctttattttttattttttatatttcattatttattttctttctttaattataacttttt

SEQ ID NO: 37709 - DNA, 633 bp, Oryza sativa
  Clone ID: PAT_MRT4530_41413C.1
gactgcatcagtaaatggaactgaaagaacatgcgatatacatgcacaagtaaaccatattatattacacaaacataatgttgtctgtaaaaacttcaggtgctccaatcacaaggccatgatatatagcctctaattacattctgacaagagagtaaagcaggagacacctcacaatattcacaggccacattagtacatcaggatgaagaacacaagctgactcacactgtcgcacacacacacacacaggagccattgcatcaaatggcttctttatttacttgtacatatcatcagcatgctgatgcagatcaccatctcctttagcagttgcagggattgcatttgcagctggagccacagctgcagccatgggcagcctcaccagactctgctgccttgccaaccccctcaaattgctccttcgcaggtgcgaccccgaggaccatagttgctgaagtgtttgtggtcttctctgccaggtcagggtacatgtttccgcagccgctgccgcacttgcagctagagccacagttgcagcttcctccgcagcaagacatcttcttggattgtttgtaggttgtgaattcaagaatgtagtgcaaagagagagagagagagaaaagcttg

SEQ ID NO: 37710 - DNA, 512 bp, Oryza sativa
  unsure (1)..(512): unsure at all n locations
  Clone ID: PAT_MRT4530_41414C.1
ttacttataaaaacataaactttttaacagaaccaataataagattttccttgtagagcctagttttccacatcacaatctctgtgttgattttaaagcaaaactacagctaactgaataacaacagatacaaccaccattacaaatactatcactttttgttttcaggggtaaggacaaatttttccctgaaatatttttctgaaatagagtctttccaatgttcttaaacatatctcataacactggtttcctagaaatattttatggatgaatcagttccagagtctttgcaacagtattacatttactgaagcccagaataagagtttaacttctctgttaaattgtttaagcttctgcagacagtgaataaattcatcatattccccatatctatgctatgatttacttctatnatttcacttttgacattttgtttttaaatatatgaagatnttcatggctttacttatgttgagtatttggtggtagacctttgagtttccagt

SEQ ID NO: 37711 - DNA, 225 bp, Oryza sativa
  Clone ID: PAT_MRT4530_41415C.1
atggctgctgtccgaatgaccctccgatgggatgggccatacctacctccactcggccggaagcaggcgcaacgtgggagcacgcctggtatgaatctagccgggactgacatgctgactccaggagttagcacgtcggctccggctagggacgagtgcctagaggctctcatcattccaacgggacggggcgaggcgtgcgaaaggccgcctgttgccacctaa

SEQ ID NO: 37712 - DNA, 235 bp, Oryza sativa
  Clone ID: PAT_MRT4530_41416C.1
agaattgaaggcatcttttattagtgtttacaagtattggctatttacaacatgcgccaaaaagaatggtttgaatcaaaagaaacagaatacaaaaccgggcaacacaaacacaacacgctggcagcaaatcaagcccactttgagctacttaaaaaagcataggggaaagcaatcaaacggtcttttaaggttacagatactcacatcgacaggcggtcaccttatttggggg

SEQ ID NO: 37713 - DNA, 918 bp, Oryza sativa
  Clone ID: PAT_MRT4530_41417C.1
attgttggtgctggtggtatggggaaaacaacacttgcccagtttgtctgtcaagataagaaggttcaagatcattttgctaacaaaatcatatgggcagacgtatctaagatctttgatcctaaagtgttggtgaggaagatctcgggatcattcaacaggtacaaagctagcgctgatggcttggacaccattatgactgacaaatttctactggtcttagacgatgcacgggatgatgcacaaagtgaacgatggcaacaatttttagatctaatcagaaaaaatgccccaatgggaggtaaaatcttgctcacgacccaaataaggccagtggctaatgctgttgaaggccagatgcctccagatacatataaatgtttggagctgggtggtttagatcaagagaacactctgaagctcttcaatcatcatgcgtttggtgacttgagtcccagtgactgcttcgagcttcaattgattggtgaacagattgccagaaaactcaaaggatgccctttgttagcaagaacaattggccggcatctacaaggaaacacagatcatgccagatggaacaccatcttaaatcacgatatccacaaagttgatgatgttgccactgaaatcaagaaagttctcagactgagttacgaaagcctgagtaatgaagtgcaggtttgcttccggtactgcagcatatttccacctcattacaagttcaagatggaagagatggttgagatgtgggtgagttcaggactgatattgcaaagagaggatggcataaataacccagaggatgttggggaacaatactttgctgcattagtaaggaaatcgttcttttgccgtttgctggaaacagacccttctaatggaaatatgaaagaatattatgtcctgcataatttgatg

SEQ ID NO: 37714 - DNA, 4476 bp, Oryza sativa
  Clone ID: PAT_MRT4530_41418C.1
atggccgagcgggcagtggcgcacaggctctctccgaacgctagcggtgacgacggggagcagaacccgcgccgtcgggctcgcaccctaccgtccccctctcgccgaaatcttgggcggggggaggcgctcggggaggccggaggatccgcgacttcgccgcccgcgggcgacgggggaggacggcgagacggggcgcgtcgccgcctcgtctacggcgatggcggcacgccccagggcgcgctccaggctgcgggcgcgctcctgcgtcacccgcccgtcgtccccgatccagagactccagcccgacgttggctggatgatgtggccgacttggtcatgacggcgcagcagcgcctaggcgccggcgggcggtcctccgccaccgagacctctggcgctgccgccgccggctccatgtcgtcgaggcggagggcgcggcaagcggcggccgttacccgccgttcgtccgccattccctcgtcaacgcctccgacccaaggagatgtgcgtggggggccggatgcctgcctcgacatcgagcgccggcgcgacactcgtcgcgccgcccacgcaacggagggcgcttcctcgttcggagcaccacttcggtccgggcacgggggccggccccccgtgtccccggttggcggtgccggctgtcgagcctttgtggcgagccttcggaacgtccgttggcccccaaggttccggcccaccatcaccgaaaaatacgacggaagcgtcaaccccgccgagtttctccagatctacacgaccgggatcgaggccgccggggatgacgacagggtcatggcgaatttcttccccatggccctgaagggcgaagaagcggacttgcatgcggtacagcgaagggacgatgagtctcttcgctcgtacattcagcggttctgtcaagtccgcaacaccataccgtgcatccccgcacacgcggtgatctacgcgttcagggggggcgtgcggcacaaccgcatgctcgagaagatcgcctccaaggagccccagaccaccgcgcagctttttgagctcgcggaccgtgtggctcgcaaggaggaggcctggacctggaactcctccggttctggtgtggcagctccggccgcccccgggtccgccgctcgggcgcttcgcgggccccccgaaaggggaggcctgcgagcgacaaaaagaaggaggccggcgctcccagcagggagcgcccaaccggcaagtggtgtaccgtgcacaacacctccctccacgacctcgcggactgccgcgcggtcaaaagtttggctgattgagcaccgtctcgccgtgcggccgggcgcaaggccggtccggcagaaagtgcggcgacaggccccggaacgtcaagccttcatccgcgaggaggtggcgcgacttctggaggccggattcatccgtgaggtcatccatccggagtggctggcgaacccggtcgtcgttcccaaggcgaacggcaagcttcggatgtgcatcgactacaccgaccttaacaaggcatgtcctaaggacccttaccccctgccacgcatagatcagattgtcgactccaccgcggggtgcgaccttttgtgttttctagatgcatactctggttatcatcagattcgcatggctagggaggatgaggaaaaaactgcattcattactcccataggaacttattgttacaccacaatgcccttcgggttaaagaatgcaggtcctacttttcaacgtactactcgaatttctttaggtagccagataggacgcaatgttgaggcctatgttgatgacttggttgtgaagacgcgcaaccaagagaccttactctcggatctagcggaaactttcgaaagtctccgctccgcccgcataaagctgaaccccgataagtgtgtgttcggtgtgcctgcgggcaagcttctcgggttcttggtctctgcccgaggcatcgaggccaaccccgagaagatacgagctatagagcggatgcgccccccagcaagcttagggatgctgggagagaaggcactgcccctgtttaagctcctcaaacgctccgggccgtttacctggatggaggaggctgagcgggccttcactcagttgaaggcgtacctcagttctcccccagtcctggtcgccccggagccagatgagccgttgctactctacctggcggcaaccccgcaggtggatggccccggggccactgcgggaaggccgcgcctgtcgccctctgaccccgaggtcgtcggcacagaagccgagtgcgccccgcgtggcctctcggacgaagagcgccctggagatgcggcccctggcgaagaggatcggtcccgccgaaaggtgcagcggcccgtctactttgttagtgaggccctccgggacgccaagacccgataccctcaggcccagaagatgctttacgctattctgatggcttcgaggaagttgcgccattatttccaggcgcatcgggtcacggtggttacgtcttaccccctcggccaaatcttgcataaccgagagggtactggacgggtggtgaaatgggcaatcgaactctctgaattcgatttgcgctttgaaccacgccacgcgatcaagagccaggccctcgccgactttgtggcggagtggaccccagctcccgagcccgtctccgccctcgaggctagctcgggcccctcgcagctgcgtcacaccgcctactggggcgccggtgcgggggtcacgttgacctcgccgagcggagacgtcctcagatacctggtccgcctcgactttcgggcgaccaacaatatggcggagtacgagggactccttgcgggactcagagtggcagctggactagggatccgccgcctcctggtgttaggcgactcccagttggtcgttaaccaggtctgtaaggagtaccggtgctctgacccgcagatggacgcttacgtgcgccaggtgcggcgtatggagcgccacttcgacgggatagaacttcggcacgtgcccagacgggataacgcggtcgccgacgaactctcaaggctcgcttcctcgcgagcccagaccccaccggacgcctttgaagaaaggctcgcccagccgtcggcgcgacccgaccccctaggggagacgaacgcgcctgaacggcccccgaggcccgtcggagtccaggccttgggacccgaggggagcgctcccagctcccctagattgattgcttggatcactgagatccaggcgtacctcgcagataagactctacccgaggaccgcgaagggagtgaacgcgtccggcgcatctccaagcgctacgtgctggtggaagggaccctctatcggcgcgcggctaacggagtcctcctgaagtgcattcctcgggaacaaggcgtcgagcttctcgctgatgtccatgaaggcgagtgcggagcccactccgcctcacgcaccttggttggcaaggcctttcaccagggtttctattggccgacggctctcaacgatgcggtcgacctggtccggcggtgcagggcgtgccagttccacgccaggcaaacccatcagccggcccaggccctgcagaccatacctctttcgtggtcgtttgctgtctgggggctcgatatcctgggtccattcaggcgggccccgggcgggttcgagtatctgtatgtcgctgtcgacaagttcactaagtggcccgaggcttatccagtcatcaagatcgataagcactccgcgcttaaattcattaggggcatcactgctcggtttggggtgcctaaccgtatcattacggataacggcacccagttcactagtgagctcttcggtgactactgcgaagagataggcatcaagctctacttcgcctcccccgcccaccccagaagcaatggccaagtggagcgcaccaacgcggaaatcctcaagggcctcaaaaccaagaccttcaacatcctcaagaagcacggcgactcgtggatcgaggagctgccagcggtgctctgggcgaaccgaaccacgccaagccgagcaaccggggaaacgcctttcttcctcgtctacggcgcggaggcggtcctcccatctgagctcaccctgaggtcccctcgggtcaccatgtattgcgaggctgatcaagatcagctttgccgagatgacctcgactatttggaagagcgaaggcggcgcgcggccctccgagccgcgcgctaccagcagagcctgcggcgctaccatcagcgccacgtccgggcccgatcactctgcgtcgacgacctcgtcctacgccgcgtccaaacgcgtgctggactgagcaagctctcaccaatgtgggagggtccgtatcgagtgatcggcgtcccccggccgggctccgttcggctggccacgggcgacggcacagagctgcctaacccgtggaacatcgaacaccttcgtcgcttctacccctag

SEQ ID NO: 37715 - DNA, 5265 bp, Oryza sativa
  Clone ID: PAT_MRT4530_41419C.1
atggccgaacgagcaaaagcgcacaacctctctctgagtgctagcggtgacgacggggagcagaacccgcgccgtcgagctcgtactccaccgcccccctctcgccgaagtcttaggcgggaggaggcgctcgagggggtcgaaagatccgcaactttgccgcccacgagcgatggagaaggacggcgagacggagagcgtcgcctcctcgtctacggcgatggcagcacgccccagggcgtgctccaagctgcgggcgcgctcttgcgtcacccgcccgtcgtccccgatccagagactctagcccgacgttggttggatgacgtggccgacttggtcatgacggcgcagcagcgcctaggtgccggtgggcggtcttccgccaccaaggcctctggcgctgctaccgccggctccgtgtcgtcgaggtggagggcgcggcgagcggcggctgttacccgccgttcgtctgccattctctcgtcaacgcctccgacccaggaagatgtgcgtggggggccggatgcccgcctcggtttcgagcgtcggcgcaatggtcgtcgtgctgcccacgcaacggagggcgcctcctcgtccggagcgccacttcagtacgggcgcgggggccagccctccgtgcccccggttggtggtgttggctgtagagcctttgtggcgagccttcgaaacgtccgttggcccccaaggttccggcccaccatcgccgaaaaatatgacggaagcgtcaaccccgccgagtttctccaggtctacacgaccgggatcgaggacgccgggggtgacgacagggtcatggcgaatttctttcccatggccctgaagggacaggcgcggggttggctaatgaacttgccacccgcgtcggtccactcttgggaggatttgtgccagcagttcaccatgaacttccaaggcacatatcagcgcccagcggttctgtcaagtccgcaacaccataccatgcatccctgcacacgtggtgatctacgcgttcaggggggcgtgcggcacaaccgcatgctcgaaaagatcgcctccaaggagccccagactaccgcggagctttttcagctcgcggaccgagtggctcgcaaggaggaggcctggacctggaactcctccggttccggtgtggcagcttcggccgcccccgggtccgctgctcggtcagggcggcgggacaggaggaggaagaagaggtcggcccattccgacgacgagggtcatgtcctcgccgtcgagggtgcttcgcgggccacccgaaaggggaggcctgcgagcgacaaaaagaaggaggccggcgctcccagcagggagcgcccgactggcaagtggtgcaccgtgcacaacacctccctccacgacctcgcggactgccgcgcggtcaaaagtttggctgagcggacgaggaagtgggaagaggagaggaggcaggagcgccgtgagggcaaggccccggcggctccctccggcaaccggcgaaggcagatcgcgatggtggtttcccccaccatttgcaatgtgaagttggggcgagtcctcatagatgggggcgcagccctcaatatcctttcccccgcggccttcgacgccatcaaggtcccggggatggtgctccgaccgtcccagccgatcatcggtgtgacgccggggcacacttggccgctaggtcatatcgacctcccggtcactttcggtggttccgccaacttccgcacggagcgggtgagcttcgatgtggcggacctcagtctgccctacaacgcggtcctggggaggcccgcgttggtgaagttcatggtggcggtccactatgcctacctccagatgaagatgccgggccccggtggccccatcaccgtccatggcgacctcaaagtcgcgcttgcttgtatggagcagcgcgcggaccacctcgccgcggcgtccaagcccgcgggcagcgacgagaggcttagaccctccgtcccagccgccccgaggcagcggatgatcacgtacgacaaggtcccggaagacgcgctcgtctccttcctgcgggcaaacgccgacgtcttcgcatggagaccggcggacatgcccggggtccccagggaggtgattgagcaccgtctcgccgtgcggccggacgcaaggccggttcggcagaaagtgcggcggcaggccccggaacgtcaagccttcatctgcgaggaggtggcgcgacttctggaggccggatttatccgagaggtcatccatccggagtggctggcgaacccggtcgtcgttcccaagtcgaacggcaagcttcggatgtgcatcgactacactgaccttaacaagacatgtcctaaggacccttacccccttccacgcatagatcagattgtcgactccactgcggggtgcgaccttttgtgttttctagatgcatactctggttatcatcagattcgcatggctagggaggatgaggaaaaaactgcattcattacccccataggaacttattgttatacgacaatgcctttcgggttaaagaatgcaggtcctacttttcaacgtactactcgaatttctttgggtagccaaataggacgtaatgttgaggcctatgttgatgacttggttgtgaagacgcacaaccaagagaccttactcttggatttagcggaaactttcgaaagtctccgctccgctcgcataaagctgaaccccgacaaatgcgtgttcggcgtgcctgcgggccaacctcgagaagatacgagctatagagcggatgcgccccccagccagcttagggatgtgcaatgcatcaccggctgcatggccgccctaagtcggttcatatcgaggctgggagagaaggcgctactcctatttaagctcctcaaacgctccaggccgtttacctggacagaggaggctgagcgggccttcactcagttgaaggattacctcagttctcccccgatcctggtcgccccggagccagatgagccgctgctactctacctcgcggcaaccccgcaggtggtcagcgcagcgttggtcgtggagcgcgacgaggacaaccctcacttcgcgcgtccccaccctgtgtcgactcgacccgggagagagcagggaggagaggcccccgagtcgaacggcggcccgaggcccccgacggccggagctggccctccgcccgcttgtccgacggtgccaggcgcccccgacccccaggatggcctcggggccactgcgggaaggccgcgcctgtcgccctctgaccccgaggtcatcggcgcagaagccaagtgcgccccgtgcggcctctcggacgaagagcgccctggagatgcggcccttagcgaagaggatcggccccgccgaaaggtgcagcggcccgtctacttcgttagcgaggccctccgggacgccaagacccgataccctcaggcccagaagatgctttacgctattctaatgacttcgaggaagttgcgccattattttcaggcgcatcgggtctcggtggttacgtcttaccccctcggccaaatcttgcataaccgagagggtactggacgggtggtgaaatgggcaatcgaactctctgaatttgatttgcactttgaaccatgccacgcgatcaagagccaggccctcaccgactttgtggcagagtggaccccagctctcgagcccgtctccgccctcgaggccagcttgggcccctcacagctgcctcacaccgcctgctggggcgccggtgcgggggtcacgttgacctcgccgagtggagacgtcctcagatacctggttcgcctcgactttagggcaaccaacaatatggcggactacgagggactccttgcaggactcagggtggcagctggactggggatccgccgcctccttgtgttaggcgactcccagctggtcgtaaaccaggtctgtaaggagtaccggtgctctgacccggagatggacgcttacgtacgccaggtgcggcgtatggagcgccatttcgacgggatagagcttcggcacgtgcccagacgggataacgcggtcgccgacgaactctcaaggcttgcttcctcgcgagcccagaccccaccgggcagctttgaagaaaggcttgcccagccgtcggcgcgacccgaccccctaggggagacggacgcgcctgaacggcccccgaggcccgtcggagtccaagcctcgggacccgaggggagcgctcccagctcccttagattgattgcttggaatcgctcagatccaggcggtttctattggccgacggctctcaacgatgcggtcgacctggtccggcagtgcaaggcgtgccaattccacgccaagcagactcatcagctggcccaggccctgcagaccatacctctttcatggccatttgctgtctgggggctcgatatcctaggtccgttcaggcgggccccgggcgggttcgagtatctgtatgtcgctgtcgacaagttcactaagtggcccgaggcttatccggtcgtcaagatcgataagcactccgcgcttaaattcatcaagggcatcactgctcggtttggggtgcctaaccgtatcattacggataacagcacccagttcactagtgaactcttcggtgactattgtgaagacatgggcatcaagctctgcttcgcctcccccgcccaccccagaagcaatagccaagtggagcgcgccaacgcggaaatcctcaagggccttaaaaccaagaccttcaacatcctcaagaagcacggcgactcgtggatcgaggagttgccagcggtgctctgggcgaaccgaaccacgccaagccgagcaaccggggaaacgcctttcttccttgtctacggcgcggaggcggttctcccatccgagctcaccctgaggtcccctcgggccaccatgtactgcgaggctgatcaagatcagcttcgcagagatgacctcgactacttggaagaacgaaggcggcgcgcggccctccgagccgcgcgctaccagcagagcctgcagcgctaccatcagcgccacgtccgggcccgatcactctgcgtcgacgacctcgtcctacgccgcgtccaaacgcgtgctggattgagcaagctctcaccaatgtgggagggtccgtatcgagtgattggcgtcccccggccgggctccgttcggctggccacaggcgacggcacggagctgcctaacccgtggaacatcgaacaccttcgtcgcttctacccctaa

SEQ ID NO: 37716 - DNA, 356 bp, Oryza sativa
  Clone ID: PAT_MRT4530_4141C.1
tttggtttttttatttttttgggtttttctactttttttttccacaaaccacgagcttgaaggataaagagggcacacaaacagaacaaggcaccaaagcaaaaccaaaaaagaaaggctacacgcacacagagcaacacccaaagggaggaaaaaaacaaagcaggcacacacagcgaaaacaaaaagacccccccggcaaaacaaagagcaacagccggcaataagcctggccaaggccccaggcaagaacacagaacctagcaagtacgctgagcccacaaaaaggagcacgccaccaacgaaatagcggacggccgggccaagccgcaacaaccgaccgcgaggaccttgcg

SEQ ID NO: 37717 - DNA, 4770 bp, Oryza sativa
  Clone ID: PAT_MRT4530_41420C.1
atggccgaacgggcagtggcgcacaacctctctccgagcgctagcggtgacgacggggagcagaacccgcgccgtcgggctcgcaccccaccgtccccctctcgccgaaatcttgggcgggggaaggcgctcgagggggtcgaaggatctgcgacttcgccgcccgcgagcgacgggggaggacggcgagacggggcgcgtcgccgcctcgtctacggcgatggcggcatgccccagggcgcgctccaggctgcgggcgcgctcctgcgtcacccgcccatcgtccccgatccagagactccagcccggcgttggctggatgacgtggccgacttggtcatgacggcgcagcagcgcctaggcgccggcgggcggtcctccgccaccgaggcctctggcgctgccgccgccggctccacgtcgtcaaggcggagggcgcggcgagcggcggccgttacccgccgttcgtccgccattccctcgtcaacgcctccgacccaagaagatgtgcgtgggggtcggatgcccgcctcgatatcgagcgccggcacgacgctcgtcgcgccacccacgcaacggagggcgtttcctcgtccggagcgccacttcggtccgggcacgggggccggccccccgtgtccccggttccggcccaccgtcaccgaaaaatacgacggaagcgtcaaccccgtcgagtttctccagatctacacgaccgggatcgaggccgccgggggtgacgacagggtcatggcgaatttcttccccatggccctgaaaggtcaggcgcggggttggctaatgaacttgccacccgcgtcggtccactcctgggaggatttgtgccagcagttcaccacgaacttccagggcacatatccacgcccaggtgaagaagcggacttgcatgcagtacagcgaagggacgatgagtctcttcgctcgtacatccagcggttctgtcaagtccgcaacaccataccgtgcatccccgcacacgcggtgatctacgcgttcagggggggcgtgcggcacaaccgcatgctcgagaagatcgcctccaaggagccccagaccaccgcgcagctttttgagctcgcggaccctccggccgcccccgggtccgccgctcggtcagggcggcgggacaggaggaggaagaaggggtcgacccgttccgacgacgagggtcatgtcctcgccgtcgagggcgcttcgcgggccccccgaaaggggaggcctgcgagcgacaaaaagaaggaggccggcgctcccagcagggagcgcccgaccggcaagtggtgtaccgtgcacaacacctccctccacgacctcgcagactgccgcgcggtcaaaagtttggctgagcggacgaggaagtgggaggaggagaagaggcaggagcgccgtgagggcaaggccccggcggctcccgccggcaaccggcgaggtgaggccaagcagaaggccaccgccgaggacatcgacgatggcgacgatgacctggggtttcaggagcctgaggccaccgtcgccaccgtcgatgggggagcgtgcgctcacgtttcttgccggagcctcaaggccatgaagcgcgagcttctggccgcggcccctacccatgaggctacgcggcgggcgcggtggtcggaggtgattgagcaccgtctcgccgtgcggccaggcgcaaggccggtccggcagaaagtgcggcgacaggccccggaacgtcaaaccttcatccgcgaggaggtggcgcgacttctggaggccggattcatccgtgaggtcatccatccggagtggctggcgaatccggtcgtcgttcccaaggcgaacggcaagcttcggatgtgcattgactacaccgaccttaacaaggcatgtcctaaggacccttaccccctgccacgcatagatcagattgtcgactccaccgcggggtgcgaccttttgtgttttctagatgcatactctggttatcatcagattcgcatggctagggaggatgaggaaaaaactgcattcattacccccataggaacttattgttatacgacaatgcctttcgggttaaaggatgtgcagtgcgtcaccggctgcatggccgccttaagtcggttcatatcgaggctgggagagaaggcgctacccctatttaagctcctcaaacgctccgggccgtttacctggacggaggaggctgagagggccttcgctcagttgaaggcgtacctcagttctcccccagtcctggtcgtcccggagccagatgagccgttgctactctacctagcggcaaccccgcaggtggtcagcgcggcgttggtcgtggagcgcgacgaggacaaccctcactccgcgcatccccaccctgtgtcgactcgacccgggagagagcagggaggagaggcccccgagccgaacggcggcccaaggcccccgacggccggagctggccctccgcctgcttgtccgacggtgccaggtgctcccgacccccaggatggcctcggggccactgcgggaaggccacgcctgtcgccctctgaccccgaggtcgtcggcacagaagccgagtgcgccccgcgcggcctctcggacgaagagcgccctggagatgcggcccctggcgaagaggatcggccccgccgaaaggtgcagcggcccgtctacttcgttagcgaggccctccgagataccaagacccgataccctcaggcccagaagatgctttacgctattctgatggcttcgaggaagttgcgccattatttccaggcgcatcgggtcacggtggttacgtcttaccccctcggccaaatcttgcataaccgagagggtaccggacgggtggtgaaatgggcaatcgaactctctgaattcgatttgcgctttgaaccacgccacgcgatcaagagtcaggccctcgccgactttgtggcggagtggaccccagctcccgagcccgtcttcgcccccgaggccacctcgggcccctcgcagctgcctcacaccgcctactggggcgccggtgcgggggtcacgttgacctcgccgagcggagacgtcctcagatacctggtccgcctcgactttcgggcgaccaacaatatggcggagtacgagggactccttgcgggactcagagtggcagcaggactggggatccgctgcctcctagtgttaggcgactcccagttggtcgttaaccaggtctgtaaggagtaccggtgctctgacccgcagatggacgcttacgtgcgccatgtgcggcgtatggagcgccatttcgacgggatagagcttcggcacgtgcccagacgggataacgcggtcgccgacgaactctcaaggctcgcttcctcgcgagcccagaccccaccgggcgcctttgaagaaaggcttgcccagccatcggcgcgacccgaccccctaggggagacggacgcgcctgaacggcccccgaggcccgtcggagtccaggcctcgggacccgaggggagcgctcccagctcccctagattgattgcttggatcactgagatccaggcgtacctcgcagataagactctacccgaggaccgcgaagggagtgaacgcgtccggcgcatctccaagcgctacgtgctggtggaagggaccctctatcggcgcgcggctaacggagtcctcctgaagtgcattcctcgggaacaaggcgtcgagcttctcgccgatgtccatgaaggcgagtgcggagcccactccgcctcacgcaccttggttggcaaggcctttcgccagggtttctattggccgacggctctcaacaatgcggtcgacctggtccggcggtgcagggcgtgccagttccacgccaggcaaacccatcagccggcccaggccctgcagaccatacctctttcatggccgtttgctgtctgggggctcgatatcctgggtccgttcaggcgggccccgggcgggttcgagtatctgtatgtcgctgtcgataagttcactaagtggcccgaggcttatccggtcatcaagatcgataggcactccgcgcttaaattcatcaggggcatcactgctcggttcggggtgcctaaccgtatcattacggataacggcacccagttcactagtgagctcttcggtgactactgcgaagacataggcatcaagctctgcttcgcctcccccgcccaccccagaagaaatggccaagtggagcgcgccaacgcggaaatcctcaagggcctcaaaaccaagaccttcaacatcctcaagaagcacggcgactcgtgggtcgaggagctgccagcggtgctctgggcgaaccgaatcacgccaagccgagcaaccggggaaacgcctttcttcctcatctacggcgcggaggcggtcctcccatctgagctcaccctgaggtcccctcgggtcaccatgtattgcgaggcagatcaagatcagcttcgccgagacgacctcgactatttggaggagcgaaggcggcgcgcggccctccgagctgcgcgctaccagcagagcctgcggcgctaccatcagcgccacgtccgggcccgatcactctgcgtcgacgacctcgtcctacgccgcgtccaaacgcgtgctggactgagcaagctctcaccaatgtgggagggtccgtatcgagtgatcggcgtcccccggccgggctccgttcggctggccacgggcgacggcacagagctgcctaacccgtggaacatcgaacaccttcgtcgcttctacccctag

SEQ ID NO: 37718 - DNA, 378 bp, Oryza sativa
  Clone ID: PAT_MRT4530_41421C.1
ctcagctatctcggcaactacatgtgcactccagcggaggccgtcatgtccatcctttccattgcatctcatcgtcacgtgacgagtgttgcggctgccgaagatgagcacctgcgttggtcctcaatggccaagttcggctacgcccccgccatcgagactcgcacaacaaatgcggcggcagctctttctaccgtagcatgtcatcccaccataattcttaatcgatccccaccaccagtgcctctctccggaagagacagcgaggtagatcaatcaagcaagcaagaccaagggaatagacaaaggagaaggagaagagcgtcggccggcccttgcagcaatgggagggagaagagagaggccagggaatgggat

SEQ ID NO: 37719 - DNA, 4857 bp, Oryza sativa
  Clone ID: PAT_MRT4530_41422C.1
atggccgaacgggcagtggcgcacaacctctctccgagcgctagcggtgacgacggggagcagaacccgcgccgtcgggctcgcaccccaccgtccccctctcgccgaaatcttgggcgggggaaggcgctcgagggggtcgaaggatctgcgacttcgccgcccgcgagcgacgggggaggacggcgagacggggcgcgtcgccgcctcgtctacggcgatggcggcatgccccagggcgcgctccaggctgcgggcgcgctcctgcgtcacccgcccatcgtccccgatccagagactccagcccggccagcgcctaggcgccggcgggcggtcctccgccaccgaggcctctggcgctgccgccgccggctccacgtcgtcaaggcggagggcgcggcgagcggcggccgttacccgccgttcgtccgccattccctcgtcaacgcctccgacccaagaagatgtgcgtgggggtcggatgcccgcctcgatatcgagcgccggcacgacgctcgtcgcgccacccacgcaacggagggcgtttcctcgtccggagcgccacttcggtccgggcacgggggccggccccccgtgtccccggttggtggtgccggctgtcgagcctttgtggcgagccttcggaacgtccgttggcccccaaggttccggcccaccgtcaccgaaaaatacgacggaagcgtcaaccccgtcgagtttctccagatctacacgaccgggatcgaggccgccgggggtgacgacagggtcatggcgaatttcttccccatggccctgaaaggtcaggcgcggggttggctaatgaacttgccacccgcgtcggtccactcctgggaggatttgtgccagcagttcaccacgaacttccagggcacatatccacgcccaggtgaagaagcggacttgcatgcagtacagcgaagggacgatgagtctcttcgctcgtacatccagcggttctgtcaagtccgcaacaccataccgtgcatccccgcacacgcggtgatctacgcgttcagggggggcgtgcggcacaaccgcatgctcgagaagatcgcctccaaggagccccagaccaccgcgcagctttttgagctcgcggaccctccggccgcccccgggtccgccgctcggtcagggcggcgggacaggaggaggaagaaggggtcgacccgttccgacgacgagggtcatgtcctcgccgtcgagggcgcttcgcgggccccccgaaaggggaggcctgcgagcgacaaaaagaaggaggccggcgctcccagcagggagcgcccgaccggcaagtggtgtaccgtgcacaacacctccctccacgacctcgcagactgccgcgcggtcaaaagtttggctgagcggacgaggaagtgggaggaggagaagaggcaggagcgccgtgagggcaaggccccggcggctcccgccggcaaccggcgaggtgaggccaagcagaaggccaccgccgaggacatcgacgatggcgacgatgacctggggtttcaggagcctgaggccaccgtcgccaccgtcgatgggggagcgtgcgctcacgtttcttgccggagcctcaaggccatgaagcgcgagcttctggccgcggcccctacccatgaggctacgcggcgggcgcggtggtcggaggttaccctcaccttcgaccagaccgaccacccgccgtgcgttgcccggggaggacagatcgcgattgtggtttcccccaccgtttgcaatgtgaagttggggaggccggtccggcagaaagtgcggcgacaggccccggaacgtcaaaccttcatccgcgaggaggtggcgcgacttctggaggccggattcatccgtgaggtcatccatccggagtggctggcgaatccggtcgtcgttcccaaggcgaacggcaagcttcggatgtgcattgactacaccgaccttaacaaggcatgtcctaaggacccttaccccctgccacgcatagatcagattgtcgactccaccgcggggtgcgaccttttgtgttttctagatgcatactctggttatcatcagattcgcatggctagggaggatgaggaaaaaactgcattcattacccccataggaacttattgttatacgacaatgcctttcgggttaaaggatgtgcagtgcgtcaccggctgcatggccgccttaagtcggttcatatcgaggctgggagagaaggcgctacccctatttaagctcctcaaacgctccgggccgtttacctggacggaggaggctgagagggccttcgctcagttgaaggcgtacctcagttctcccccagtcctggtcgtcccggagccagatgagccgttgctactctacctagcggcaaccccgcaggtggtcagcgcggcgttggtcgtggagcgcgacgaggacaaccctcactccgcgcatccccaccctgtgtcgactcgacccgggagagagcagggaggagaggcccccgagccgaacggcggcccaaggcccccgacggccggagctggccctccgcctgcttgtccgacggtgccaggtgctcccgacccccaggatggcctcggggccactgcgggaaggccacgcctgtcgccctctgaccccgaggtcgtcggcacagaagccgagtgcgccccgcgcggcctctcggacgaagagcgccctggagatgcggcccctggcgaagaggatcggccccgccgaaaggtgcagcggcccgtctacttcgttagcgaggccctccgagataccaagacccgataccctcaggcccagaagatgctttacgctattctgatggcttcgaggaagttgcgccattatttccaggcgcatcgggtcacggtggttacgtcttaccccctcggccaaatcttgcataaccgagagggtaccggacgggtggtgaaatgggcaatcgaactctctgaattcgatttgcgctttgaaccacgccacgcgatcaagagtcaggccctcgccgactttgtggcggagtggaccccagctcccgagcccgtcttcgcccccgaggccacctcgggcccctcgcagctgcctcacaccgcctactggggcgccggtgcgggggtcacgttgacctcgccgagcggagacgtcctcagatacctggtccgcctcgactttcgggcgaccaacaatatggcggagtacgagggactccttgcgggactcagagtggcagcaggactggggatccgctgcctcctagtgttaggcgactcccagttggtcgttaaccaggtctgtaaggagtaccggtgctctgacccgcagatggacgcttacgtgcgccatgtgcggcgtatggagcgccatttcgacgggatagagcttcggcacgtgcccagacgggataacgcggtcgccgacgaactctcaaggctcgcttcctcgcgagcccagaccccaccgggcgcctttgaagaaaggcttgcccagccatcggcgcgacccgaccccctaggggagacggacgcgcctgaacggcccccgaggcccgtcggagtccaggcctcgggacccgaggggagcgctcccagctcccctagattgattgcttggatcactgagatccaggcgtacctcgcagataagactctacccgaggaccgcgaagggagtgaacgcgtccggcgcatctccaagcgctacgtgctggtggaagggaccctctatcggcgcgcggctaacggagtcctcctgaagtgcattcctcgggaacaaggcgtcgagcttctcgccgatgtccatgaaggcgagtgcggagcccactccgcctcacgcaccttggttggcaaggcctttcgccagggtttctattggccgacggctctcaacaatgcggtcgacctggtccggcggtgcagggcgtgccagttccacgccaggcaaacccatcagccggcccaggccctgcagaccatacctctttcatggccgtttgctgtctgggggctcgatatcctgggtccgttcaggcgggccccgggcgggttcgagtatctgtatgtcgctgtcgataagttcactaagtggcccgaggcttatccggtcatcaagatcgataggcactccgcgcttaaattcatcaggggcatcactgctcggttcggggtgcctaaccgtatcattacggataacggcacccagttcactagtgagctcttcggtgactactgcgaagacataggcatcaagctctgcttcgcctcccccgcccaccccagaagaaatggccaagtggagcgcgccaacgcggaaatcctcaagggcctcaaaaccaagaccttcaacatcctcaagaagcacggcgactcgtgggtcgaggagctgccagcggtgctctgggcgaaccgaatcacgccaagccgagcaaccggggaaacgcctttcttcctcatctacggcgcggaggcggtcctcccatctgagctcaccctgaggtcccctcgggtcaccatgtattgcgaggcagatcaagatcagcttcgccgagacgacctcgactatttggaggagcgaaggcggcgcgcggccctccgagctgcgcgctaccagcagagcctgcggcgctaccatcagcgccacgtccgggcccgatcactctgcgtcgacgacctcgtcctacgccgcgtccaaacgcgtgctggactgagcaagctctcaccaatgtgggagggtccgtatcgagtgatcggcgtcccccggccgggctccgttcggctggccacgggcgacggcacagagctgcctaacccgtggaacatcgaacaccttcgtcgcttctacccctag

SEQ ID NO: 37720 - DNA, 2293 bp, Oryza sativa
  Clone ID: PAT_MRT4530_41423C.1
atggccggcgtcgtgacgagggcggtggcggcggcggtgctggtggtggtcgtggtcgtggctgctgccgagctcgtggccgcggagccgccgccgagcgagcggtcggcgctgctggcgttcctggcggcgacgccgcacgagcggcgtctcgggtggaactcctcgacgtcggcgtgcgggtgggtcggggtgacgtgcgacgccgggaacgccacggtggtgcaggtgcggctccccggcgtggggctcatcggcgccatcccgccgggcacgctcggccgcctcaccaacctgcaggtgctctccctccgctccaaccgcatcctcggcggcatccccgacgacgtgctccagctcccccagctccgcctcctcttcctccagaacaacctcctctccggcgccatcccgccggcggtcagcaagctcgccgccctcgagaggctcgtcctctccagcaacaacctctcggggcccatccccttcacgctcaacaacctcacctcgctccgcgctctccgcctcgacggcaacaagctctccgggaacatccccagcatcagcatccagagcctcgtcgtcttcaacgtctccgacaacaacctcaatggctccatcccggcgtcgctcgcgcgcttcccggccgaggacttcgccggcaacctccagctctgcggctcgccgctcccgccctgcaagtcgttcttcccgtccccgtcgccgtcgcccggggtgagccccgccgacgtccccggggcggcatcctcctccaagaagcggaggctctccggcgccgcaatcgccggcatcgtcgtgggcgccgtcgtgctggcgctgctcctcctcgtcgccgccgtgctctgcgcggtgtccaagcggcggcgaggcgccagcgagggaccgaagagcacgacggcggcggcggcgggtgcgggcgccgccgccgcgagaggtgtccccccgccggggtccggcgaggggacgggcatgacgtcgtcgtccaaggaggacatgggcggcgcgtccgggtcggccgcggcggcggtggcggcggtggcggcggagccgagcaggctggtgttcgtggggaagggggccgggtacagcttcgacctggaggacctgctgcgggcgtcggcggaggtgctcgggaaggggagcgtggggacgtcgtacaaggcggtgctggaggaagggacgacggtggtggtgaagcggctcaaggacgtggcggtggcgcggcgcgagttcgacgcccacatggacgcgctcggcaaggtggagcaccgcaacgtcctccccgtccgcgcctactacttctccaaggacgagaagctcctcgtcttcgactacctccccaacggcagcctctccgccatgctccacgggagccgggggtccggcaagacgccgctggactgggacgcgcggatgcggtcggcgctgtcggcggcgcgcgggctggcgcacctgcacacggtgcacagcctcgtgcacggcaacgtcaagtcctccaacgtcctgctccggccggacgccgacgcggcggcgctctcggacttctgcctccacccgatcttcgcgccgtcgtcggcgcgcccgggcgccggcgggtaccgcgcgccggaggtggtggacacgcggcggccgacgtacaaggcggacgtctactccctcggcgtgctcctcctagagctcctcaccggcaagtcgccgacgcacgcgtccctggaaggggacggcacgctggacctcccacggtgggtgcagtccgtggtgcgggaggagtggacggcggaggtgttcgacgtcgagctggtgcggctcggcgcgagcgcggaggaggagatggtggcgctgctccaggtggccatggcgtgcgtcgccaccgtgcccgacgcgcggcccgacgcccccgacgtggtcaggatgatcgaggagatcggcggcggccacggccggacgacgacggaggagagcgaggagggcgtgcggggaacgtcggaggaggagcggtcgcggggcacgcctccggccgccccgacgccgtgacgacgccggcggcggcggcggaagacaccttcttggtcagggtaaaggttaaaaattgcataggttctttggctgcctgtatgccaatgctctgttctttgccaatttttttctcttctcttctcttcttcagtttcttttcctgggtattgttttgttggatcaaattgtatttttctcaggcttcattcttccaagtaaatgtattttttttcttctctttttttaaccttccttt

SEQ ID NO: 37721 - DNA, 143 bp, Oryza sativa
  Clone ID: PAT_MRT4530_41424C.1
agggtgaagagatgatcaccatcgagctctgcatctatttttcaatgttggtttctccggagcgaggacttgaagacatgcttgcagatctgaggtggaatgccatggttttagctgaagccacaatgctctccttttgctga

SEQ ID NO: 37722 - DNA, 1807 bp, Oryza sativa
  Clone ID: PAT_MRT4530_41425C.1
cagtggtggacggcggcggcggcgggatggaggggcccaagaggtcgcagctgagggtgcggctccgcgtgacggcgcggcggaggggcggcgacggcggcgcggacggcggagggagcgggggcggaggcggcggggccgggggcaggaagcggctgctggacgcgccggccttcaactcggccgcgaagctgcagcggcgcgagatcggggggagggagctcgcgcgcgcgggaggggcgccgctaccgccgtgcccgagcggttccggaacatgcatctccaggaagagttcgatacgtatgatcacaatgcccacctatttgtgaagctgcagtttcttaaaaagagatccaaaataattgagattgttccagcaaaagatatcatatttgctcttgcgcactctgggttgtgtgctgcttttagtcgagttacaaataagcgcatatccttcctgaatttaagcccagatgaagtcatccggagcttgttctacaacaagaacaatgattcacttattactgtgtctgtttatgcgtcagaccattttagcacattgaagtgcagaacaaccccaatcgagtatataaggaggaatcagttagatgctgggtttcctctttttgaaacagaatctctgaagtggcctggctttgtggagtttgatgatgtgaatggaaaagtactcacctactcagctcaggatggtatctataaggtcttcgatttgaagaattactcttttctatattcaatacctgacaccaatgtgcaggagataaaaataagtccaggaatcatgctcttgatatatgaaagaacaccatgtcatgttcctttgaagatattgtcaattgaagatggaagaccactaaaatccttcacgcatttgttgcaccgtaataagaaaattgattttatcgagcaattcaatgaaaagctccttgtcaagcaagaagatgagaaccttcagatacttgatgtacggagttctgagctaattgaagtcagtgttaccaagtttatgactccatcagcattcatttttctgtacgagaacaatctcttcttgacattccgaaacaggacggttgctgtatggaattttcgaggagagctcgtgacctcatttgaagaccatttgctttggcatcaagattgtagcaccaacaatatctacattaccagtgatcaggatctgattatctcatactgcaaatctgaggcaggggttgatgatggtacagtatacacttgggtctatcaacatgagtgacattatgactggcaaatgcatcgccaagattgctgctaatgatcccaccctccgtattggccctcgcaagaatggtaactctgagaggtcctcaatttggagcaccattccagaagctcttgaagatgtcacagcgcttttttatgacgaggacaggaatgagatctatactggcaacaggcatgggctggtgcatgtgtggtccaactaggttgtaatatgtatatgtacatacgcccttttcgatttgaccagaagattggattagccattgtgcaccatcatcccctgcctggtgatcaccttagtttttgtatttttggtcttttggcaaagaatgttattcccttgtcagtcaagagaaaaatgtagttaccctgtatatatcttttgtaatgccctgtcatataccatgttcttggcagctggcctctctgtcccaaccacgaaacatctggcaggaaccatctaactaattaagcttctcattcctttcggtgtttattctaaaaaagaaaaaaaaaaaaa

SEQ ID NO: 37723 - DNA, 120 bp, Oryza sativa
  Clone ID: PAT_MRT4530_41426C.1
atggtgaagactccaataaggtacaaaggtggaattttggaaatgatggcgccgacaaggtgttcaaatgttcgatgtgatatggtgaaaatttttggagtgggacctaacaaggcctga

SEQ ID NO: 37724 - DNA, 234 bp, Oryza sativa
  Clone ID: PAT_MRT4530_41427C.1
caaaacgcacgaaaaatatatttgaatggggaagtaagctaacacaatattctgtctgtttgcaaagcccaagaacaacatttgtggccggttttggacagggggaacataccgcctttttgttaggccatgaatcttaccttgggttgcgaccatcaatggtcatgcccccatacaaccgggatcgcttggccgcgaaatgtaactggaacccggcatgcaaagaaaagaaac

SEQ ID NO: 37725 - DNA, 153 bp, Oryza sativa
  unsure (1)..(153): unsure at all n locations
  Clone ID: PAT_MRT4530_41428C.1
tgcactccttccgtanccttggaatctttaaaccggccccctcacaatttttttatttattttgttcgcccagtgactttcctggagaagctttatttaaaccaactcgattgagcgagcttttcttttacgcaaggagaacacaatttacac

SEQ ID NO: 37726 - DNA, 1095 bp, Oryza sativa
  Clone ID: PAT_MRT4530_41429C.1
atggcacagcggctgctgctgccccaggcggtgcttctgcgtccgcttgccgtgctcggtcattcctgcgatggcatctagaggctccgtgttgctcgccgtggccgcggcggtggccgtgatgtccgcgtcggtagcgtcggcgcaggtggacgggggcgtgccaccggcgccggcgccggtcacgggcgcggccgcggggggcgcggcgtcgggggcggctggccgtggcgtggtctgccgtgctgtccatcctcgtcgcgggtgggatcatgcactaggcaggcgcgcgaggtggtgatggatggaattggttcgttgatgatctccgatttggacacggctcgtttcgagtcgtttccggctatagagtagtactagtagcagtggttgggttgggtgcgtttccgagtgaggcatgttgtgtttatttcttattcatttgtatcatacattggtctgtgtgtgtttgtatctctcttgttgctgtggattctatgaataaagatggatgatgtgtcttcgtcgccggagcacctactcctgctcgtcgaggacatggacgatgtcaagaggttggacgacatggagcaagacctgctcctgcgcattgaggacggcgtggtcgccgccgccgccggcgacgaggcctgggtggatgacctagaggaaaggaccgctggtctcggggactcgttgcggttggggcctcgccaatcagagggcctccggtcggttgggttgtgggcgtcagtcgtcagacccgacgagtggtggggtggggagtcgcgtgcccgcgccgagaccgcctcgcgtcgcgccacctgcgccaccctcgagcccaacgtgcttctgcgtcgcttgccgtgctcggtcattcctgcgatggcatctagaggcgccgtgttggtcgccgtggccgcggcggtggccgtgatgttcgcgtcggtggcgtcggcgcaggtggacgggggcgtgccaccggcgccggcgccggtcacgggcgcggccgcggggggcgcggcgtcggcggcgctggccgtggcgtgctctgccgtgctgtccatcctcgtcgcgggtgggatcatgcactag

SEQ ID NO: 37727 - DNA, 642 bp, Oryza sativa
  Clone ID: PAT_MRT4530_4142C.1
atggagcccgagagcgccgcgccggcgcccttcctcctcgccgaaatcgagctcgcgccgtcgctctctctctccgcagtcgccgccaagctccggtccgccgccgtcgtcgccccggaccaccgcccacctcggcgtcgcctccttcggcttcaccgcatcctcaccgacctcgtccacccctccgtttcgctcgtcgaccgccgaaacgccgtcgaccccgtcgacccgagccgtgccgccgccttcctccgctccggccgcctttttcgtcttcgccgtcgacctagggtgagccatggaccgccgcttgttttcccccttcccttcccctctctcggccaccgctccgccgtgcctatggccaccgccggtgaccataggggggcgggcgctgcctcccgccggctgcgccggcttggccgccctcgggcgcgccgagtggctgccgcgtggggcccgaccgtcagccgcacgcgccctcgggtgcggctgacgcgtggggcccacggcgccggccggtgcgagcccgggtgcgcccggtccaccgtggaccacgctgcagcttcagaagatccgctcttcgtggaggttgaagccgacgtttcggaaagcgagcaaggcaagtcacatcatccttga

SEQ ID NO: 37728 - DNA, 654 bp, Oryza sativa
  Clone ID: PAT_MRT4530_41430C.1
atggttctccaccgcgacatcaaggccagcaacatcctgctcgacgccgccttccgcggccgcctcggcgacttcggcctcgcccgcatcgtcgtcggcctcgacaagaactcctacaccgacgtcggcgtcgccgggacgtgggggttcatcgcgccggagtactccgtcagccacaaggccacccgcaagacggacgtgtacgcgttcggcgtgctgctgctcgagatcgtcaccggcaggcgagttctctgcaagtttcaggggacgtttcagctgctcgtcgactgggtctggaggcttcaccgggaggggagcctgctcgacgccgtcgacaatggcgttgcctcttcttcttcttcttctaccgaagagttatttgatgcggatgatgccattcggttgctgctgcttgggctggcgtgcagcaacccgaacccgtcggaccggccgagcatgacggaggtggtgcaggtggtcgccaggtcggcggcgccaccggatgtgccgcccgtgaagccggcgttcgtgtggccgccggagggtggggtggaggtggactcgacggggagcgatgttgatgcgagtttgtgtgaatgggatgaagaggagacgtcgtcgagcagtgatgccctcgcggtgagagttcaatga

SEQ ID NO: 37729 - DNA, 1105 bp, Oryza sativa
  Clone ID: PAT_MRT4530_41431C.1
aacgtcatagtggccgcccagtacctcaactccaagtacaacaagctcaagatggagctcgtcctcacggaggcgctccggcgactccccggcacgccgagggagttcaagcacgccgccatacggaaggccaccaacaacttcgacgaggggaggaagctcgggaatggcggcttcggcgccgtgtacaggggcacgatacggtcgtcggaggttgcggtgaagaggttcacccgcgacgagaaccggtgctacgacgacttcctcgccgaggtcgacatcatcaacaggctgcgccaccggaacgtggtgccacttgtcggatggtcttatgagaagggagaacttctgctgatatacgagtacatgcccaacggcagcctcgaccggcaactgttccccaaggaaaaacccggaagaatcctcggatggacgacgcgctacggcatcgtgacggacatagccgcgggtctccactacgtccaccacgagcacgagcacatggtgctccaccgcgacatcaaggccagcaacatcctgctcgacgccgccttccgtggccgcctcgccgacttcggcctcgcccgcatcgtcgtcggcctcgacaagaactcctacaccgacgtcggcgtcgccgagacgtgggggttcatcgcgccggagtactccgtcagccacaaggccacccgcaagacggacgtgtacgcgttcggcgtgctgctgctcgagatcgtcaccggcaggcgagctctctgcaagttccaggggacgttccagctgctcgtcgactgggtctggaggcttcaccgggaggggagcctgctcgacgccgtcgacaatggcattgcttcttctaccgaagagtttgatgcggatgatgccattcggttgctgctgcttgggctggcgtgcagcaacccgaacccgtcggaccggccgagcatgacggaggtggtgcaggtggtcgccaggtcggcggcgccaccggatgtgccgcccgtgaagccggcgttcgtgtggccgcccgagggtggggtggaggtggactctgatgacgtcgactcgtcggggagcgatgtctatgcgagtttgtgtgaatgggagg

SEQ ID NO: 37730 - DNA, 460 bp, Oryza sativa
  unsure (1)..(460): unsure at all n locations
  Clone ID: PAT_MRT4530_41432C.1
atttgggaagcttgcagaggcaaagaaggaggagaagaagccggatcaggccaagaaggaggagaagaagcagcctgaggaaaagaaacctgaggagaagaagaaatccgaggaggagaagaagaagggcgacgagaagaaaccggaggaaggcaagaaggaagagaagaaggaggagaagccaaaggtgaaggnggngaccanggncacgccggcgccgtcgtcgacgacggntgaacctgcagttcaccaacatgtgcggcatctgctacccgtggccgtgcagcgaccccacccactggggcgccggcttcgtccacccgcagtggccgcagttcgaagccccggcggcggcgttgccacttttcgtccctggccaccaccaccaccanttccgccattgggcgcgtttcggcgccgaantgccattcggaggcccttgtacttcggttggttcgga

SEQ ID NO: 37731 - DNA, 1898 bp, Oryza sativa
  Clone ID: PAT_MRT4530_41433C.1
ggccccccctggtgcagaaagggaaaatactgtttagaccaactgcgtgtttaaatctgctgtaccagcaggaagttacaaataattcttcagaagtgttttttcagtaacattgtgttctaatttataagtacattgtatattgtattaagtttgtaacgctcttgaatgaattaacattggcctataaacacactcaatatctgataggatttcggctatacaaaattccaggaagaatagaacatccctatcctttattgctcgtttaagatattttgcttcctcatttgggctaaacgacgctccttattcaactttagagctcttcctttctcttctccagacctatagattttcttttcagtggttgacatgttttcagttttatccattttgatgtcaaagatatcatgtagcaatccattgtcttgtgcatgcttcagaaatcctcgcccaaggaaccgcctcaaatagttcaactgtattgattcacgccatgatgtaactcttaaaataccatgcttgcctgcaattctaagtgattcttcaaggcactcaccagtcttaataaaatctgagattcgttggaataagtctctttgatcattcagatttttcttgtcagcacctcttccccccgcttccatagagagattatagactagaccagatattttggccttcaatgcttgcatattcaagaaaagttggttcttagaaccactagcttctgcagtgtccacctcaacttcttcattggagaaaacatcaagcagttttaactcgaagcacagtgctaatgcttcaccagcagccatccgcacagcacggtcctccgcttctagaagagcagaaagaaatgtaattgactctttccaagagtcaacgtttctttttgatgaaacaatagttgtcaaaagaagtgcccatgcagacacagcagctgctaacaagggaggctttggttttctgacaattccaacattggatcctgacttagggtgaatcacatcccagatggctttcatagatagctgggtttcagatagatcagttgcaccaacaaatgtgacaacagctaagcaatcaagtgcagatatcatttttgaagcatcaggccaagtttggaggactctcagaagctgcagacgggattcatccattatttcatgagaactacttccagcaccaagtgtaatggccagtaagccagtggtgtgacaagccagacagacctcctttatggatcctttttttattgaattgataaattggctcaaaagtgtggcatacttgttttccactaaatcaagtagcacaaaactttcaaaagcatcaacaagagcgcctaatgctgcctctcttgtggatcccctcttctcatagagatcgtcgatgtatttgtcaagaacaaaatcctgcgagctaacttgctcggtggcctgcgcgagctggaggtcggacagcgccgtcgacaccgaactcacgctatccacgtcactacctccgtcaaattggtcctctccaccaccgccgccgcctcctcgaccacccttgtttttcttactcttgcccatggcagcggtgaggccgtcgaagaaggagctaagatctcaagaatcgaagaaccgcccccgaaaccaggagcggggggggaccagtcagcggtggatcgaacagaggtggccgtcgtcagctggggcggcgaggaggaactgggagaacgagcaggtggcggaattggatggggagaagcgggggctctcttcgcgggttggatcgaattggccgtggagacgcagagccatgtgaattgggcgatggggacggaaggaggggaggaagaggaagaagacttttcttttcttagatttctttatccgctcgttttacga

SEQ ID NO: 37732 - DNA, 562 bp, Oryza sativa
  unsure (1)..(562): unsure at all n locations
  Clone ID: PAT_MRT4530_41434C.1
ctatttttctggatcgtacaccatccacttccacgttgatttcccggatcgaacaagagggagagggcacaggcggcgacggttggcggcgtgcgactgttgactcgggcttcctccggcggccggcgacggcgacggcttgtggcagcggcgggcgggcggctgcagcatgcgacggtcttggcgaggccgtaccccagggcatcctcgtcctggcctcgccgccctcgacctcgattcgccctggatctcgatgccgagtttggatctggagatgcggggtcgcatcctcccgctgtcgctagccgattcgccttcttgccagaccatcaccactcttctcgtgactgcgagaggtacacatcggctgcaccaatttgctctctttttgcatttttctcattgtgtgggcagtggatgtggtgaaagagcttggcgcgtgaggtcacgatgcagcccaaatgcgatctgcatcacgtggttcaatctgatgcgtgcgtangtcaggagtctcgttgagtccttttttttcttttggactatttgaagctctaattttttg

SEQ ID NO: 37733 - DNA, 279 bp, Oryza sativa
  Clone ID: PAT_MRT4530_41435C.1
atggcggtgacgcgtgatagtggctacggctcgggagaccgacaagtaggcttggcaaggcggcggtcggcgtgggccgcgcagcggcgcaggcacaggagcgagcatcaagcagctgtgcagttcagcacgagatcgagcaggcacgggcgcgtcgtggattcaggcgccgccgcgcggcagtggctaaacgggtacaggaggctggcagcgagtaggctcaccgaggaaaacgaagggcaaaatattctaaggatagattactctacttcagtctaa

SEQ ID NO: 37734 - DNA, 2241 bp, Oryza sativa
  Clone ID: PAT_MRT4530_41436C.1
atggctgtcctcctaaacccttcgtcttcctcaagcagcaaagcaacgccgcggccgccgcagcagcagcagctactactactcttgctccacttgctgctcgttgccgtccccgccacctctctcaccttcagctatgacgcggactccttcgtctccgaagatttcaggcaggaggacgacgccatggtcaccgccggccggatcgagctgctcggtgaggagttcgcggcgcgggccaggggacgcgcgctgtacaagcggccggtgcagctctgggacggcgccaccggcgaggaggccagcttcgccgcgagcttcaacttcaccatccggtcggtggctggcaggggcaacgccctcgccggccacggcatgacgttcttcctcgcgccgttcatgcccgacatgccgcaggagtgctacgagggatgcctcggcctcttcgaccagagcttgacgaggaacacggcgagcgccaccatgggcaacgcctcaggcgccgccagcttcgtcgccgtcgagttcgacacgcacatggacgggtgggacccgagcggccggcacgtcggcgtcgacatcaacaacgtcgactcgcgccgcgggaactacgtggtcttgccggaggacagcctcgtcgacgccggcgtgatgtccgccacggtgtcctacgacagcggcgcgaggcggctcgacgtcgccctcgccatcggcggcggcgccgcaaccgcaacgtacaacctctccgcggccgtccacctgcgaagcgtgctgccggagcaggtcgccgtaggcttctcggcggccaccggcgaccagttcgccagcaaccacaccgtgctctccttcaccttcagctcgacgctgccgacgaggacgaccaacccgccgccgccatccacctcgtcagccaagacggctcatctcagcgccgccgtggccgcagccggcatagcactgttactcctcgtcctcgccatcaccatcctcattcgccgagcgaggaaacgccgccgacgcgacgacggcgtctcctacgacgactccctcgacgacgacgacgaggaggacatggagtcgggcacggggccacggcgaatcccgtacgcgcagctggcggcggcgacgggcgggttcgcggagatcggcaagctcggggagggtgggtcggggtctgtgtacggcgggcacgtgagggagctcgggcgggacgtggcgatcaaggtgttcacccggggggcgtccatggaagggaggaaggagtacaggtcggaggtgacggtgatcagccggctgcggcaccggaacctggtgcagctgatggggtggtgccatggccgccgccggctgctgctggtgtacgagctggtgcgcaacggcagcctcgacggccacctctacagcaacaaggagaccttgacctggccgctcaggtaccagattattaatggactagcctccgcggtgctgtacctccaccaggaatgggatcagtgcgtcgtccatggcgacatcaagcccagcaacatcatgctcgacgaatccttcaacgccaagctcggcgacttcggcctcgcgcgcctcatcgaccacggcatgagcctccagaccatgaccgccgttgccggcacgccgggctacctcgacccggagtgcgtcatcaccggcaaggcctccaccgagtccgacatgtacagcttcggcatcgtcctgctcgaggtggcaagcgggaggcgaccaatggtagtgacacctcgtgcagccgctgccaccgcgggtggtgggaaggacgacgacgacggcggcggacaggtgttccgcctggtggagtgggcgtgggagctctacggccggggtgatgatgatcagtcgtcgctcgacgccatcgccgacacacggctcggcggcgcgttcgaccggtgggagatggagcgtgtggtgggcgtcgggctgtggtgcgcgcaccccgacccgaaggcgcggccggcgatcaggcaggcggcggaggcgttgcagtcgaggaagttcaggatgccggtgctgccgccgaggatgccggtggcagtgtacctgcagccgttcgcggcttccaccatgaagtactacggcgacagcatgacctccgttgggtcggaggttgttggttactcgtcgaccagccttgcgacggcgacgctgtcgtccagctctagcttgccatcggccatggctaacaatgacagcttgagcccaagagaatga

SEQ ID NO: 37735 - DNA, 589 bp, Oryza sativa
  Clone ID: PAT_MRT4530_41437C.1
ttttttttttttttttttttgggagtaaaatgagactttttttcaacaatgactcccgcaatgagctatctatcttatccaacaacaagctgcttgccttcaatgattacacgttcgaattcgccaggaaattctcccatatttaataattcattcttcttactcctacacttctccttcagtgatcatatcgagttacaggtctaacacgctgagagttgagagttgctgaggctgggaatacaattcatcagtatactaacaccaaaagttctctcacatatagccaacctaacaggtaaacatcacagccagctcaaccgctagcccatacatcatcttatctctagttactacccatatttgtaccccaagcatagattctatctcccgtcttcatccctttcttcctccacctcttccttctcatactcgggatcagaaccgtctaggtctgaaaaatggattctcgctattggaatcatcatcctcatcctctgacaactccgcaggataatcatataatgggttatcctccgcatttgaatcatctgtaccatcggggccggctccatcataaccctcgtgc

SEQ ID NO: 37736 - DNA, 402 bp, Oryza sativa
  unsure (1)..(402): unsure at all n locations
  Clone ID: PAT_MRT4530_41438C.1
ttcccngggctgcccgattcngcacgaggttttgtncatgtatngtagccaataatctgatgangctgtccngcttactgtagctgttganttccttgaanaatggcgctttccaaatantcccattccacacttgtccatgangccggaacacactgtcctcccctaatctaccactgcgggggggggggnnccgactattgggccncatggaaatgtnacntcacccntcttaaatctgtctcccatctctctctacttctttgtctgtctgtctgtctgtcattactctgtttccattccgtngtgtgtttttctctttattgtgttcctttctcnttctttcagtttctttatgtctatctctctctatctgtctctctctttatcttctctgtctgt

SEQ ID NO: 37737 - DNA, 1483 bp, Oryza sativa
  Clone ID: PAT_MRT4530_41439C.1
gcacgaggcgtacgtacacagtagtagtagcagtagtgcgtacacgatgctgctcctcaaggccgtgtaccgcgtggtggtgaacaacttcctcgccctcgccgcggcggccgtcgcggccgtgctgctccggcgccccgacgagctcgccgcgcggctgcgcgcggtgtcgtccccgctgcacgccgccacggcggcggtgctcgcggcgggcgtggcgaggctggtgcgcgcgcggcgggcgcggggcgtgtacctggtggagtacgggtgcttccgccccaggccgtgctaccgggccccgttcgcgacgtgcctggagcacgcccacctgatgccgtacctggtggacgaggagagcgtcgcgttcgccatccggctgctggagcggtcggggctcggcgacgagacgtgcgtccccgacgcgtaccactacatgccgcccgaccggagcctcagggcgtcgcgcgacgagtcggagctggtcatcttctccgccgtcgacgacgtgttcgccaggtcggccctgacgcccgccgacatcgacgtgctcatcgtcaactgcagcatcttcaccccgacgcccgtgttcgccgacatggtcgtcaacaggtacaagctccgcgccgaggtgcagaacgtgaacctgtccgggatggggtgcagcgcggggctcgtgtccgtcggcctcgccaagaacctcctgcaggtgtcgcccccgggcaccaacgtgctcatcgtctccacagagatcctgtcgtcgcagtactacgtcggcacggagcgcgccatgctgctgcccaactgcctcttccgcatgggcgccgccgccatgatcctctccaactcgcccgaccacgcgcggttccgcctcggccgcgtggtgcgcaccgtcaccgcggcgcgggacagcgactaccggtgcgtgttccaggaggaggacgagcagggcaacacggggatccgcctctccaaggacctcgccaccaccgccggccacgcgctcaagagcaacatcgccgcgttcggcccgctcgtccttccggcgtccgagcagctgctggtagccatctccttcctcaagcggaagctcaagcagttgagcggccacgcgggcaaggtgaggctgtaccggcccgacttccgcacggcgttcgagcacttctgcatccacgcggggggccgcggggtgatcgacgaggtgcagcacgggctcggtctctccgacgacgacgtggaggcgtcgcggatgacgctgcaccggttcgggaacacgagctccagctcggtgctgtacgagctggcgtacctggaggccaaggggaggatgaagagaggggatcgggtgtggatgatctccttcggcgccggcttcgactgcaacagcgtggcgtgggagtgcgtcaagccggcgcccgacgccgacgggccctgggtcgactgcatccaccgctaccccgtccagctccccgaaatcgcctaa

SEQ ID NO: 37738 - DNA, 288 bp, Oryza sativa
  Clone ID: PAT_MRT4530_4143C.1
gtggtggacaagaatgaccggtctggcactggtcgcgtcagcaacgggcagccacgatcccacgttgcgcctgtctccgccgggagtggagatccgcaaaaacacaggagtagggtattacgcttcgcagcggcccgaacctgtatacatcgtcgtgtctcgtgtgtcttgccgacgagtaatcttaccacatacagagagagcttgagacctcaccctaagcccccggccgaaccggcaaaggggggcctgcgcggtctcccggtgaggagccacgagctccgtcat

SEQ ID NO: 37739 - DNA, 1828 bp, Oryza sativa
  Clone ID: PAT_MRT4530_41440C.1
atggcgagcgagagcgagagcaacggccaccaccacgccggcgacgaggcgcgcgcggagaacagcggcgcggggtgcctccacggcggcgacgacggcggcgggacgcccaggacgacgccggagatcaggtacaccaagctgttcatcaacgggcgcttcgtcgacgcggcctccggtaagacgttcgagaccagggacccccgcaccggcgacgtgatcgcccgcgtcgccgaaggcgacaaggaggacgtcgacctggcggtgaaggcggcgagggaagcattcgaccacggcgaatggcctcgcatgtcgggatcagagagagggagggtcatggcgaagtacgcggaggtggtggagcggcacgcggatgagctggcggcactggagagccttgacgccggcaagccgctcgccgccgccagggcggtggacgtcggcgagtgcgtcggcatcctgcgctacttcgccggcgccgccgacaagatccacggcgagacgctcaagatgtcgaggcagctccagggttacaccctccgcgagcccctcggcgtcgccggcctcatcgtcccctggaacttcccggccatcatgttcttctccaaagtctcaccggcgctcgccgccggctgcaccgtcgtcgtcaagcccgccgagcagacgcccctcagcgccctgttcctcgcccacctatcaaagcaagcaggagtaccggatggggtgatcaacgtggtgacaggattcggcccaacagcgggagctgcaatttcatctcacatggatgttgacgtggtggctttcacgggatctactgaggttggacggcttataatggaggcctccgcgaagagcaacctgaagccggtggcactcgagctcggcggcaagtcgccgttcatcgtcttcgacgacgccgacctggacaaggccgtcgagctcgccatcggcgggaacttcttcaacaagggagaagcctgcgtcgccgggagccgcgtgttcgtgcaggagggcatctacgaccggttcgagcagaagctagcggacaccatgaagagctgggtcgtcggcgaccccttcgatcctcgcgtcaatcaaggaccacaggtggacaaggctcagtatgagagggtgctcgggtacatcgagcaaggcaaggcagaaggggcaactgttctcacgggagggaagccctgcggtaagaaagggtactacatcgagcccaccattttcaccaatgtgaaggacgacatggtcatcgcgagggaggagatcttcggccccgtcatgtgcctgatgaagttcaagacggtggaggaggcgatcgagagggcgaacgggacgaggtacgggctggcggcggggctggtgacgagggacatcgacgtggcgaaccggatggcgaggtcgatccgggcaggggtggtgtgggtgaactgctacttcgccatggacaggagctgcccgttcggtggccgcaagatgagcgggttcggcaaggacgacagcatgcacgcgctcgacaagttcctcgccgtcaagtccgtcgtcacccccgtccatggctccccctggttctgagttctttctggatctcgtcgccgatcgagtcggccatgcgtatgtacacatgttggtgttgttggatttgctgggtggtggagtatttgtaacggtggaagattattacagagagtcaataagttgcattatccattattttccttgtatatgccagttggtgttctcctcctttttatactacctttggaagccaaattctccttttaaaaaaaaaaaaaaaaaactcgagactagttctctctcc

SEQ ID NO: 37740 - DNA, 289 bp, Oryza sativa
  Clone ID: PAT_MRT4530_41441C.1
aagcttggctatgtaatggaacttgttttgccgtagtaggctgggatatgatgtggcaatggcctctaactattgctgttgtgtacataagcatatgaatgcatgatttgtaatggtcgggtgagcccttaatttcatgtaagcaacttaaattgcagtgttaaagagtttggtaatggaatgacatgattagaacttgaactggaaaaagaaaaagcttagaatttggaaatgtcatttggaaatggaatgacatgattagaagttgatctggaaaaaaaaaaagctt

SEQ ID NO: 37741 - DNA, 600 bp, Oryza sativa
  Clone ID: PAT_MRT4530_41442C.1
atcttgtgtcccgttgtcccctggttgtcctcagatcccactgcgactacatcgttcaacgatcgcgcgtgaatctaaacgtggagctacagcgcaacaaccaaggtgacctgaagacaagttcaacctgaagtcacccgaagaaaggagtattcttgcgaatcaaacttggttgaggtggccgtctgggatcttgacatctgaagcttgacatctgaagcaagatgatgatgttttgctgtgatcacctgtgctcattacatggtgcttcaggaatgacttgtctaatgttggtaattgttggtgctcatcaattttcatggttattgttggaccgactttccggtatgctggattaagctgttgcagctttgaagtctggggtgccaaccttgtttggactaattgccagatgtatcattataaatttcttaaaagaaagttgagcaccatggaggttctggataacagttccgtctctgctgcggaaggtttgttttcttgaggtcaatccggaggtaaatggctgtaatttgggtcgtgtaaacagcatggcggctacatgttataccaaaaggataagacactcgtttttatttt

SEQ ID NO: 37742 - DNA, 408 bp, Oryza sativa
  Clone ID: PAT_MRT4530_41443C.1
atggccataaggcccgcccggcacggcctagcccaggcactggctaggcacttcatgcccacgggctacacctcaggcccaggcacggcccaccacccgggcacgacactgctgttgggccggccgggccaaatcactgggccttgggccatatggtcatctaccgtcgagggcaacgagtcagggtggggcggcaacgcgcgacggcggccagcgagtcggggcggggctaaagtgtgtgacaatgtccgagactacacgagcgacgacggtgaggcagtggagccggtggtggtcgccggggcggtggccggcagagcgggcgcgacgggggcagagctggcccagcgggcgggcgagcgcacggagaagaagctaggcggcggccggcggagcgggctgtcgtag

SEQ ID NO: 37743 - DNA, 429 bp, Oryza sativa
  Clone ID: PAT_MRT4530_41444C.1
atggacttgctcatccttcggcggccatggatctatcggcggaagctgctgctgctgctcgtcctcgcgttcggcgagtcagatctggagccgatcccactgcgactacatcgttcaacgatcgcgcgtgaatctaaacgtggagctacagcgcaacaaccaaggaatgacttgtctaatgttggtaattgttggtgctcatcaattttcatggttattgttggaccgactttccggtatgctggattaagctgttgcagctttgaagtctggggtgccaaccttgtttggactaattgccagatgtatcattataaatttcttcgttcgggagatcctccgttgattgttgggcttacgctctccggttacggatggaaggtggttcaattccaccaaggtcctgttaaagttggatttgttatatag

SEQ ID NO: 37744 - DNA, 1823 bp, Oryza sativa
  Clone ID: PAT_MRT4530_41445C.1
gttcttcgcatcggtcgatctccctcctctcctcctccgtcgcgccgcagacgccaaccccgatcccgatggccgcctccgcctccgccgccggcgccggcgccggcaagtcgctgttccagaccttccgcaagttcttcaagaagccgtgggagatcaccggcccgtgcgcctcccccgagtaccgcagcgcgctcccgggcgccctggagtaccgccaccgctgcccggccaccctgacgaaggacacgatggccgtcgtgcccacctccgagcccgagaccgtctacgacatcaagtactacacgcgcgaccgccgccgtgaccgcccgcccgtccgccgcaccctcctccgcaagcccgacctcgagcgctacatggccgccaagcagttcgaccccgccaaggacttccccgtgccttacgtgaacaccgccgtggaggaggactacgacgccgtcggcggcggctaccagaagtgatggtcgaggtatctacctttcttgtgcttgcacttcgtcagaagttgcattgtcttcatttgtgcccttgaaatccattttgtatttcagaggaaaaaaaatctggttgtaagagatgaaggcggcaaggtaagagaacatgtaacaagcgaggtgcttgtgtctgagggtcaaaagaaaaagagacgaaaaaaaaacgagagatgtgacatcgcaagattggcctttgccatgttgggtgcgctcgcatggcaggccaccgtaataaagatgatctttttgtgtcctggggggagttcgcacgggggttattttgtttagccccgggttctccccccaatcttgtgtcccgttgtcccctggttgtcctcagatcccactgcgactacatcgttcaacgatcgcgcgtgaatctaaacgtggagctacagcgcaacaaccaagaaattgtagcattctctcgtcgttttaaggtgacctgaagacaagttcaacctgaagtcacccgaagaaaggagtattcttgcgaatcaaacttggttgaggtggccgtctgggatcttgacatctgaagcttgacatctgaagcaagatgatgatgttttgctgtgatcacctgtgctcattacatggtgcttcaggaatgacttgtctaatgttggtaattgttggtgctcatcaattttcatggttattgttggaccgactttccggtatgctggattaagctgttgcagctttgaagtctggggtgccaaccttgtttggactaattgccagatgtatcattataaatttcttcggtgagagttgagcaccatggaggttctggataacagttccgtctctgctgcggaaggtttgttttcttgaggtcaatccggaggtaaatggctgtaatttgggtcgtgtaaacagcatggcggctacatgttataccaaaaggataagacactcgtttttattttacacgatgagttacactactatattagctgacgtttttcacaaggttatgtttgatttgagtttattatgtagttaataatgagctaaaagtaagctgatgaagtcttttgtagggcagaaaacaccaagtcaaattttgaagggctctattgttttggtaaaaatcactcgagtattgttttgttttttcagagttgtgtagtgtgtttaggatgttttggttctgtttaaagaagtgcacgcacaaactgaggtaaacggttcaattcaaaatactattagatcttatcgtatttggtaaaaaaaaaaaaaaaaaaaaaaaaaaaaaaaaaaaaaaaaaacaccaaaaaaaaaaaaaaaaaaacctcgtgc

SEQ ID NO: 37745 - DNA, 2750 bp, Oryza sativa
  unsure (1)..(2750): unsure at all n locations
  Clone ID: PAT_MRT4530_41446C.1
ctagcgcgtggagtggcgggggccgggcgatgacgacggcgatgacggcggggacggtgtggagcaaagcggcgacacgggcgacaggcgcgggcaggcgcggcagaggctgacggcggcggcgaccaggcggtcggccaccacggcacgtgcgcgcgggaagcaacgggcggcgcggcgatttgagcggcgcggcttgggcacgcgtgctggctcacggggccgaccggctgcgcggcagggcagtggggccgggcggcgcagacggcgcaggcgcggcacgggcggcgaccacgcgggcgcgcgcacgcgaacaacggcgcgcgggaagcggcagcgagggagcggagagggagggctcggctcggcgcggctcacgcgcacacgcgcgcggcgcgcgtcggccacaaaccgcatcctcgtgttcgctcccgcaaacgatccggttaagcagatgacgcacgcagtgacgtcaaataccccgcaagttgcggtgtccttgtgcgatccagctgtctcagccaatggcgccgcgccacgtgcctcgcatcctggccgtccgagcacaaccgcctcatccggaccgtccgctcttagaggtccggttggggcatgctccgtacgagctggcgtggatgaagcggcggggcgagggaggaggctggtcgtcgcctggatcctctccatcggggcctcgcgcgatgatgtctctttgtattgataattattcgatgaactttcgataattattagatctaagagatgttgttcgagggagccgtgtgctgagatgaaggcggcaaggtaagagaacatgtaacaagcgaggtgcttgtgtctgagggtcaaaagaaaaagagacgaaaaaagaacgcgagatgtgacaacgcaagattggcctttgccatgttgggtgcgctcgcatggcaggccaccgtaataaagatgttctttttgtgtcctggggggagttcgcacgggggttattttgttaagccccgggttctccccccaatcttgtgtcccgttgtcccctggttgtcctctctctcagatcccactgcgattaaatcgttcaacgatcgcgcgtgaatctaaacgtggagctacagcgcaacaaccaaggtacaaaagataatctaaatgtgcaatattagtcgtaatcaaatttccatatcattcagcgtttcataattatcactgccttaaaatatccctagtcacataatattcctggatttactttaaattgcttgaattacttaattattattatcattgccagttaatatccctgataaacagcagtattatcatccctagaagtgcatctcacatattgactcaagttgattaaagttacgcttggtaattggtttaagagcagctggaatactacgcaattgttctaacgaatatctagtacttgctttgtatacttaaatatatccataagtcggtgtagtggtaatatttgcttccgagattatgtgctcagctatatactccgaactgtcaactatcagtttggaagtatgttatgttggtcaaatactattatgatgtttccagcatacgattggagaactctttgtccaatttaagtgaaataagctcttgttcttgcccagaatttacagcgctcgtgcgccttaatatcaactaattgtgtatgatttaaccgctcagctctttcactttgccctttctgtatttatgcatgtacgagaaggctagtaatgttttatatatttgcactgtgagaatttcttttcttggatagtcagcaatgtaacctcttttgcaagctgtagaatatgatcatatgttgtcctccttagcattatgttagtttctgtacgttgaagtacgagaatttatgttcttgaagcaaaaagttatttagcatttgtctattcatcatagtttgtactatgtagaaattgtagcattctctcgtcgttttaaggtgacctgaagacaagttcaacctgaagtcacccgaagaaaggagtattcttgcgaatcaaacttggttgaggtggccgtctgggatcttgacatctgaagcttgacatctgaagcaagatgatgatgttttgctgtgatcacctgtgctcattacatggtgcttcaggaatgacttgtctaatgttggtaattgttggtgctcatcaattttcatggttattgttggaccgactttccggtatgctggattaagctgttgcagctttgaagtctggggtgccaaccttgtttggactaattgccagatgtatcattataaatttcttcggtgagagttgagcaccatggaggttctggataacagttccgtctctgctgcggaaggtttgttttcttgaggtcaatccggaggtaaatggctgtaatttgggtcgtgtaaacagcatggcggctacatgttataccaaaaggataagacactcgtttttattttacacgatgagttaccctactatattagctgacgtttttcccaaggttatgtttgatttgagtttattatgtagttaataatgagctaaaagtaagctgatgaagtcttttgtagggcagaaaaccccaagtcaaattttgaagggctctattgttttggtaaaaatcactcaagtattgttttgttttttcagagttgtgtagtgtgtttaggatgttttggttctgtataaaaaagtgcacgcncaactgaggtaaacggttcattcaaaaaaaaaaaaaaaaaa

SEQ ID NO: 37746 - DNA, 990 bp, Oryza sativa
  Clone ID: PAT_MRT4530_41447C.1
atggagatcgacggaagcggagacgagtcagcggcggcggcggcggcggcgacgagcactgaccccggccgcggcaggaagaggccgccttccccctcaactccgactccgagcgacgacggggaggactccgacgacggctgggcggtgagcgacagcggcagcgaggaggaggaggaggaatacgacgacgaggaggagcaggaagggatgcaccgcccatttactgttgatgattttccaaggcttagtagtgaccattctgtgcagactgatgcactctatgatattccacatcttcgtcttcgaggcccttcaccactcagtcttttccgtgcattcaatgatcctctcactgacaaacgcatgcattggggtatggcatgtttaccattgactagccctgctcgaggtatttgcattacaagccgtgcactgtttgaattccaactctgtattcggactgaagactcacctgaggctgaggatgagcccataggtgaaacattgattgaaagatgcactgaattcaccaacattttaagatcagcatcattcaccaaaactgttcgtctgtatggtgagaagtgtggattggatgtgaagtttgctctgctggtaaatgcagttcaagcaacagttgatgttgagattatacattcacctgcttgtggccttaatttgaagttatatgccaaaaccagtggcttcagcgatgtgatccgtctcttccgaggtgttgcacaatctggtcgcagaattagatctcttgtggcggtggtacgacgtagtcaccttgatctttgtatcgaagggtctccagcagatatcggtcttggtgagaagctgccctgtgtaaggtgggagcacaaatttggtgctggttttcatagaactgcagatgaagtggtgaagcttggtgattttaccacaatttctgtgaaagttacatggaaagctgtcgacaagcatccgccgccgaagggatag

SEQ ID NO: 37747 - DNA, 150 bp, Oryza sativa
  Clone ID: PAT_MRT4530_41448C.1
atggtgaagaaattttttgaaatagactacacatcccgcgataaccgtgcaaatatcacggttatcgcggtaaaccgtgcgattatcgctctgaaaccacgattatcgcgcgattatcgcgataatcgtgctaccgctgggtggtggtaa

SEQ ID NO: 37748 - DNA, 1143 bp, Oryza sativa
  Clone ID: PAT_MRT4530_41449C.1
ctatcccttcggcgccggacgcttgccgacagctttccaggtgactttcacagaaattgtgctaaaatcaccaagcttcaccacttcatcttcaattccatgaaaaccagcaccaaatctgtgctcccatcttacacggggcagcttctcaccaagaccaatacctgctggagacccttcgatacaaagatcaaggtgactacgtcgcaccaccgccacaacagaactaattctatgaccagattgtgcagcaccttggaagagacggatcacatcgctgaagccactagttttggcatataacttcaaattaaggccacaaggaggtgaatgtataatctcaacatcaactgtagcttgaactgcattaaccagcagagcaaacttcaaatccaatccacacttctcaccgtacagacgaacagttttggtgaatgatgttgatcttaaaatgttggtgaattcagtgcatccttcaatcaatgtgtcacctttgggctcatcctcagcctcaggtgagtccgtctttggcttcacagatacagcttcataattgtaaattgcatgcctgaagacatagttgcgcagaggttccaagtcatcccgcaccgcaaaaaagccgaagattttggcacgtccaggctgagtatggcgatagccggagattttcaggtcaatgaactggagcaaattcttcgaaaggcacctacacccatttaagcaatcaacggccccagcgctgtcgacactgatttcagattcatcatcgagtcggtaataagaaccaaaccaatgcctgcgtttatcagtgagaggatcattgaatgcacggaaaagactgagcggtgacgggcctccaaggcgaagatgtggaatatcaaagagtgcatcagtctgcacagaatggtcactactaagcctgggaaaatcatcaactgtaaaagggcggtgctttccttcttgatcctccccgtcttcctcttcctcttcctcctcctcgtcgctgacagcccagctgtcgtcggagtcctccccatcgtcgctcggcgtcggaggagtcgagggggaaggcggcctcttcttcccgcggccggggtcaggggtcgccgccgacgactcgtctccgcctccgtcgacctccat

SEQ ID NO: 37749 - DNA, 726 bp, Oryza sativa
  Clone ID: PAT_MRT4530_4144C.1
atggcggccgacctcctgcgccagtttccttcccctccggctgctctctcccccttccaaccctatttaaaccctccccgcacctcctccgtccgtttccgcctctcgccgcccttcctcctcaccggattcgagctcgtgacgtcgctctctccctctgccgtcgccgccgagctccggtccgctgccgtcgttgccccggaccgcctcccacctcggtgccgcctccttcggcttcgccgcatcctcgccgacctcgtccacctctccgtttcggtcgccgaccgctggagcgccgccgaccccgtcgacccgagccgcgccgccgcctccctccgcttcagctgcctcctccgtcgccgccgtcgccccgaggtgagccatggaccgttgcctcctttccccctttcctcccctctctcggccgccgcttcgccgcgccggtggtcgccggcggcgaccatcggggcgcgggggcccgcctcccgccgaccgcgccggcttggccgccctcgggcgcgccgagtggctgccgcgtggggcccggccgtcagccgcccgcgccctcgggtgcggctgacgcgtggggcccacggcgccggccggtgcgagcccgggtgcgcccggtccaccgtggaccacgctgcagcttcggaagatccgctcttcgtggaggttgaagccgacgtttgggaaagcgagcaaggcaagtcacatcatccttga

SEQ ID NO: 37750 - DNA, 446 bp, Oryza sativa
  Clone ID: PAT_MRT4530_41450C.1
gaaagcaccgcccttttacagttgatgattttcccaggcttagtagtgaccattctgtgcagactgatgcactctttgatattccacatcttcgccttggaggcccgtcaccgctcagtcttttccgtgcattcaatgatcctctcactgataaacgcaggcattggtgcctttcgaagaatttgctccagttcattgacctgaaaatctccggctatcgccatactcagcctggacgtgccaaaatcttcggcttttttgcggtgcgggatgacttggaacctctgcgcaactatgtcttcaggcatgcaatttacaattatgaagctgtatctgtgaagccaaagactccctgcttgaggtatctgttgacaagccgtgcactgtttgaattccaactctgtattcggactgaagactcacctgaggctgaggatgagcccaag

SEQ ID NO: 37751 - DNA, 1026 bp, Oryza sativa
  Clone ID: PAT_MRT4530_41451C.1
ctatcccttcggcggcggatgcttgtcgacagctttccatgtaactttcacagaaattgtggtaaaatcaccaagcttcaccacttcatctgcagttctatgaaaaccagcaccaaatttgtgctcccaccttacacagggcagcttctcaccaagaccgatatctgctggagacccttcgatacaaagatcaaggtgactacgtcgtaccaccgccacaagagatctaattctgcgaccagattgtgcaacacctcggaagagacggatcacatcgctgaagccactggttttggcatataacttcaaattaaggccacaagcaggtgaatgtataatctcaacatcaactgttgcttgaactgcatttaccagcagagcaaacttcacatccaatccacacttctcaccatacagacgaacagttttggtgaatgatgctgatcttaaaatgttggtgaattcagtgcatctttcaatcaatgtttcacctatgggctcatcctcagcctcaggtgagtcttcagtccgaatacagagttggaattcaaacagtgcacggcttgtaatgcaaatacctcgagcagggctagtcaatggtaaacatgccatacccaccagtaaatgtgtaataatgcaatcaagagaagtgcaatgcatgcgtttgtcagtgagaggatcattgaatgcacggaaaagactgagtggtgaagggcctcgaagacgaagatgtggaatatcatagagtgcatcagtctgcacagaatggtcactactaagccttggaaaatcatcaacagtaaatgggcggtgcatcccttcctgctcctcctcgtcgtcgtattcctcctcctcctcctcgctgccgctgtcgctcaccgcccagccgtcgtcggagtcctccccgtcgtcgctcggagtcggagttgagggggaaggcggcctcttcctgccgcggccggggtcagtgctcgtcgccgccgccgccgccgccgctgactcgtctccgcttccgtcgatctccat

SEQ ID NO: 37752 - DNA, 466 bp, Oryza sativa
  Clone ID: PAT_MRT4530_41452C.1
gtcaaatatagacaatgatgtgataaatgatagcgcaagaaagtttaaaggagtttatttaaagaaggcatttcctttcagattcatcatcgagtcggtaataaggtccaaaccaatgcgtgcgtttatcagtgagaggatcattgaatgcacggaaaagactgagcggtgacgggcctccaaggcgaagatggaatggtggactgccactgcatttaaaccagaaatatatgttgcctatcatcaagaagagcaagaactctgtggctagcgcactaacttcttggtcctcttcgtcttcctcttcctcttcctcctcctcgtcgctgacagcccagctgtcgtcggagtcctccccatcgtcgctcggcgtcggaggagtcgagggggaaggcggcctcttcttcccgcggccggggtcaggggtcgccgccgacgactcgtctccgcctccgtcgacctccat

SEQ ID NO: 37753 - DNA, 405 bp, Oryza sativa
  Clone ID: PAT_MRT4530_41453C.1
atgagtgctgatgggaagaacaggacgctccaggaacacagcagtgccgctgctcatcgcattgcacggttcggtgagacgaatccgcaaaaggcgggaggaaagccaggggaaacaccgcggtttcagtcggagtgcgctgtgcatttggctgctgtaccgcggcatatggcggtctgtatccccgccggtcccgcatcggatgtcggcggaatcggcgctaccggaatccccaaaagccgcccaccggaaacaaaatgccgcccacttgtcaaccgtccagaaaatatttgctgctgctatggtgggctcccggtgaaagctattcaggccgtatatacggtccatgggctaatgcctgtatcgggctcaaatgcagtgggtcgatgctttgcccacgaatga

SEQ ID NO: 37754 - DNA, 1355 bp, Oryza sativa
  Clone ID: PAT_MRT4530_41454C.1
tttgtttagcaccgaaataagaattcaattagcatcacgcaaatgtttacaaaagtttatcattgctctagcaagattgcccaagacattagggcagaccaaagtttagcatgccaagagttaaactctatattaatacatggaaatagctcacaaaagttgccacacataacatcttccagtttttactttgcatagaagctccactatcccttcggcgccggacgcttgccgacagctttccaggtgactttcacagaaattgtgctaaaatcaccaagcttcaccacttcatcttcaattccatgaaaaccagcaccaaatctgtgctcccatcttacacggggcagcttctcaccaagaccaatacctgctggagacccttcgatacaaagatcaaggtgactacgtcgcaccaccgccacaacagaactaattctatgaccagattgtgcagcaccttggaagagacggatcacatcgctgaagccactagttttggcatataacttcaaattaaggccacaagcaggtgaatgtataatctcaacatcaactgttgcttgaactgcatttacaagcagaagaaacttcacacccaacccacacttctcaccatacagacggacagtttcggtgaatgatgttgatctcaaaatgttggtgaattcagtgcatccttcaatcaatgtgccacctttgggctcatcctcagcctcaggtgagtcttcagtccgaatacagagttggaattcaaacagtgcacggcttgtaatgcaaatacctcgagctgggctagtcaatggtaaacatgccatacccgtctttggtttcacagagacagcttcataattgtcaatcgcatgcctaaagacatagttgcgcagaggttccaagtcatcccgcaccgcaaaaaacccgaagattttggcacgtccaggtttcagattcgtcatcgagtcggtaatcagaaccaaaccaatgcctgcgtttgtcagtgagaggatcgttgaaggcacggaaaagaatgagtggcaaagggccttgaaggcaaagatctggaaatctataccgcgcttcagtctgcgcagaatgatcactactaagccttggaaaatcatcaaccgtaaatgggcggtgcatccactgcactgcgccgcaccttcttgatcctcctcgccttcgtcttcgtcttcctcctcctcctcgtcgctgaccgcgcagctgtcgtcggagtcctccccgtcgtcgctcggagtcggaggagttgagggggaaggcggtctcttcttcccgcggccggggtcagccatcgccgccgccgccgactcgtctccgcctccatcgacctccat

SEQ ID NO: 37755 - DNA, 385 bp, Oryza sativa
  Clone ID: PAT_MRT4530_41455C.1
gctttacttgaggaagcacacatgccattcaaaccatttctcttattttaccatcaaactttgtctgcccttgtgtcaatagctggctaatatttactgaaagcgcatgtaattaatttttatgccttttctttcctttctgttatctaatttcggggtttagtcaaagtgagagcagttaattttcttgaaagagtctaagatgattagatgaacaacgacccaggaaattgcctgcagctgacatgtagatataagcaatcagtatttgaaaacaatagatgaatcattgatttattaaggtgccatgtttgtatttgccttcagtttcatcttgcattttgctttagtaacaactgaatattggttcttttaccaatttttg

SEQ ID NO: 37756 - DNA, 384 bp, Oryza sativa
  Clone ID: PAT_MRT4530_41456C.1
caactgactggagtatgggaagcgccctctgcccatgcacagagcctgaacataatgtatccacacccctgacaagctggaaagactactataggtggagatcgcttcctatgcaatcacctgttgctgttttacttcactggccacttactttatatcattgcgttcaactatcgcaccttcaaaccttaaaatatgatggccaagacactctatgtattcactatttaggacctgagaaagaactacatcagcttgcggggtttggggaactacgtgcactatttccaggtgtccatatttacattgaacttgtgggaccagcagttccaaaatctaaggaaggagagccttgaactatttcaaactatgcacaatgttgtg

SEQ ID NO: 37757 - DNA, 156 bp, Oryza sativa
  Clone ID: PAT_MRT4530_41457C.1
cgtctgtgttgaatctgtgggacgttcctctgcaaggagagctcagcctcactggtaccggctgtctccggcctggcctccgtggcctacacctcactggaccgatcccatctgatcttaaaacgctgcatcgagggaggatagtaagtcttgccc

SEQ ID NO: 37758 - DNA, 1761 bp, Oryza sativa
  Clone ID: PAT_MRT4530_41458C.1
atggagggagtgactcaagtttcaaaggaagataaagtggaactaaccaaaccttttagtcttgaggaagtgaaaaaagtagtctttgaaatgagacaaaatagagctccagggccagatggtttccctgctgaattctatgtgaaattttggggcattattaaatttgagttgctggatttgattaatgattttcacaatgggtttttggaggttgaaagattgaactatggaattgttacccttgtcccaaaaacaaaagatgctgagcagattcaaaaattcagaccaatctgtcttttgaatgtgagtttcaagatcatcactaaagttttgatgaacagattggataggatcatgacttatatcatttctaagaaccaaacagctttcctcaaaaatcgtttcattatggaagggattgttattctacatgagctactcaactctttgcatacaaaaaaatcaagtggcatcctttttaaggttgatttcgaaaaagcatatgatatggttgattggggtttcatttacagaatattgcactccaaaggtttccctgatcagtggtgcgactgggttatgaaggtagttagaggtggaaaagtggccattaaagtaaatgatgaggtgggtccatattttaacactcataagggattgaggcaaggggatccactttctcccctgctgtttaatttagcagcagaagcactcactctattggtgcagagggctgagaacaattccttggtagaaggcctccccattaatgagaataacaaagtgacaattctccaatatgctgatgatacaatttttatgatcaaggatgaccctgaacaagccagaaatttgaaattcattttatgtctctttgaacaactttctgggctgaaaatcaactttaacaaaagtgaagtgttttgtattggcaaggctgttgaaagacaatcaatgtatagtgagattttcacttgtaaaatagaccaaggtggtatgggaattttagaccttgagataatgaacattgcccttctggggaaatggttgtggaatcttgaaaacaaggatgggtggtggcaagaaatccttagagacaaatatttaagcaagaaaactcttttggggatgaagaaaaaaccaggcgattcccacttttggcaaggtctcatggagatcaaaaactctttctacaagttctgctcaaaaaaactgggtgatggtaaacaaaccttgttctgggaagataactggattggaggcagacctcttgccttgcaattcccaactttgttcaatataacaaccactaaacaaatcattgtgtccaaagttatgttgggaggctgggatgcaattaaattcaggagaactttacatggtgacagacttatggagtggaataagataaaacagagctgtgttggtctaaccttacaggagggggttagagataaaatctggtggaaactgaccaaggatggttctttcactgtcaagtccttctatttagctcttaaaatgcaacaaaaactggaggcaaatcgaagaagactggagctgggagccaggctggtggcaattggtgtgtcgtttctcctagtttctgtctggaaatctccctataaacgatccaccctcatccaaattgtgactctttttgggcacttgtatgggaagcttagtcttgctataggggtgggggttttctctctttcttctcctgtttgctttcagtttgaaaagcttaggatttga

SEQ ID NO: 37759 - DNA, 197 bp, Oryza sativa
  Clone ID: PAT_MRT4530_41459C.1
cttgactgggaagacccatcactttggagtttgtagtaggctccgacacccaattggataatgtggtaaagcacaagatcccaggacataggtaggggtattccccaccaagaccagcagcgtctgatcttcgctggcaacagctggaggatgacgcacctcgcggattacaaacatccagataggagtcccaacac

SEQ ID NO: 37760 - DNA, 1032 bp, Oryza sativa
  Clone ID: PAT_MRT4530_4145C.1
atgccactggcggagggggagttcgcgctggcggacgaggtcctggcggtgatgccgcgggacccgtacgagcagctggatcttgcgcggcgcatcacggcgctggccgtggcagggcgggtgaccgggctggagcgggaggcggcgcggctgagggagtccgccgcggacaaggaccgcgagaacggggagctgcgggagcgcgtcgcgctgctcgaccgcgccctgcaggagaccaactccaggctccgcgccgcgctcgaggataacgtcggtggcgccccgcggctctcttgtgttaatattaagctgagcaaggagcgggactcgttggcgcagacgtccaagaagctggcgcgggacctgcagaagctggagtccttcaagaggcatctgatgcagtcactacgtgatgatagtccatcgaaaatgtccggcaccaatctctcactaatattttcattgaacattgcagatggagattctatcacccacactacaacaaatctactgagcacctctctggatgttggaagcacagtccaagaaggtacagtgtcaaagcctccaatacagaagtatgccctctcatcacacatcaccccccgccttactccagaagctacaccaaaaattatgtcaacttctgcttctccgagaagaatgtctacaacagcaacaccaaaattgatgtctggaactacttcaccatcaaaaactcgaattgaaggatacatgtccatgacaccatggtacccctcaagcaagcaatcgtcagcagctaactcacctccaaggggacgtcccaacccaggtcgcactcctcgtattgatggaaaagaatttttccgtcaggccaggagccgcctatcatacgaacaatttggagcattcttagccaacatcaaggaactcaatgctcataagcaatcaagagaggatactctcaagaaggctgaagagatctttggtccagacaacaaagatctttacctctctttccaaggcttgctgaaccgaagcttaccatag

SEQ ID NO: 37761 - DNA, 640 bp, Oryza sativa
  Clone ID: PAT_MRT4530_41460C.1
gtgttctttcgggccacagctgcagggcaagacgctgacggacgccgaggtgcagagcctactgagcctcgccgaccaggaccctgctctctgctccaagcccgcctgcgagctctccgtcggccaggcgcagcgcgtcgcattggctcgcaccctcgccaacgatccggaggtgcttctgctggatgagccgacgagctctttgtatcccatctcgacgcataacatcgaggatgcgatcgtgcggctgaagaacaccagggggctcaccacggtgatggtgtcgcacagcgtgaagcagatccagcggatcgccgacctggtctgcctcctcgtacccggcgaggtcggagaggtgctcccgccgtcggagctgtccgaggccaagcaccccatggcacggcgcttcctcgagctcagctgaagactggcacgacgatctcctcctgctctgtatgacgcttcttccgatagtgtgattcggatgtgtacctgcaatcttgagaagttgagattatgccagtatactatgtgcgaaattttgtggtgagatgatctcaaccctactggccataaaatgcattttggaaaatattcttgtatgctatctaaactagcacatgacctatgtgatgagttc

SEQ ID NO: 37762 - DNA, 370 bp, Oryza sativa
  unsure (1)..(370): unsure at all n locations
  Clone ID: PAT_MRT4530_41461C.1
ggaggangttatctgagttggaacggagacgactggccaacattgccagaaacaatgagtatttacaagaattgggactcagtgcaaantcagctcgncagacaaancgtccacctaccggtaangttatccagnccatgcgtatacaaaatngganggtggnggacgngataggcnntcgncgctcttcgagaatcgctagcctanccgccacgntaaactacancgnngaaatcctcagtcgnacacgtcccagncactctggaggcatngggccatcgcttactcatgtcgncacggatgttgtgtctgacttnacggtcggtgtcttcgttggtttgaatccgggtagtaaaggtgatcagtaaag

SEQ ID NO: 37763 - DNA, 141 bp, Oryza sativa
  Clone ID: PAT_MRT4530_41462C.1
atgggccggctcagcgttagaagaggtccagtgtgggaccagaacttgcaaccgccgcgatccaactggcgacgccgcgcctcccacttcttcaccgcgccccgctacacctccaccgccggcgccccttggcccaaatag

SEQ ID NO: 37764 - DNA, 292 bp, Oryza sativa
  Clone ID: PAT_MRT4530_41463C.1
ggtaaactgcacaatataaataaatacgcataataatacatacaacgacaacgtgaacacaaatattgacgtattgaaccctgcaacataaccaaccatacgtgatgaacatacgtaccgagcagagcgaacatacggatgcctacaggctctcaaaaatgttaacacaccttcacactatggcactgaatgttcaaaatgaacgtgatcacgaacgcttgcatcgatcatatgatatgggagacagcatatgcactgagatggtatattgaacatcgaattcgagaacgac

SEQ ID NO: 37765 - DNA, 424 bp, Oryza sativa
  Clone ID: PAT_MRT4530_41464C.1
acggcgttcgttcttttttttttttgttatgttacaaatttgtttatagtatttttattttttttttttttttgtttttttactggtgttttatacactgttactcaccacatgttaccgggggggaatgaaacacggtaacacaccaaagggtaccgggaaagaaggacactttgtaagccaccggtccggtaggagctccgaaacacgagaccaggttctcacggttgacttagcgtttatttacacaagggaaggggcgtgggcaacaagagcgcaaaagggtaaaaaacccgggaagtgcttacataaaactgacgaagccggcgagggggtgcaaccggcactaacacccggtaacgacgttaccgagtgttttgagcacaccggagcgtgggacccacatgtcatttccatgttcctt

SEQ ID NO: 37766 - DNA, 1481 bp, Oryza sativa
  Clone ID: PAT_MRT4530_41465C.1
cataaatccgcgatcaaaaacaccaagcatagcgtggttagcccacagctgggttgctgctgtccccagcaccacccaaaaactgcagcaccaaaatgaggcatcaacagcaggatcgtaggcatcaaattgagtatgagttctttgggccttatggaccagcagttctgttattggcactgccatgcgtggtcctaggactggtgtacgcctgcaactcggagggctgtctgcagctgtcgcagctttttcagctcccgctgtctcagtggtccctggcactgctgccaggtttcccatcaaaccaaccgctgtacagtcatgaggcgatggcagctgtggtggcctggttcgtgctggtgctgctgctgcacgtgctgcttcctggggccgaagcacagggtgttctgctgcccacaggccgcaggttggcgtacaagctcaacgccttcaaggtgtttgcagtcacgtacggcacggccgccctgctcagctttggcctgggcgtgctggacctcacctggctggcctcacacttcctgcccctcaccagtgcagccatcatcttcagcagcctgctggcagtggccgtgtacgccgcctccttcgcccccggtcgcctgctggcacacgggggcacctcgggcgtggtcccctacgacttctggatgggccgagagctcaacccccggctgtggggtgtggacatcaaggagttttgtgagctgtaccctggcatgatcggctggggcctgctgaacctgtcgtttgcctaccagcagtgggtcacgctggggcggctgaccaactcgatgctgctggtgaatgcctttgagctatggtacatcgtggacggcctggtcaacgagaggtccatcctgaccaccatggacatcaccacggacggctttggcttcatgctcgcctttggggacctggcctgggtgccattcaccttctgcacccaggctcgctacttggcagaccacccgcaacaggagctgtcagggctggggctggtgggtgtcataggggtgcagctgctgggctacaggctgttccggggggcaaacgggcagaaggacgcgttcaggcgggacccgggccacccctctgtggcgcacctgcagagcatgcccactgtgcggggcacgcggctgctgattagcggctactggggcatggcccgccacatcaactacctgggggactggctcatgggcctggcctggtgcctgccctgcggctttggcagcgtggtgccctacttctacagcgcctactttgccagcctgctggtgcacagggagcggcgggatgaggcggcgtgccggctgaagtacggggcggactgggacaagtactgcagcctggtgccgtggcggatcgtgccgtacgtgtactgaccatgagggagtggtgtgcttgggtgctctgtgttggtgtggtgtggtgtgtgactgacacgcgaggcccaaaaa

SEQ ID NO: 37767 - DNA, 555 bp, Oryza sativa
  Clone ID: PAT_MRT4530_41466C.1
ggctgcatgaggaattagatatttagatcaagtgcctgatatccaattatgcccgctcagccacccagatgggccttaaaattagtttgaaggagagagtgatacaagagtgacctttgcttatgaaccatgactttgtagcaacattttgttttcaaatgtttttggtagggatgatatacttgttgtacccttattttttgaaagaaattatttcgcttgtgttttgtagtgggatgtcttgcagctattggtacgtaatttccattacacacatctcacgttttacatttttggtataaaatttccattacacacttctcacgccgaacatttttggagcatgtgattctgctcctaatgtattttgcagttttgctgctggtggtcatttgatactgtcatactggtcgctagaattttgaacttggctttggtggcaccacatagcttattcatgtcttatatactgttaaccctgatgaggcactctgatgtttgcatcctgcatgtgaaatatattgatcactttatgtgcttctttgtagattgaaa

SEQ ID NO: 37768 - DNA, 171 bp, Oryza sativa
  Clone ID: PAT_MRT4530_41467C.1
atgaggaaggacgtcgccgggctcggtgggggtcagctattcgcgtcggtgaagaggcaggcgaccacgacgaggaaggccgacgctggtcggcccgtcacagataagtcatctgtgacgggctctaagataatgcccgatagagatagattaatctctatcgggctttaa

SEQ ID NO: 37769 - DNA, 2460 bp, Oryza sativa
  Clone ID: PAT_MRT4530_41468C.1
cccccgggctgcaggaattcggcacgaggctgccacacccccacctcactgcggactagcagcagcagcaagagagagagagagagtgggagagtggggagaagctaagaagaaatcaagaatttcaatctttgccgacaccacactggatttccttcctcaagcaaccatggcagcagcagcagcagcatcagcatccatcgagagcatatattagctatccgtggtgatcatgtgatgccaagattgctactataagccaggagatagcgagggagatattcttctctttctttttcaggtgggggagaaggtgaaggtaggaaggagggagagaggccaagaatggcggccgccgctttggccggcgttctcctcctcgccctcgcggcggtggcgggagccgacaccgacggcggcgacgccgcggcgctggggaatctgtactcctcctggaatagcccggctcagctcaccggctggtcggccggcggcggcgacccttgcggtgccgcgtggatgggcgtctcctgcgttggctccgccgtcacctcgatctcagagtttgggagactggatccagccatccaggcaaataatggtgctctgctggttttcagtgtctttttcagttgtaggaaaaagggctttttccaagctttctggtatggggctgaatggcactcttggctaccaactatccaatctgctagcattgaagacaatttgcgatgcaggaatttggcaggaaataacttttccggtaaccttccatactcgatatccaacatggtttcactcaactatctcaatctcagccacaacttactatttcaggaaattggtgaaatgtttggaaacctcactgcactttctgaactagatgtatctttcaataacctgaatggcaacttgcctatttctttacgctctctgtcaaatatttctggcatttatctgcaaaataaccaactatcgggcacagtcaatgtactcagcaacctaagccttactacactacttggaggaaactcatttctcaatgtaccttcatctccgccatctactatcacttcaccacctcagggtcaaccagactttcctcaaggaccaacaactgctccaaatatccctgagattcctattgatcaaggtagtgacaagaagcaacgtctgcgaactggtctggttatagggatagttattggctcaatggctgctgcttgtggtgtacttttcgcgttggtactgtgccttcacaatgtccggaaaagtaaagatggtgggatcagtgaatcaaaagatgtcgcaagcacttttgcagtaaacatagatagagcttctaacagggaaatatgggatcacacccagcaagacgcacctgtttcaagttccgtgctcccgcctatgggaaaaatgactcctgaaagggtatatagtacaaacagctctatgtcaaagaagatgaaggtctctgtcacagcgaatccatatacagttgcttctctccaagttgctacaaacagcttctgccaagattcgctcctaggtgagggttcacttggtcgtgtttacaaggccgacttccccaatggaaaggtacttgcagtgaagaagatagacagtgcgtcactttccttgtatgaagaagataactttcttgaggttgtgtcgagcatttcacgacttaggcacccaaacattgtgccgcttgcaggctattgtgttgaacatggacaaaggcttcttgtgtatgagcacattggaaatgggacactgcatgatatattgcattttttcgatgatacaagcaagatccttacatggaaccaccgcatgaggatagcactaggcaccgcgcgagctttagaatacctgcatgaggtgtgcttgccccctgttgtacatagaaacttaaagtcagcgaatatcctgcttgataaagaatacagtccccatctgtctgactgtgggcttgctgccctgacaccaaatcctgagagagaggtttcaactgaagtgtttggatcttttggatatagcgccccagagtttgccatgtcaggaatatatactgtaaaaagtgacgtgtacagttttggagtagtgatgttagaactattgacagcacgtaaaccgttagacagctctagagagaggtccgaacagtctcttgtcacatgggctactccacagcttcatgacatcgatgcgcttgccaagatggttgatccagcaatggatgggatgtaccctgcaaaatcactctcccgtttcgctgacataattgcattgtgtgtccagcccgaaccggagttccgtccaccgatgtccgaggttgtccagcaactggtgcgcctggtgcagagggcaagcatggtgaggcgtcaatcaggagaggatgtggggctttcatacaggggccctgaccgcgagggaggcacagccgacgccatctga

SEQ ID NO: 37770 - DNA, 472 bp, Oryza sativa
  Clone ID: PAT_MRT4530_41469C.1
acccccgatcccccggtatacttcgatggccggtactggacccatgtggaagactgcccacagttcgggtgcactgacagcccaccccggtgctcaaggagctcgaggaggcccagaaggcggtaccctgatgccattctgtcccgtattatcggctttgacaacgtcaggccaggtgccagctctatctagcgttctatctgcctaccagcccccgggctgcgaggagtttggtggccaactaaaccgtctatctgtctatatatagcccttggttaattgttctatctcttgattcgatgatgtcttcccccccttgtttcgtgtgttccccgtttgttctatcgtctttttgagttttacccggcccgtggcgtcttgcgttttgtttttgtttcaccctgatcttcttcttcttgacttgatgtaagagtggtatcttgctacgactatatgttgtttgggtgaggca

SEQ ID NO: 37771 - DNA, 219 bp, Oryza sativa
  Clone ID: PAT_MRT4530_4146C.1
atggataaagtcattgcgacgatagatatctctgaggcaaatgaaggctacacgagctgcggctcggtaatcgagatgtctaggcaaatgaaggctacacgggtcggagcccggttggcttgggacgagctgggacccaagtcgggttgccagttcggtctgaatcatcgtaggccttgggttaaggcagtaagagaagctttggagaagaagtcctaa

SEQ ID NO: 37772 - DNA, 106 bp, Oryza sativa
  Clone ID: PAT_MRT4530_41470C.1
tcgctttgatcctgtgctcctcagatagctatgcgattcttggaaatccttaggctacccaccatagtaacataaaatcctacgtaattacatggttaggattctt

SEQ ID NO: 37773 - DNA, 2614 bp, Oryza sativa
  Clone ID: PAT_MRT4530_41471C.1
tcaccagtaatccttacaggagcatgctccatccttgaaatggtgaaacctattcctatctctcataacaatctccctgttgaagaccttggatatcatcttggtataatcatggcagtcctcacatactctcaggttcttcactatcctaatctccatgtcttccggcaacgcgactaggccaaatgcaatggccagcttctcactatgcaaggagattgcatcttctttgtcctcttcctcgatatcaaacaacacctcttttgtgttcgcaatgtacccttgcagcctcagcctctgattcatctctgcaagcatcatctcgatctccttgtgtcttgggtgtgtcttgcctccaacaaagaactcatgcaccttgccaccaacctcaatggcactacacccaggcacctttttcactcccttggccttcatcatgttccgaacattgctgacacccttccagttctgcgagtctgcatagatgttagagagcaggacatgggcggcatcattcttggactcgatcgccatgagcttatccattgcatatttccccagttcaacgtttttgtggatccgtgacgcattgagtagtgctccccacacgccttcgtgtggctccaatggcatgccattgatgaagttcacggcatcatccagacgcccagctcgaccatacaaatcaaccatgcaaccgtagtgttcaagccaaggatcaattccatgattgctcttcatcgaatcgaagcatgctcgtccctcatctaccaacccagccatggagcatccacggaggaccacgacaaaggtgacaccgttaggctcaacccctgtgctctccatgcgcttgaacagcgcaaggcagtctctccccatgccattcatcgcaaggccactcactgcactggtccaagtgtaaacgttcctttcgcccatgctgtcaaacacctccatggctgccgccaccgcgccacacttggaatacatatcaatcaacgcggtgccgagcgtgaccgacagccgcatcccacggctatgtgcacacgagtgcacccacttgcctcgttccagcgcgcccaattgcgcacaggcagtgagcgctgacaccagcgtcacctcccccacggcagcgccagcatgacgcatttcgtcgaacagcctcaaggcctcccttgaccggcccgtgtgcacatacccggcgatcatggcgttccacgcgacatggtccctctgaggcattccgtcaaacagctcgcgcgcagcgtccgcttcgccgccagtggcgagagcccccaccatcgcggtgacgcacaccacgtccgggctcgcgatctccgcgaacgcggcccgcgcggcacccacatccccggccgcggcgtacatggagacggccccgctctgcacgtgcgggtcgcccgcgtgtccgtggcggagcgccgacgcgtgcacgctccccgcgatcagggccgcgtccagcgcggacgccgcggcggcggccagggcggtcgcggcgcggacgaggaaggtgaaggagtagttgtcgggcgcgagcggcaggtcgcggaacgcgccgaaggcgaggtgcgggcgccggccgcgagcgagggcgcggaggagggagttgtgcgcgaggagcgtggcggggcgccgcggcaggaggaggcgcgcgtaggagaggtcgccatcgtcgtcgtcgtcggaggaggaggaggcgagggaggcgaggaaagcggccaggtgggacggggacgcgatgcggcccgagacgaggaggtgcgcgtggatctcgcggaggtgccgctgcgaggaggccgccgctgccagcttcgccgggtcgcggagcggtcgcatttggtttgacacgctacggcctacggcttgtgagctactctgacgaaaggacttcccgtttcgagcattcgccgcgcgcgggctgacgaggccgaacgcgactacgaacctctgaagattgatgtgcctttcagcaagcctcctggaagggaccaagttcacgttgattgtcagcaattctataaggatgctctcggatggagggctgggaatggcaatgttcagcctaggtaagaatagcaggatatctgattcagcttgatgcaatgcagataaacttctaaatacgtattccccggcgacgcggcgtgctctgttcctgtcaggcgctccgtccaacagacggtgcaccgtgcaccccgcccatgagctgctggcacccctgtggggcattctgccgaacatcttgcaggcgtacccagggctgaatagcagattatctggctcagcttgatgcaatgcaacagcagccaagagcttcatggttgcagttcctgtggcgctggcttactactttgcaatgatcatcccagctatcaaataactatttgcagaagctagcctgattgtgttcatttgagaaaacaatgacggctcgctgtggagaataagttcagttatgagtgaatattttgctagactgtatatatatgtgcccttgggtttgtggtgaaccataataaggatatctgatttgtatcttagtgcatagtggccatacataattcttaccgtttcaactaaaaaaaaaaaaaaaaaa

SEQ ID NO: 37774 - DNA, 1953 bp, Oryza sativa
  Clone ID: PAT_MRT4530_41472C.1
atgacgaagccctgtcgccgctggtcgaaccacccacttgccgccggtcagactgccgaagcctcgccggtcagaccacccgaatacctgcggtcagaccgccgctatcccaacgacgattgggatgacaccatcgccacacatattgcatttggctccctcggcgggacgggttacacaagagggcgggcaggaacactgtcagggaagctgatgaaggagatatcattgtcttgcctggagaatgcggaccggttgttccgagtgcaaagcaacaacaacatccagctctcagcgaacactggtggtgaagctgatgaaagaggtatgcatgaggtgaagccgacggaggcacggactatggggaaattcagtattgaggcgttcatgcagcttggtgtttctgatgagatcaactggttaaagggcacggtgagctccatcaagaagacacttgcagatgctgactacagtgccctgaaagatgatacagtgaggtcttggtcgaggaagctgaaggatgtcatgtacgaggccgctgatattcttgatgtctgtgacgaaatggagggtgaagaacatggtggtcgctccaggaacagcccggtggccttatgcctaccgattcagggccacaaaatcaggcggcaagttaaggcactacgccagaaggcggatgcaattctggaggaggggaaaattttcgacctcactcatgtcagatctgatgaagatcacaacgtggatgctactactgcctgccatgttccgattccccgaactaatgttgtggggagggtgcaggagactagaatgctggttgataagcttacagggaaaggcatctcaggcccagggatgactggacaaaacgttgaagtcatcgcaattgtgggtatgggtggaattggcaagaccacccttgccagagaaattttcactaacgatatgatccaagggaagtttgacaagagactgttatacaaggacttgggtgtgagcatgaaggtattcgtgatagcgcagtattggagcacatcatttccagtgaaggtgaagcaccaaccgaagaatcaagttctcacattgggcgaacatcaggcgaagcaggaaggattcgccaagggtcttgacgccttcaccatagggccaaagcattacgatcgccataacccaagcagcaacttcgatcattcccacctcaactcaagctacaacgcaagctacgactcaagcaagcacaaaagccgaagcgtcaacggcacaaagggtagagatggaagctatgcgacaagacatgatgaggttgcaggacacgcttcgccaaatgcaagagcagcatcaagtatacgaagcagccctgcaaacctggtcaacctctttagcaagacccactccatcttcgatacccgcggcaaccactctagcgattcaagcttcgactcaagcaacgcaaccaagttcgactgttcaatcgatccaagcttcgtctcatgtggtgcagccgactgcgaccgtgcaagcgattcaagcttcgactcacgtggctccaacacctcaagctttggtggaggccgcttcggctctccaggcacaattccaagctttccttcaacaattgagtcaaccccacatgattccaagtgtaaccccttcggtccaaggcaatgggggatcgagccaggacgctatggcatggcagccgacgaaccagctccacattaccagcaaggcatggcgctgcgggcagagggtgacaaggatatcactgaggcctctgtgatcaatgccgcttcagcaggccttcgcccgagcaagctgacaagaaaaatcacaagaaaagagccccagattgtcaaacatctgttccacatcattgacggctatgcccgtggcgaagaagacaccaagcgaaggacccttcaccttcacatgcattgttctctagcctga

SEQ ID NO: 37775 - DNA, 1572 bp, Oryza sativa
  Clone ID: PAT_MRT4530_41473C.1
atggcgctgctgctgccggacgacgccgtcgccgacgtcctccgccgcctcccgccgcggggcctcgccgcggcgcggtgcgtctgcaagccgtggcgcgacctcgtcgacgtccgcgcgctgctgcgcccgcgcctcctgccgcgctcggcgcacggcgtcctcatcaactacatcgaccacggccgcccgcacctcttctcccgcccttcctcctcctcgccgtcgtcggcggcggcgatcggcggcgagatcatcgacgggaacctcacgttcttgcccaacgacggggacagggactggtggtgcgtcctggaccactgcgacggcctcctcctctgcgggatcgagtgggggagccagctctgcgcctgcaacccggcgacgcggcggtgggcgacgctgcccgccgcgcgccaggggccctcgcgctacgccgccgcgtacctggcgttcgatccggccgcctcccccgactacgaggtcctcctgatccccaatctgccggagaaaccctcgccgccggtacccaatcagccgcggcggcggcggcggcggcggcaggatgagctcgccggcccattctgcctccacatgctgttctcgccgctggacgccgctgatgaatcggatctggacggcgatgtcgatgtcgctgtcgatgtcgatgtcgatgtcgatgacgatgaggtagcaacaccagcagcatcatctgtggatgatgatcagtataagttgatggaatggccgccatcgccgtacttgctggaggtgttctcgtcgaggtccgggcgatgggaggagagggcgttcgtcagggaaggggagaaggtgaccaccgtggaagacatgatgccattgggatacccttaccggggcccgcgccgagggtacagcgtgtatcaccatggatcattgtatgcacattgtcgaggcgcttttgttacaaggtattcactggcaaatggcaagtaccaagtaattgaaacaccaataaacatggcgaactacaaatgggaaaaaccatatctagggaagtcagagatgggtgtgctcttcggaatgattcatggcggccagctatccgtttggatcctccaagaatcagcaggacagatggggtggatcttaacttatcaacatgaccttaggccctttgccaaagaagtaagctctctcagatacaatggtaacctgactactggttcttggactgtagaagaaaatagtactggtatgcatggaaacagagatactctgtctgcagaggatttcgagtgggactctgacaatgatgatttcctcgcggttgaagttagaaacgaggaatatgatgatgactgtgaacactttgacattcttggatttcatccttacaaggaagttgttttcttggatcagtcattcaaaacaatcgcctttcatttcaatagctcaaagattcaatacctgggttactcgcgcccaaagtgctactaccggaactacacaaatggtatatatgagtcgttcgtgtacactccctgcatgattggagagcttcatggagttattgggcagagctcatcttga

SEQ ID NO: 37776 - DNA, 372 bp, Oryza sativa
  Clone ID: PAT_MRT4530_41474C.1
atggacagcgcggtggactcgatggaagcggagtacgacgccctcctggacgccgtggccgccttcatcgccgagcccgtccgcaccacgggggccatccaggacctcaagaaccgcatcgacgccttctatgcctcctgcgatcgtgccgacgacctcgtccgcgccgccgccgatcgggtcgccttcaacgccaccggcaacgcccacgttcctcctcctcctgccgctgctcctccttcgcctgggacaggcaccaccaggatcgacgcgctgctgcgcgccgtggagggcattgcccaccacgatcatcctcctctccaggccaaggccaaggccgcagccggtgaccaacaccacaacttatcttag

SEQ ID NO: 37777 - DNA, 327 bp, Oryza sativa
  Clone ID: PAT_MRT4530_41475C.1
atggtcactgtcgccaccaccatcctcgtcgtctcgggcataagcggtgaggttgtgcatgggcgtgatgatgacgaagcggtgacgcagatttgggcaaacggcgacgacgtggattcagccaaatgggtggtgcaggacctcttgctcgcaccggcaagggcgggtgccgccgcctacggagatcttgccattggcttgccactccgaggggaccaggtcccgtgcctccgtatggtcatcggagatctcgccatcctcaagcttccgccgtcagccactacctctcccttttggccactctgctcccgaacggagaaaaagtga

SEQ ID NO: 37778 - DNA, 351 bp, Oryza sativa
  Clone ID: PAT_MRT4530_41476C.1
aaaaccaaacactccactgaccttgaccgaaaaaaatgggggctcagttcgcaccacaaatttttttttctagacaaaaaaggtgggcccaaaaaaaccgggacgacccttcttataaccccaaatgggtgggggcatttcatttcatttcagaaaaccaacttaaacgaccccaatttttttaaggtcagcatccgggggctcattcttaacttgggggggtgggttggccttcgggggggaatggaaacccatttcactggtgaacgtttgggtgcatgactggcaagaaaatgccccccccccgggtttgggggacttcccccgtgacttggcattcacgggggtttt

SEQ ID NO: 37779 - DNA, 492 bp, Oryza sativa
  Clone ID: PAT_MRT4530_41477C.1
gctacaacggtatctatgcgcttgcagattattctgtggtcgtaataaataccgacaacaggtaacaggtcctctgatactgaggctgtcgacctagattcattggtgcatacaaagaaaaagattccggccatggtgatgtggtacctgccagcaaagatcgcatgaagagcatgttgtgaaaccctaatgatgctgagttgatgagatggcatcaactgaaccgtaagatagatggtatgattcgacaccccaccgatgctcaccagtggaagacctttgattcactacatccagaatttgctaaggatccgaaaaatgtaaggtttgcatttagcacggatggaatgaacccatttggtgacctaaacagctcatacaacacctagccagtctttacaccatgtacaaccttcctacatggatttgacaaaactgaaagtatattatgttaactgtcctaccgcatggctaaaaccgtgcacatatgac

SEQ ID NO: 37780 - DNA, 380 bp, Oryza sativa
  unsure (1)..(380): unsure at all n locations
  Clone ID: PAT_MRT4530_41478C.1
cacgcgtccgcgtgcttcctcctccgcttctccaccggcgggctcgccaccggcaccttcggcctgaccggcgtctccgtgtgggaggccctggtgctggagatcgtcatgaccttcggcctcgtctacaccgtgtacggcaccgncgttgaccccaagaagggcagcctcggcaccatcgnccccatcgncatcggcttcatcgtnggcgcgaacatnctcgtcggcggcgcgttcgacnggnggctccatgaacccgnccgtcttntttgggccgggcctcgtcanntngtcctgggangtccaaatnggtgtaattnggtttgnccantnaatngggggtgngccttgcngaggtaatttaaganggtccntttttg

SEQ ID NO: 37781 - DNA, 357 bp, Oryza sativa
  Clone ID: PAT_MRT4530_41479C.1
acatcaaaccataagcttttttatataagactagaaagtgcacatgtgttcctcagcatgatgtggagagtccagttcaccattattgaagttaaatacctagattacatcaaatgtacgcagatcaaagtggcctgttggaaatccaacggctgaacattgcaaaacatctctctggctggtactctggtgcagtatgtcctccgcccttcacagtagcgaacgtcacattgtttccatacgtcatggtgaatcctgcagactggccatcaagatgccaggccctccagtcatccacaatgtggtcgctgagtgatctcacccatgcttgggtactaagaaatggcagaacagcat

SEQ ID NO: 37782 - DNA, 360 bp, Oryza sativa
  Clone ID: PAT_MRT4530_4147C.1
ctagcctagatctctatccactccagcgtgagctttgtgccagtctgagtggtggtctgcaatgacgacgattgtacgatgatgacgacgctggcggtgggcatgcctgtgctggcctagtttcgggaggccaaaattggtggtaggcagagctaccgcggcacgggcgcaaggcaggactagctgaccatgctccggggagttaatggcggcagggggcaatgggcgcgaggcgatggcgatgtgaatgggtgtcttgaggcggcagtaatgcaggaagtctggttgaggcgatgggccggatatcgagctcttgcttgatggttggccggtggcgaggtgctggcgtggtggccgcat

SEQ ID NO: 37783 - DNA, 1908 bp, Oryza sativa
  Clone ID: PAT_MRT4530_41480C.1
atggcccggcccacggcacgggattttggcccggcccaagcatggcacggcctggtagcagtcgggcccgtccttgggcctatggctaggcacggtgggctggcccggcacggcacggaccgagatcccttggtcttctcgtggattcgtgagcctatcgtcttcaacggcaactccggtgctccggctgcgcaggaggatcgtgtggaggtgtacggcaatacctctgacagcccgatccgtgtgaatatcgacgacgacaacccaccggttggcggcagtggcaatgggacaccgactggctctagtgccactgctaccaacaagaagaccaaaacctccatggtatgggatgactttgaggaattttatgaaacgaccaatgatggttctgttattccatgggaatatagtcctgaagttgctagggttgaattgtgtagattgatttctagagaggatcttccaatttgttttggtcaatctcctacttttgtgaactatattaaggctgctcataaccctagatttgtttatgtctctagacaaactactaccatagattttcataagttgtttaatgatcgtcgttctattattgttgagcgtctcaagtctgctagctctattgctttgacatctgatatatggtctggtcatgctaaggaagattatttgagtgttgttgctcattttgttaattttgattggcaattagagaagagggtcttgggtcttaggcgcattgatgtgtcacatactagtgctaatattgctgagcatgtgattgcagttgctgaagattatgttaaggctggacttgacaagttcaagcccatgctaagtgacattagagctgctatttcattcttgaatgcatctaatcagcgcatagctacatataaaaatgtttgcattgttgcgggttatcatcctcgtatgtttgattgggacatggatttttataattcaactgttgttttgtctggtgtttattatccaacatctccattaatcatgcatcacattttagaggttgctggacatctaaacacttatggcaatgttgaaaaccttgcaaatgctggtggtcccatgaaagataagttcatgaactactggtctaaaattccaattctttattcatttgcatttatcttggatcctagggccaagatcagggggtttagtaaagtgcttcagattatggctcaactcattggtgatgattactctgcttatttaactactgttagggctgcattgtctgatacttttgctaagtatgaaagtaagtttggttctgttagattgcatagttccagtattccaggcccttccactggtaagaaaaggactacatgggggaagatttttggttctgttgctgctggtgccagtccaggtgttgggcttggtgctggtgctagtctaggtcctgggcttggtgctggtgccagtccaggtactgggctcggtgctggttcattatctaggatgacatctactactgctttgcttcagacagcttcttcaactactaatctcaatgcttctgaactgtctgcatatcttgacagtgacacagtcaaccaatatgatgatgacttcaatatccttagctggtggcaacagcacaaacaaacttatcctgttctttcaatcttagctaaagatgttatgactgttcttgtttctactatatcgtccgagtctacttttagcttaactagcaggattatcgaggaccgtcggcggcgtctaaaccctaggctggtggaaattctggtagtgctcaaggactgggagctagcagatgcaaaaggtcagcatactactgagaatgtggagcttcaaaatgcttatgagaatatgtatcttgatgatgaaattgatgtaaacccttga

SEQ ID NO: 37784 - DNA, 1278 bp, Oryza sativa
  Clone ID: PAT_MRT4530_41481C.1
atggtgcggtcctactgcttctgcctcctgctactctcaaccatcgtcgccgtcaccgtcgccgttgccgcggaggagctccccccggcgccaaccaccttcaaaaccttgaacggcaagctcgatctagctcctcttaatcgtaatgctcctcttgttattgctaaaggtggattttcgggagtttttcctgattccagtgaatatgccttcgcttttgcctcctcgctccacataagcttgtggtgtgacgtgcaactgacgaaagatggcgttggtatttgcctccgagatttacttatgcagaactgcaccgatatcactgaaatttatccagaggggatgaaggcatatctaatcaatggtgcacagaaaaccggatggttacctgtggactataacatggcttcgctgagaaacgttacttgtataatggttcccaaaaactatatatggccagtaacaagtgataattatattcagcttcacacacagattgtccaagaagctcacaatgcaggtttagaaatatatgcgtctgatttttcaaacgatggaatttttccctacaactacagttatgatcctttgggggaatatctgtcatttgtcagcgacggtggctttagtgttgatggtgtattaacagatttcccacttactgcatcagaggctattgattgtttcagtaatttgaacacaagtaggaaaacggatcacgggaatccattaattatctcacataatggtggtagtggagattatccgggttgtacggatctggcctatgagaatgcagttagggatggtgccgatgttattgactgttccattcaaatgaccaaagatggaattcctatatgcatgagttccattgacctgcttgctactacagatgtccagcaatcaaagttctgttcacttctttctgtcattccagaaattcagtcaaaaaagggaatattcacatttaacctcacttgggatgacatcaacattttgagacccaaaatatcttccccgctgagtgattatgttatgttacggaatccaaggtacacaaatcatggcaagtttttgaagttatctgaatttctgacatatgcgaaggacaaggagttgtctggcatcatgatcaccatcgagaatgccgcatttatggcagcatcattaggatttgatgttgttgatcttgtaactactgccttgagtcatgctggatataacaacactaccaccaccaccggtggagaagtgctttttagtcccggttcgtaa

SEQ ID NO: 37785 - DNA, 1863 bp, Oryza sativa
  Clone ID: PAT_MRT4530_41482C.1
atggcccggcccacggcacgggattttggcccggcccaagcatggcacggcctggtagcagtcgggcccgtccttgggcctatggctaggcacggtgggctggcccggcacggcacggagcgagatcccttggtcttctcgtggattcgtgagcctatcgtcttcaacggcaactccggtgctccggctgcgcaggaggatcgtgtggaggtgtacggcaatacctctgacagcccgatccgtgtgaatatcgacgacgacaacccaccggttggcggcagtggcaatgggacaccgactggctctagtgccactgctaccaacaagaagaccaaaacctccatggtatgggatgactttgaggaattttatgaaacgaccaatggtaatagggctgctcataaccctagatttgtttatgtctctagacaaactactaccatagattttcataagttgtttaatgatcgtcgttctattattgttgagcgtctcaagtctgctagctctattgctttgacatctgatatatggtctggtcatgctaaggaagattatttgagtgttgttgctcattttgttaattttgattggcaattagagaagagggtcttgggtcttaggcgcattgatgtgtcacatactagtgctaatattgctgagcatgtgattgcagttgctgaagattatgacaatgcttctgctaattctaaagcaatggaaacccttactcctgctctgtctggttatgttgctgatttatttttgcatcaacgctgtgcgtgtcatatcatcaatttaatagttaaggctggacttgacaagttcaagcccatgctaagtgacattagagctgctatttcattcttgaatgcatctaatcagcgcatagctacatataaaaatgtttgcattgttgcgggttatcatcctcgtatgtttgattgggacatggatgttagatggaattcaacttatataatgcttaagcatctcataccacatagggaaccattcacagtgtttattagtacgcaacatccttttgttaatggccatccattactcacaaacttacattgggcatgtgctgaatctgttttatgtttccttgaacagttttataattcaactgttgttttgtctggtgtttattatccaacatctccattaatcatgcatcacattttagaggttgctggacatctaaacacttatggcaatgttgaaaacattgcaaatgctggtggtcccatgaaagataagttcatgaactactggtctaaaattccaattctttattcatttgcatttatcttggatcctagggccaagatcagggggtttagtaaagtgcttcagattatggctcaactcattggtgatgattactctgcttatttaactactgttagggctgcattgtctgatacttttgctaagtatgaaagtaagtttggttctgttagattgcatagttccagtattccaggcccttccactggtaagaaaaggactacatgggggaagatttttggttctgttgctgctggtgccagtccaggtgttgggcttggtgctggtgctagtctaggtcctgggcttggtgctggtgccagtccagctaaagatgttatgactgttcttgtttctactatatcgtccgagtctacttttagcttaactagcaggattatcgaggaccgtcggcggcgtctaaaccctaggctggtggaaattctggtagtgctcaaggactgggagctagcagatgcaaaaggtcagcatactactgagaatgtggagcttcaaaatgcttatgagaatatgtatcttgatgatgaaattgatgtaaacccttga

SEQ ID NO: 37786 - DNA, 1350 bp, Oryza sativa
  Clone ID: PAT_MRT4530_41483C.1
gatttcctcctcgacggcaaatcgccggccccccacgaagacttgttcttcctcccgccgcgcatttctttaatcactcgatctgagctgcatcccaaatcccccccgatttaattatttgcaggggggtgatggatccccacattgtcgtcgcgtcccctcccatcgcggggatgtgatgtctatgaggaggataataagatcatggaggggcacaaaccagtgcaccaattcgttgatagccccaagccgcagcgcagcgcgaggagaatttgtggaatggcatcgaggatcgatgcgaatgaccacggcaatcagcaaggaggcaatccccaaggtccagttggtacagcagagagattagagcatcttttaaaccaaccagcaaacaaaatttgtgctgactgtggtgctccagatcccaaatgggtgtcattgacttttggtgtgtttatttgcatcaagtgctctggagctcatagaagtcttggggtgcacatatccaaggtggtctcagtaaagctagacgagtggacagatgaacaagttgatattttagctgattcaggtggaaatgctgcagttaacatgatatacgaggcgtttatacctgaaaactacatgaagccaaggcaagattgctcatcagaggggcgcaatgactttgttaggagaaaatatgagcttcaacaatttttgtccaacacacagcttacttgctactcacaaaagagcggaaaaaatcataatcgcgtacaacatagcagttcaaataggcatggtttaggccatgctttcaggaacagttggaggagaaaagaacatgagagtaaatcagtgaagaaaacagtggagataggtatggttgaatttgttggattaattaaggtcaatgtcataagaggcacaaatctagctgttcgtgatatgatgtccagcgacccttatgttatccttaaccttggacaccagtcgatgaaaacaaaggtgattaagagcagcctgaatcctgtatggaatgaaaggattttgctatcaatacctgatcccatacctatgcttaaattgcaagtctatgacaaggacacattcactacagacgaccgaatgggggaggctgagattaacattcagccactggttgctgcagccaaggcatatgagacctcggtcgtcgctgatacggcacagctcaacagatggctagcaaaagaaggcatctggatccaaaaggacagtgctatctccatcatcgatggcaaggtgaagcaggaggtgaccgtcaggcttcagaacgtcgagcgtggccatcttgagatggagctcgagtgtgtcccgctcacgcaatag

SEQ ID NO: 37787 - DNA, 516 bp, Oryza sativa
  Clone ID: PAT_MRT4530_41484C.1
aaaaaaaaccaggggttaaaaaaaaccccccaaatttcccacccataaaaaacaaagggggcccaaacccgccaaaaccaaaaaaagccttagggccaaaaaaatcgccccaaggcccccccccggggggccccccgggggccccctaaagggttggggaatggggccgggaaccccccccccccccccgaaaaaaaaaaccctttggggaaacccccccccctggaaaagggaaacgttgggcccccccttccgaaaaaagaaaaaaaagaatggtttttccccggcccccttggggcccccgggggcccccccggggggaaccggcccagggaagggaaccccggcaacccccggaaaaaaaaaccggtggtaaaacggcccccccatttggggcccgggaaagaaaaaaacctcctcaaacccgttgaagggcccccccaggggaacggggaaaacccagcccttaaccgggaaccccgccccggaaaaaaggggaacccccccccccccccc

SEQ ID NO: 37788 - DNA, 234 bp, Oryza sativa
  Clone ID: PAT_MRT4530_41485C.1
ccatacaatttaggtctcatagtagtatatagatccctcctcgttgctactccacctccccactgctttcctcccttcgggtgtccacctcctcctcgttgctactccacctccccttgctcggagggatgaccggcccgacgatcctcgtgatgcctctgtccccgccaatgtcgtcaccattggcgcagccacctgcccggcctacacgctacgactttctcaactccaagc

SEQ ID NO: 37789 - DNA, 533 bp, Oryza sativa
  Clone ID: PAT_MRT4530_41486C.1
gaacaaggaacacacgggccctgatttcatattggggcgggcgcatgaccaaaacactagcttaggtgctgaatgcctttacatatgacacatacatggttacattgtttgccatgcgacaacataccttattcatcatgactcgatatagcagctgacttgcttgaacgggatggccacgcatactttgtgccctccattagatggaatgcgctcttattcgtcgccagaacaccgctagcgaatcgggccggtactgagcgatccctcagcataaactttggagggtaaccgtcctttataggcctaataagggtagccacgaacttgctgaatgcgctaacaccagaaaaggcaattgatctgtgaaaaaacggttatgaatcgtatgtggggacaacactttgcatgcctccctgggagatatggtgccacgataggagaatcgtgccttcccttctcggagatgttgaacaaaaactctccactccttgtcactgtggcaaggactagtggcctcaccaaacgcccgc

SEQ ID NO: 37790 - DNA, 170 bp, Oryza sativa
  Clone ID: PAT_MRT4530_41487C.1
gaggagaaacttatttttgtgatagtagatatgtggagtgaacaacttcttgtatacttatgcttggacatgtacaggggatgttcacgcttgacaagccccacacacataatttgtggaaaaacacttggtcactgggttaatttgtggtgagaaaaaaccagatgggg

SEQ ID NO: 37791 - DNA, 494 bp, Oryza sativa
  Clone ID: PAT_MRT4530_41488C.1
tataaggttcaagctaatcaaattataacccattggaaaataaagtcatctttggctattatttaattgggaaaggttcaccacccgatgacattcgaaaacaatgcatagttgaaataaaataatagctttaaacaggttcaacatgctcaaagggttgtttgggatctgtgtgatttgccttgggcttccgcaaacgcttcggaaccttcctcaacgaaaacgctctcctccggaacgtcggaaacacaactacaaacgacgaacgacgacggccggcgacgaggaggcgacggcggcggctcgggtcaaccgtcggcagcgagctacggcgaccggcggcgacgaaggagatgcggccgagcttcctcacctccgtgcgcacctaacggcgacggcggacgcggcggcgcgacgcggccgtaggatggccagcggcggcggctaaacgcgtgcggcggcggcgctacggtgcacgagagagcggacgcgtg

SEQ ID NO: 37792 - DNA, 1536 bp, Oryza sativa
  Clone ID: PAT_MRT4530_41489C.1
tttttttttttttttttttagtactagaacgttttttttttcttccaggtgtgaaatacaccctggctgtggtacatcactgtactgaagcacagtatacatgtgacaactatatcttcataacagggagaggaattccaagcaaaaacttctgctgggtctaatctatgcaggtatcggtgaatggcattttacaaagacttttgtagaattgacagctatactttggctacaaaggttttgatgtaattttaggctacggcttctgcccagaaaacatgatgaacgacctctggaccttgctgctgtaattaacaagaccgcaggatttgcacaagtcttcgagctctccttcggtgaagtaattgtagctggtgttaactggtccaacaatctgtctcagtggccgcaacgcttcaacagagaagggattgttcctgggagaagataagaaggttgttgctacaaagacaccaccaggcctcaggactcgacttatttcagccaccgcattcgaaggggagggccagcagtggatagcagctccagcatgaatggcatcaattgaagatgaagcaaaagggagtctcgaaatatctgcccttacaagagcaagatttgtgtttacaagagtatcatcttgctgaataaattcataacactggcaaagcatattctcggagaagtccaaagcaatcacagctgagtacgatccagattttgcaaattttcttgtgaacaagccactgccacagcttacatcaagaagtacaccaccagcaactgattggaaataatcttgagccatttgaaactcttcgtcaagtccagggaatccacttcgattgaaattttgacgccaccctctttcataaagaaatgagacgagtgggctcctgaacagctcagttctagctggcttcaattcactatattcttttgttccagaagtgacagtgagatccaagaagatatctttgctggtgaatgacttgttgcactttgaacatttgaacccagacctataaattgatggcaagtttatgcccgatgggcctttccttatcaatggctcatagcaaacagggcatgcaaacacctcggcttctgaattgttactctgcggtactttgttttccggctcgacggcgatcgcggcggcctcgacagccacccggcgagcggggaggcggcggtggccaaggaggcggagcggggctcgggcccgcgggagctggagcgaggcgccggaggagcaggaggccgcggcggctgctctgaccgcgagctccatggtcgggcgcagcgcacgcacgattgatgatttcacttgcaacgttgcacgggaaaaaagaccggacgcgtgggttaggtaagttcggtggggggggggggggggggaatcccgcggttgtggcgggagagcgtcggcgtggcgcgagccgcggccgttcgcgcggtgccggtgccggtgtggtttttgctccgatgggtcgcggattttttttttccttctcgtatggccctgtttcctcg

SEQ ID NO: 37793 - DNA, 1137 bp, Oryza sativa
  Clone ID: PAT_MRT4530_4148C.1
atggtgcccccaatcgccgggaacggccgcgccaagtccggccgccttcctttgccgccggccaccattcccgtcgccgttccgccctctcccgtgctcggctcgcttccctcagctataaaatgcaacccactcgctccgttctatcgctttagccccctcccgcgccgcctgtgccgcctcgaccgtgcgccggccggccgcgccgtcgcctcctccagcgtcgccgccacctcctccaccccggcctgccctccgtttcgcgcggtgaccgccggaggcgcactcccgccgtcgcccttctcattcctccttgccggccacctccagccgcacctcccgcctcgcccgtgcaccctccggccgcgccgccacctctcccggcgtcgcagccgcctcctctttcccggcttcgcctccgtttcgcggggaaatcaccggagacgcgtcctcgccggcgtccagtggcgtcgccaccacttctccgcctccggccgcctctgccgcgtccccggtgcaccggccgacgtcgccaccacctctcccggcaccggagtgccgtcctctctcccggccaggccacggcgtcgcccgaatttcgccggaacgccgtcatctccgcgccggcctctccttcctcctcgtcggctcgtcgccccgctgcaccaccaccttcaccaacatcgcagcggcgtgttccacgccgtcccctcctccactcagccgctgctgcctgccatcatcgtttcatcgtcgtctccgatcgttctcgtcgtcgacgtcccgtcggtcgcccggctcgtcgtctcgcggcgccgcctccgtcatcgtcatcgtagcggcgtgttccacgtcatcctcgtccccgtgcagccgctgccggctgtcctcgtcgcctcctcgccggtcccggtcgtcgtcgtcgtcgtcgtcctctcgtcgttcccggtcgtcgtggcccccgtcctcgtcttcgtcctcggctccgcgtcgtcaagccccgtgccggccgcgtctcgccttcgtccaaggatcgccgccgaagccgtcccctcgccgttcgtctccgttgtgcccgtctgtctccgccgcgcccgttcgtcgttgtcgttcctacgcctcgtcgcgtggtggtaa

SEQ ID NO: 37794 - DNA, 311 bp, Oryza sativa
  Clone ID: PAT_MRT4530_41490C.1
gaatacaaaaaaataaaccttggatgcggggaaatcaaggaacgacttttccttactggtctaattttatgtcaacaaagaaccacacgccacacacatgctgcactgattttgacacaactgatgattgattgattcctggataaaagaactggataaattcacatcatcacctaagactgctgcctctgacaattctgcgccttaaccactttgtgcgcctggcctgcaatgacagttgccgcgtgatgtggcggatcagtgtgcttgcgcctcgtgcgccgcgtctgtagaccgtacctgagactgtt

SEQ ID NO: 37795 - DNA, 348 bp, Oryza sativa
  Clone ID: PAT_MRT4530_41491C.1
ctaattaatgatctttataatgctttgagtagtttgaggtttgttcatccgacaggcaaaccagcctaatttttgtaatcgcataacataaagggggccaagtcctggagcaacagtgagtttagtccagcggcggacgaagcggtccttgatccaccggaacccccggcggagcgacgccttgaccctggcctcgacggcgtaggccttgtacgccgccaccctccgccggcgcttcgcctccgggtcgccggaccaccacggcgtcgacgacgacgaggccaccgtcctctcgtcgccgtcgcgcggcggcgccgacccgccccggaactcctcgagatccctcat

SEQ ID NO: 37796 - DNA, 115 bp, Oryza sativa
  Clone ID: PAT_MRT4530_41492C.1
gccgatctacatgctggcctgagagattgtgagatactgagatcagacaacgtctggatccacatgggacgttgggttgggctgttagggtggtcgagtggagactactgcagca

SEQ ID NO: 37797 - DNA, 763 bp, Oryza sativa
  Clone ID: PAT_MRT4530_41493C.1
gcaatgataaaggggttttcataatacactttcttatcggtctttgattgcgcctcctttattcagtgtatgtacgcactgatgacgtcgtcgttcacccattcatctttagtgagaaggcacgataggtgatgttttttgacagaaaaacctcccatgttcaccagcgtctcattttcagatgataccagaataatgtcttgagcagtaacatcctggttggttaatacataatcttgagggaggtagtcgtaagtctggccaattatagatcgtatcaagttcgatggtacgccattattgggcatgctgactttggatcctacatgctcccctgactccttatcctttagctaggcccagaacaagatgagtacccgctgatgtctgcccacacggaatcagatgtgttttccgccgtttcagaatccatgtttgctacatactggtcacacatgtacacctcatctcccaatgcatcttggtcagcagtattttgtgctatccggcagaacatccatagaacttgggacggggtccagatcaataggactgtaaaggtaacacaatctctgaggaagggggtaaacaaacgtggacatccacctatgcgatcagaatccgccctcaatggcacataccctagatcaggaaaatttgaggattctagcttggaatgatcaacatgaccattctttgttgtcccgacaaaactatcttgttgtttcaccggcatgacgagaaataaccacaagcgggtcat

SEQ ID NO: 37798 - DNA, 375 bp, Oryza sativa
  Clone ID: PAT_MRT4530_41494C.1
atggcccaggatttggaggtgatcaaggagattctctcctgctttggggtagttccgaggctgcttactaacctcgacaagtgctccatcactccaatcaggagctggaagcggatcaccatatcttggtggagtgcgtattcgcttgaacaagttgggcacaagttgctatccaagattgggttggccttcctctcaccatgccactcattgaccaaaacgatctgtttcaagttttgtgcaagtgaagaagaaaacagctacagcgcggacacatgtgagatgcttcattcccatgaccttcatttcacagaaatagcatgttacggagagatttttgaaagttatatacaagttacattgacaaatatatag

SEQ ID NO: 37799 - DNA, 168 bp, Oryza sativa
  Clone ID: PAT_MRT4530_41495C.1
gccgacgcggcagcatcccccggacccgggacccccaccaccgatccgtcccctagcaagtgcggatccctttcgccgtgccgcgccgcggttgcagtcgaggtgaccgcgtgcggctgtttgcagcgacggcgctggtatccacggtgcggtgccgcgccggactga

SEQ ID NO: 37800 - DNA, 150 bp, Oryza sativa
  Clone ID: PAT_MRT4530_41496C.1
atggccatccaccagcacctcgacaccggcggctccatgtcctgccgcatcagccacaccaaggacacaagtggagctgaaactgtttggctaagctcctactccagaagcggtgaagttagagttgaagtcgtgccaaatagatcctaa

SEQ ID NO: 37801 - DNA, 1116 bp, Oryza sativa
  Clone ID: PAT_MRT4530_41497C.1
ggccggaattcccgggtcgacccacgcgtccgggagatttacacagagaaaggaatggcccaatttcaccggaagccggcagagaatgacctgccaatcacgtggtacaagagatactttgatgagccagacggagacgatcccattgttgttgacatgagctctatgagcaagggcatgatatatgttaacggagaaggcattggtcgctactggacctcattcataactcttgccggacacccttctcaatcagtatatcacattccacgagcgttcttgaaacccaagggcaacctcttgattatattcgaggaggagcttggcaagccaggtggcatcctcatccagacggtgaggagagatgacatctgcgtgttcatctcggagcacaacccggcacagatcaagacgtgggagtcggacggcggccagatcaagctcatagccgaagacacgagcacccggggcaccttgaactgccccccgaagaggaccatccaggaggtcgtcttcgccagcttcggcaacccggagggcgcgtgcggcaacttcactgctggcacctgccacactcctgatgcaaaggcgatcgttgagaaggaatgcctcggcaaggagtcgtgcgtgctgccggtggtaaacacggtgtacggcgcggacatcaactgccccgcgacgacggccacgctggcggtgcaggtgagatgcaaggtatcaggggcgcaggcggcttaggaagaagggatgctgctgattgacacattgtttcaatttggctcctcttgcttgtgtaattcatctcgttttggttctcattgatgagtcttgagtgccttgtgtgattaaaatttggaagagacatgccttttggggatcatggggggtattaatatgcaacaggaaggtagctgctgatagactcgaagatgtcttctattcttaatcctctcctatcatatgtattgattctgtaggtgttgaaaataatattaaccatcacaggttgacagacagtttgtagttcagtttgtttagatatattgacagtttgtgcactaataatatgaagctgttgttacttgcaaaaaaaaaaaaaaaaaaaaaaacaaaaac

SEQ ID NO: 37802 - DNA, 316 bp, Oryza sativa
  Clone ID: PAT_MRT4530_41498C.1
aggggctcgccgccgcggcgtcactcggcaccgccgcgtgggcggtcaccgcgctggcgttcggggtggcgtgcagggagatccacgacgcctccgcggtggggcccgccggctcctagcgcgggtggtggatgctctccctggatgggctcaccgtgacgctggcgttcactcatctgctctacttgctgtttctgcacgcctttattgcctcatagcgcttctgcctcccctgcgccgtcgacacatgatcatctcgatcgagctctttggatcaatttcattaatttccaaatagtaatataccgggcttgtt

SEQ ID NO: 37803 - DNA, 8822 bp, Oryza sativa
  Clone ID: PAT_MRT4530_41499C.1
atggcggaggaaccccgcgagtcgttggattcctcgccggagccgccgcccccggggcaggactccgacgagcagttctcggcggtcccgctcgccgacgaggtgcgtgcagaggggagcgagctggatccggatacgagcgcgggcacgtcggtggcggtcacgccggcgcggtcggagccgtcgccgccgccgccgaggaggagaaggcctcggccgctgggcgtgccgccggacgccccgcaggaggttgtgcgggcggtcgacgacgcgatcatggtcggaggcggggccgcggcggcggccggggtgaaccgcctccacgagatggtctccgaggaacagggcgagttgccgcacaccgtcgtggacgtgctgcttggcaccatgggcggcgccgatggcctcgacgaggtagaagacaagaccggcaccggcgctcccccaagcatcatgttcaactcgagagccgccgttgttgccgcggagctcctgccttacctcccctgcggcgatgagccatctccgcgcactcgtatggccgtgggcattcacgccacgctccgcgcctgcacacgcaatcgtgccatgtgctcttcatcgggccttctacccgtcctcctcgattctgctgagaagctactcattggaatgggtcgggcaagtagctgggacggaacaccactgctccattgcatccagctattgggtgggcactcgcttagcgtgaaggacttgcattcgtggcttggtttggttaagaaggcgcttggtacaagctgggcaacaccactgatgctggcacttgagaaagccatggggagtgaggaagcaagaggtcctgctgcgacatttgagtttgacggggagagctctggcttgcttggccctggtgacagcaggtggcccttctctaatggctacgggtttgctacttggatttacatagaatcattctcagatacacttagtacagcaacagctgcagctgccattgctgctgcagccgcagcaacatctggaaaatcatcagcaatgtcagcagctgctgcagccagcgctcttgcaggagaaggaacaacacacatgcctagactttttagctttctctcttcagataatcagggtgtggaggcttacttccatggacagttcttggtggtggaaagtgggggtgggaggggtaagaaggcttctctgcacttcacttatgcgtttaaacctcagcgatggtacttcgttgggttggagcacacaaacaagcatggtttgcttggaaagggcgacagtgaattgcggttgtacgttgatggaagcttgcatgagagtcgtccttttgagttcccacgcatctcaaaaccactagcattttgctgcattggaacgaatcctccaccaactattgcaggcctgcagaggcggaggcgacaatgtccattgtttgcagaaatgggacctatatacatttttagggagccaattgggccagaaaggatgggtcgtctggcatcccgtggaggagatgtactccctagttttggaaatggtgcaggtttgccttggagagcaaccaatgaccatgttaagaacatggccgaagagagttttacattgaaccaacagataggaggatgcttacatcttctttatcatcctagtcttctgaatggacgattatgtccagatgcttccccttctggctcagcaggcactcaccgaaggcctgcagaagttcttgggttggttcatgtttcatctcgtgtgcggcctgcggagtctttatgggccttagcctatgggggtccaatggctttacttccgttgactataagcaatgtgcagatggatagtcttgaacctatgcttggtgaattgtcgattgccactgcttctctttctgccccaattttcaggattatttccctggctattcagcatcctggaaataatgaagaattatgtcggacatgttcaccggagattttgtcacgtgttttacattaccaattacaagcatttccaaagatggaaggtggagagggggaggcagtgactgatgaggagctagttgatgcaattgtatccttgtgccaatctcaaagaaacaaccatgagcttaaagtgcagcttttcagtactttgctgttggacctgaagatgtggagttcatgtacttatggtttacagaagaagcttctgtcctcgcttgcagacatgatatttacagaggctgcttgcatgagggatgcaaatgcattgcaaatgcttcttgatagctgcagaaggtgctactgggcaatccgggaaccaaattcgatcgataactttgcccttactggaacaaagagatccttgggtgaaattaatgctctgattgatgaactcttggttgttgttgaacttctgttaggatcagcatcttccacagcagcttctgatgatgttcgctgcttgattggatttgttgttgattgcccacagcctaatcaggttgcaagggtgttgcacctcatctataggttgattgtgcagcctaacatttctagagccaacatgtttgctcagtcattcatatcttgtggtggtgtggatgcacttctcgttcttttacagagggaagctaaagctggtaacaacagtattttggacaattctgatgcacttttaagtgaaaatgattttttaaggaatgatgattcagacacaaaagctgctagtggtgaagcaaagagccaggatgatcaaattcaatcagttgaacttgaacagcacgaatccatccttcatgaagaacatactgagctgggatctacaagcacaaatgatgtgccttgtgagattttgggatcaagtataggaaggaagttgtccagttctgaaaatcagctgctaaagaatttgggtggcatcaacttctcaattactgctgacaatgtccggaataatgtttacaatgttgacaaaggtgatggcattgttgttggaatcattcacattttgggtgctctagttgcatcaggtcacctaaagtttgcctcaagggctgcaaatccaaatttacctggtggccttctgacgacagttcatgaagaaggaaataccatgtcagaagatagagtgtcactgttactgtttgctctgcagaaagcatttcaagcagccccaaggaggcttatgactgtaaatgtctatatggctttaatttctgctgcgatcaatgtttcttcagttgatgaaaatctaaacctatatgattgtggccaccgttttgaacatattcaactgttgctagtcttgctccgttcgcttccatatgcatcaaggtcattccaatctcgtgctatacaggatcttctgtttttggcttgcagtcatccagagaatagaaccacgatgacctcaatttcagaatggccagaatggattttggaggttttgatttataatcatgaggatgtggaagcaacaattcattgtgcagagtggctttcaatggttggaggatctagcacaggagaccaaagaatcagacgggaagaatcattgccaattttaaaaaggagattgctaggcggtctgcttgatttttctgccagagaacttcaagtccagactgaagtaattgctgcagctgcagctggtgttgcagctgagggtttatctcctgaagaagcaaaaacccaagcggaaaatgctgctcatctttcagtagcactagcggaaaatgcaatagttattctgatgcttgtagaagatcatctgaggtcacaaggtcaacatttttgcacatccagatcacttgatagtgctgtcccttctgcctcaatggtttcgtctgctgccagtcgatcaaattcattgtgtagaagtggtaatgagcctatggatgctgggacctcaagacgatcatctttgtccactgatgctggtggccttccattagatgtgcttacttcaatggctgattcaaacggacaaatctctgctgctgtgatggagcgtcttacatcagcagcagcagctgaaccttatgaatctgtcaaacatgcatttgtttcttatgggagctgcattgcagatcttgctgaaagttggaagtacaggagccgcttgtggtatggcgttggaatcccatccaaatctgatacatttggtggcggtggaagtggttgggaattttggaaatctgttctggagaaggactcaaatgggacttgggttgaccttccacttgtgaagaaatcagttgcagtgctgcaggcattgctgttagatgattctggacttggtggtggtctaggtattggagggggctccggccctggtatgggagttatgactgcactttatcagttgctggatagcgaccagccattcctttgcatgctcagaatgactcttgtttcaatgagggaggatgacaatggtgaaggtgatgccttcacaggcaacatcagcataaaagatgtcatatcggaagggttgggccatcaagctggaagcatgatgccacttgacagcaacaatcgctcatctacaaggaaaccccgatctgcacttctgtggagtgtgcttggtcccattctcaatatgccaattaatgaatctaagagacaaagggtgttggttgcttcctctattctctattcagaggtatggcatgctattggtagggacaggagccccctaaggaaacagtacattgagctgattttaccaccatttatagccatcttgagaaggtggcgtccactattggctggtattcatgagctaacttcttcagatgggcaaaatccactgattgctgatgatcgcgctttggcagcagatgcattacccattgaggctgctctttcaatgatatcacctggttgggctgctgcttttgcctcaccacctgttgcattggcattagccatgatggctgctggtgcctctggaacagaagcaatagcacctccaaggaccttgaacaggcgtgacacgtcagtgcctgagcgtaaagcagcaccaaaactacagtcttttacaagtttccagaagcctattgaaacagcacccaacaagcatggatccacaccaaaggataaagcagctgtcaaagcagcagcattagctgctactcgggaccttgagcggactgctaagattggttcaggaaggggtcttagtgctgtagcaatggcaacatcaggacaaaggaggagtgcaggtgatattgagcgtgcaaagaggtggaacacatctgaagctatgagtgctgcttggatggagtgcctgcaatcagttgattccaagtcagtttcaggaagggatttttcagccctttcatacaaatatgtcgctattcttgtctctggttttgcgttggcgcggaacttacagcgagttgagatggagaggcaaacacaagctgatgtgctgaatcgacatcgggtgtcaactggagttcgagcatggcgccatcttcttcattgcctaacagagatggacagactatatggacctttcggtgaacccttgtgtgctcctgatcgtattttctggaaattagattttactgaaagttcttcaaggatgagaagatttatgaaaaggaaccacaaggggtctgatcatttgggtgcagctgctgattatgaagagcgaaagctaagtaatgttgcacaatcaaatgaatgcaacccagagggtacagaacctttagtaacagacacacttccatcaactgcacctataataacggctgaggccatgtcagtggatgacagaaatgaggacaatgagcagttagaatcagacacaactcaaagcagtgttgacgatcgactccaacaagcagatcaacagtctgtgaaaggatcaatagattcacgaggttctggcatttctgctgatcgcaatttggttcggtcgacggttattgcacctggatatgtgcctagtgatgctgatgagagaattattgttgagcttccatcgtcgatggtgcgaccattgaaagttgtacgaggaacattccaagtaacatctaagaggattaactttataattgatgagagtgcaagcgagagtaacatggatgatcatgcgtccactagcggccaatgtgatcaacaggataaagataggagttggttgatctcctctctgcatcagatatatagcagacgatatttgttgcggcgaagtgctttggaattgtttatggatatggaagcacgcaaaaatgcttatcgggcaattgttcacagcaagcctcccaatttgaatgacatttttctagctacccagagagctgagcaaattctcaaaagaactcagttgacggagcgctgggctaactgggagattagcaattttgagtacttgatggaactgaacacactggctggacgaagttacaatgacataactcagtatcctgtttttccttggataattgctgattaccgatccgaaattcttaatctggatgacccatgtacatatcgggatctttcaaagccgattggtgcactaaaccctgagcgactagaaaaattccaagagcgctactctacgtttgaggatccaatcatcccaaagttccattatggttcacattactccagtgctggcacggtcttgtattaccttttcagggtggaaccttatactacgctctcaatacagctgcaaggcggcaaatttgatcatgctgatcgtatgttttctgatctatctggtacatgggacagtgttcttgaagacatgagtgatgtaaaagagctagtccctgagatgttttacctccctgaagtatttaccaatataaattctatcgacttcgggacaactcagcttggaggaaagctagattctgtaaatttgcctccttgggctgaggaccctgttgattttgtccataaacaccggaaggctcttgagagtgagcatgtttctgctcatttgcatgagtggattgatttaatatttggatttaaacagaggggtaaagaagcagtaatggccaacaatgtgttcttctacattacatatgaaggaactgtggacattgacaaaatcacagatccagtgcaacggcaagccatgcaagatcaaattgcttactttggacaaacaccatctcaattgctaactattccccacatgaggagaaagccattggcagaagttttacatctacagactatattccggaatccaagtgaacttaaatcatatttacttccaaatccagatcgctgcaatgttccggccagtaccatgtttgtatccaatgactctattgtagttgtagatgtaaatgtgcctgctgctcatgtggcacttcaccattggcaaccaaatactccagatggccaagggacaccctttctatttcatcatggtagaaatgctgcaaattcaaccggtggtgcactgatgcgcatttttaaaggatctgctagttctggagaagattatgacttcccaagagctatagcatttgctgcttctggcatccgtagttcagcagttgttgctgtcacatgtgacaaagagattatcactggtgggcatgctgatggttctgtgaagttgatctccccagatggagcgaagactattgaaactgctactggacatcttgctcctgttacctgccttgcactttctcatgatagcaactaccttgtaacagggtctcgagataccgtcgttatactctggaggattcatcaggcaggctccttacataagaaaaatgcccctgagcctccaccaacaactccgacaacaccacgcagtcctagtgtgagcaaccttacagaaatcaggaggcgtcgaattgaaggtcctatgcatgtattgagaggacatcttgaggaagtgactagctgttcagtcagtcctgacttgggacttgttgtatcctcatcaaacatgtcaggtgttcttctacattctttgaggactggtcgtctgataaggaagcttaatgtagcggaggcacatgctgtatgcttatcttctcaaggggtcattctggtttggaatgaatcaaagaaaagactatctacattcactgtcaatggactccctattgctaccacagttctatcacctttttgtggacgggttagttgcattgagatttctactgatggccatttcgccttaatgggaacatgttcttcaagcaattataagtgtgaggacagtactgagactggggatcatgaacctaatgaaccaaatggcaaggatggcatatctaaacaagctgaaactaggcaatctgttcatgtgccttctgtatgctttgttgatctgcataaacttaaggtatttcatacaatggagctggggaaaggccaggacgtcacagcaatcgctctaaacaaagagaacacaaatcttctactgtctactgctgataagcagctaatagtgttcactgatcctgctttgagcttgaaggtagtggatcagatgttacgtcttggttgggaaggtgacgggcttcttcagtcatgagcaaaagcatttattttggtaaatcattactagcttaaagatcattttctgttcgtgttagcataatgaatcgatggctcgagatgtactatctgtacaaagtggataagtaataggacctgcgagttaggctgagcaaaggctaggtcgtacaccatatccagcagatcatattattcagcgaactgctgagtaaacgaactttatcgagtagccctgtaaaaatcccgatggtttttctttttgtagaatgggtgaatagtcattttacttgtttgcaaaaaaaaaaaaaaaaa

SEQ ID NO: 37804 - DNA, 674 bp, Oryza sativa
  unsure (1)..(674): unsure at all n locations
  Clone ID: PAT_MRT4530_4149C.1
caatctcctctcagccgccgcccttcctcccgggctcccggctcccgcgagacgccaccacgggggcggggcccgcgtgtggcggacggcgacggcgacggcgacgacgngggctgggccgcgtgcgcgaatggcgacggcgacatcgggggcgntgncgcgtagggcggatgtcgacgncggttgctcgncggcgcgaggcgacgacttgcggcttgcgtcgacgagcgtaaccntncgtgtcgncgtcgggncgcccntntcanggcgacgtcannnntannnacgtcgtgtgggntgngncgtacngaaannnttctttntgngcggcngnatcgtngntttnngntcttggaatctngnggattcttaagttgtnaanntaagatgaacgaagnntggttttgngttgtnaanggaatttgttgnntgnatntnatnattgaattttggttttaagtttnanngaaagtntnaaatttgntnttaaanntgtnttnntgttaatnttannanttttttaaatntttaattngantttnttgttatnatatttngttatnggaaaaatntnngtaatttnngnaatntnttttngatnaatnntntttattanttgntttgaaaatttnnattntttgaaaannatnaatannaaattgtnatntnttttt

SEQ ID NO: 37805 - DNA, 1239 bp, Oryza sativa
  Clone ID: PAT_MRT4530_414C.1
atggcgacgccacgatccccaagcccccgtggcgacgcgcgcctggactcggcaccgctcctcggtggcggcggcggcggtggcggccgtcgccacggtggcgcgctgcggcggccgtcgctccggggagcggctcggttcctgcgccggagcggtcgccgggcgatgcgcgagccgtccctgctggtgcgggaagcggcggcggatcagctggaggagcggcaggccgactgggcctactcccgccccgtggtggcgctcgacctcctgtggaacctcgccttcatcctcgttgccgccgccgtgctcgcgctgagccgcgaagagagcccgtccatgccgctccgcctctggatcgttgggtacgccgttcagtgcgtcctccacatggcctgcgtcgccatcgagtaccgtatgcgccgcggccagagcggtgaatcccccatggccgccgacgaggagacaggaaccgatggatcgtcgtcgtcaagtgacgaggacgccggcgagcgtgctccccgtggccgcaatggcgattatgttcgtattgcaaaacatctggagtctgctaatacaatgttctcctttatatggtggataatcggattttactgggtatctgctggtgggcaagttcttactcatgatgcacctcaactttactggctttgcatcgtctttctggcatttgatgttttctttgtcgtcttttgtgttgctttggcttgcatcattggaattgctgtttgttgctgcctcccatgtatcatagcaattttatatgctgtgtctgatcaggagggagcatcggaagatgatattcgccaaattccaagatacaaatttcggaggatggatgagcctgaaaagcaatctgtcaacatgactggatcttccggtggaataatgatagaatgtggcaccaaccaacctattgaaaaagtacttgcagctgaagatgcggagtgctgcatttgcctgtcagcgtatgatgatggtgcagagctgcgtgagctcccttgtgggcaccatttccactgtgtctgcattgataaatggctgcacatcaatgcgacttgtcccctatgcaagttcaatgttcgaaaaaacagtagcagcagtggtagtgaagaagtataaatctccacgagagaatccaagcataatcggtatttagcttctcgtcccacgcgacttctgtcacaactgtggtacttttcatgtcatatcccctagagt

SEQ ID NO: 37806 - DNA, 393 bp, Oryza sativa
  Clone ID: PAT_MRT4530_41500C.1
atgtgctccaagtgccacaaggagatgatcatgaaggaggagcagcccaagcttgctgcctcctccatcgatagcattgtcaatggttgtgacggtgggaaggagcatattgttgctgccagtggtagcacggcggtggcggtggctcaggtcgaggcgaagacgctcgttgtgcagcctaccgatgtcgcgggcaccagcgaggaggttgctgtagtccccaaggaagagggttggctgacgggattcaactgccggtgcggtaacatgtactgtgcgttgcaccgctactccgacaagcatgaatgccagttcgactaccggactgcggctagggatgccatcgccaaggccaacccagtggtgaaggctgagaagctcgacaagatctaa

SEQ ID NO: 37807 - DNA, 122 bp, Oryza sativa
  Clone ID: PAT_MRT4530_41501C.1
caagggcatctcgagtcaagtcgttagtaactttgaacactgttttgatgtgtcctcgccaggacattatgatcatcccacatatgcgctgagagcaactacatcattcgatcagcactact

SEQ ID NO: 37808 - DNA, 1249 bp, Oryza sativa
  Clone ID: PAT_MRT4530_41502C.1
ttagatcttgtcgagcttctcagccttcaccactgggttggccttggcgatggcatccctagccgcagtccggtagtcgaactggcattcatgcttgtcggagtagcggtgcaacgcacagtacatgttaccgcaccggcagttgaatcccgtcagcccaaccctcttcctacaggtagcgcaccggttcggcccttccttgaccttggggactacagcaacctcctcgctggtgcccgcgacatcggtaggctgcacaacgagcgtcttcgcctcgacctgagccaccgccaccgccgtgctaccactggcagcaacaatatgctccttcccaccgtcacaaccattgacaatgctatcgatggaggaggcagcaagcttggcctgctcctccttcatgatcatctccttgtggcacttggagcacatgttcatggtcgccgcgctgccaaagaagccgcagttattgatgcaaaggattgggccctcgggctgctggcagccagcctccttgtgttccatcgcaactgtgatacagcacggctcgatggcgtggctgtggacggggacgacgccagctaagctggggacggggacggggaaggggacgacgccggcgtgggtggggaaggctgcccccaacctccggcgcgtgcgccagccaccgcgatcgaagacggcgacggcggcgagcctgacctggacctccatggtaccaacgcccccgcccttgagcggcgcggcgtcgtcgggacccacgtatgcgccatccacctcgaggcggaaggcgagcgtggtgatgttccgcggcggagtgagcttggagtttgggttgtcggcgaggagggaggcgtcgatccgtccccagccgcgccggtgccagggcagggatccatctcctccacgcaagtcaacctccatccccatggcgggtggttcattcgacgagacgccgccaacgccaaatcccggcgcgaaccaaaaagcgcgggaaaaatttccccgcacccgcgccatttgtggcacttggagcacatgttcatggtcgccgcgctgccaaagaagccgcagttattgatgcaaaggattgggccctcgggctgctggcagccagcctccttgtgttccatcgcagctgtgatcctggtcgcgccggcggcggaggccgagccggcggtggcggaggaggcgtgcccggattggaatcgcgagctccgtgcgcgtggtggcgtctcctctctctctaaaa

SEQ ID NO: 37809 - DNA, 1171 bp, Oryza sativa
  Clone ID: PAT_MRT4530_41503C.1
tcgcgatctatagctggtgtttagatcgcgagcgcccccttttttttttttttttttatgatggaccattgctgataactattactgattgaaatgtagcaagcatgggacatagtacatcacagagctagctaaatgagacaccacaatactgaccgaaaaccaccaagaataaagattacacaacatacccaacacgcaaaccacttgacttgactgagaggatgaattctttcggctgccaggatgcagtgtgcatcacaaagttgaacaatttaagaaatgtagcagccgacaagaagaagtgtgaggatagagcagcaaaggtggatgttgaaatcttgtaggttgcaatccattccacgcccctagccgccttagatcttgtcgagcttctcagccttcaccactgggttggccttggcgatggcatccctagccgcagtccggtagtcgaactggcattcatgcttgtcggagtagcggtgcaacgcacagtacatgttaccgcaccggcagttgaatcccgtcagcccaaccctcttcctacaggtagcgcaccggttcggcccttccttgaccttggggactacagcaacctcctcgctggtgcccgcgacatcggtaggctgcacaacgagcgtcttcgcctcgacctgagccaccgccaccgccgtgctaccactggcagcaacaatatgctccttcccaccgtcacaaccattgacaatgctatcgatggaggaggcagcaagcttggcctgctcctccttcatgatcatctccttgtggcacttggagcacatgttcatggtcgccgcgctgccaaagaagccgcagttattgatgcaaaggattgggccctcgggctgctggcagccagcctccttgtgttccatcgcaactgtgatcctggtcgcggcggcggcggaggccgaggcggcggtggcggaggaggcgtgcggggattggaatcgcgagctcggtgcgcgtggtggcgtctcctctctctctctctctctctctctcactctctctcttcaggggaaggtcccggcactgaccgaaaaccaccaagaataaagattacacaacatacccaacacgcaaaccacttgacctgactgagaggacgaaaacacgcggctgccaggatgcaacgagcatcaca

SEQ ID NO: 37810 - DNA, 1683 bp, Oryza sativa
  Clone ID: PAT_MRT4530_41504C.1
atggataccttcttttctgcagttcttggtgatcttctcagcaggtccatatccttcatggttgacagttactaccagaagcatcagggtgttgaggagaatctacaatgcttacatcgcttgctgctccggatccaagccatcgttgaggaggctgacagtaggcacatcacaaatcaagctatgctgctgcaacttagaatgctgagcaatatgatgtacaggggctactacttccttgataatttcaggtgccgaatcgttcaagcgcatgctcaagatgaggtgcgtgatcactctcttgccctgtcctctttcaatccattaaagcagttttgcttctccactacaacaaggaaaatggtatctgaagtttcggagagaaaagagctgcataagatgcttggtcacctggaaagcattgtttcagacatgcaggagtttgttgtgtttgtgagcagctaccctcgtatgagtcgacaaccttattgcagctacttgttgctagagaactgcatgtttggtcgccaagaagaacaggaaagggtcatcaacttcctgctagcacgacatcctcccggcggtgaagaagttattgatgtgcttccgataattggcccaggcagggttgggaagagcactcttgttgagcatgtctgccatgatgaaagggtgcgtaaatacttctctacaattgttttctatggccttggtagcattgagaataatggagacatggcgtttcttccagataccggcgcagtcaaatatcgaaatcctgtctcaggcaaacagtcattagctatcattgaacttgttgatgagatggatgatgaaacatggaagaagatattgcacagccttagaggagaccacatagcacctgtgagtaagatcataataatgagccgatcaaacaagatagaattgtttggaacaacaaaggcactccaattagattttctcccaaaagaagttttttggtatttcttcaagacgattgcatttgggagcacaagtcctgtagaggagcctaagctagcatccatatgtatggacatcgcggctttggtgaatagatcattcattggattaaacgtccatgggagcatactaagatctaatatatgtgctcaattctggtacagttatctcaaacgtctgaaatattacacagacaagcatgtccgtctgtttggtgaacacccaagagacacaaataaaaataacggtggacttacttacgtttggatgcataaaaacaaacatggctgcagtggcctagcgacatacaaactttatcaagcaagttctataagtcaaaataatctaccaacgatacgatcaattgatatggtttctcgaaatgttaagcctcgagcgaaatatgaagtcttggaatggcaatccagcatacctccatactatagctacatcgcgcaatacgagatacttgcacaaccgaaactcatgctacctcctaaaaggaagcgatccggggcgctctcagaagagaatgctgtgtcatcttccgttatccgatcttttaatcatatggttttgttttcttttctgaaggagcaacaagaatgcctcctgtttggtgagcatttgagctcaggggagggcctcaggctgagcccacagcactgggctcctggagcgcaccatggttgtgcctga

SEQ ID NO: 37811 - DNA, 1629 bp, Oryza sativa
  Clone ID: PAT_MRT4530_41505C.1
atgtcgctgcccgccctcgccgccggccgcgccgcctccgtgcggccgccgcgcgcctcggcggcctcgggggaggcggctgctgctgcggcggcggatcagccggcggggcggaggccggtgaaggtgatactgccgaagaagaagccgcagaagtggtcgacggggatggcgcccggggagtacggcggcgggccggcgacgcccaagccgcgcaagtactggatggggaaggaggaccgcgaccccgtgggcaacaccgacgacttcatctggaacaaggacttcctcccacacatggagcgcgtcatcgccaacggcggcgcagacacgccccccaccatcacccgcctcaccccggtggatgaggactcggaatcagggttcctaagcatcaaccgcgcaatgagcctcgacagtgtggatgttgatctgagcaaggagcttcaggcgccaaccaggccaatcttgaaaacccaggttgaggctgcctggagggggcgggccattggagctgaggctgtcaacggtgttgcgtctcctagatggaggctagttccgactcgccgggaacaagcaaagtgggaccgagcagctaaggcagcaactggtggcagtgatgtcatactaagggaatcaaagtcaagagggcagcaaggagaccctgaggtattggcagctaaatcaagggagcaatatctagagttgaaacaaagattgcagttgtttactttaggcattggtggcattggtttggtctccgcctatttttcctactctcctgagattgctgcaagctttggtgcagggctgattggatctgtcctgtatctccgcatgcttgggaccagtgtggattccttagctggtggaactggagaaactgtgaagagtgctgctgcccaaccaagactgcttattccagtggcacttgtgatgatgtataaccgatggaatgagattttagttccagattatggcttcatgcacctggaattgatacccatgcttgttgggtttttcacctacaagattgcaacatttgctcaggcaattcaagaatctatacctgcagttgggaatcgtgaatcttgaacatagttctggtgaatagaattaaaggtagttgccctgaggaagataggtcacggagatactgaggccaaggttttataagaatctgatctggggatgttaccaagataagatgcacactcagtcattgaggagcgagtataccatctgaatcttgatccaaattttattatagctgcacaatagaaagtttgtacataggtatgtagtcaacttcatccaacattacacgtaaatcatcaaaaatcatgtacacctctaaacttttagcacagtgaccaccgaattttatggttgatcttaaatttaacagtatatatggtcaggactcgggaccaattctgaatgcgaaaaacacaggctgtcaatacagctgttttcaaaaaaaaatgaaaaagctcgcaaacataagaaaaaatgatacaaagaaaaagaaaaagaaaggaggggggggggctttcaaagggaacaagataatggccccgtttcttgaagaaaatagtgtttttattggggccactaaaaaaaaatact

SEQ ID NO: 37812 - DNA, 1001 bp, Oryza sativa
  unsure (1)..(1001): unsure at all n locations
  Clone ID: PAT_MRT4530_41506C.1
ctggaccgcccgggtccggcggtgggccgcatggggtcagcgcggacggaggcggtggtgacgatgtcttcccggatgtggaggtggcgacagctgagtggaggcgggcaacggatcggggatctacagtaccggcggcgggataacacgacggcagcgacgtgacagtcggcggtggaagagggcaaggggtgggaggggcgattgacagagggaggattgtgcagcggagaggaggagaccagtggtgaatcggggtgagggagtcgattgtgaggagggcgacgggatttgggggccgcgggttgttaccggcggcggcggcggctccctcaaccccttgtcacctccctcccgcggtatatccgncgccggtgccggtgccggtgccggcgtcggcggaagaaggtggatccgccagtgcggcgggtggctccctccgccccctctcgcctccctcctgcggcagatctagcggcggtggcggcctcgcggcggccatgggtggatccagtggtggtggcggctgcggaggacagatccggcgacagcggcggcggctccctctgccccctctcgcttccctccctcggctgaaacgacggtggtggcgggctggccatgggaggcggtggcagcagaggcggcggcggcgggtggcgagcgcaccggggtgggctgcgacaggtggacaaggggaggaagacngcggccgaaagggaggaagaccacgactgtgatgggggaggaagacggcggcggcgatcggggagaagggcaacgccgacgggagggaggaggaggcgacgacgatgacgtggagggctctgcagcggcaagggcggaggcagttgccgaggtactcctgcggcaccgagccggcctgggggagccgggttaggcgcgccgccggatctggcgaggtgacgcgagactaggcgaggcagcggcggcggcgtgccggcgccggcgacgaccggcggcggctataaaggcggcgg

SEQ ID NO: 37813 - DNA, 1864 bp, Oryza sativa
  unsure (1)..(1864): unsure at all n locations
  Clone ID: PAT_MRT4530_41507C.1
atggcgagcgtccgtaccgagcggctcgcgtcgtgcctcgccgccgtggccaccaaaccggccgacttccgccgcgcgcacgccatcctcctcacctccggccacctctcctcccgctactccgtcaactgcctcatccgcgccgcctccgccccctccgcctccgcccttctccttcgtttcctcctcaaccaccgcctcctgccggaccacctgtccctctccttttccctccacccctgctcccgcctcccgagccaccccgtcgccagcgtcgtccactccctcgccgtcaggctcggccacgcccgcgacgtctacgttgtcaacgccgccgcctccgcctacttcgccgccgccgacgtcgcctccgccgagcggctcttctcggaggcgtccagggatgtcgccgacgtcgttacgtggaccacgatggtcaccgggcacgccaacgccggcgacgtcgagcgtgcgaggtggttcttcgacgccatgcccgagaagaacgtggtgtcgtggaacacgatgctgggcgcgtacgcccgcgccgggatgctgccgaaggcgcggaagctgttcgaccgaatgcccagccggaacgctgccacgtggggctcgatgatcaccggcctcttgcagtccgaccactgcgaggaggcgttgagggtgttcagcgacatggtcgcgagcggcgtcgtgccgaacgagcctgcgctggtgagcaccgtctcggcatgcacgcagctgaggtggatggaacacggcacgtgggtgcacgggtacgccgagcgagagctgaacggggcgatgagcgctgtccttgcgacggcgatcgtagacatgtatggcaaatgtgggagcatccgtgatgccgtcagggtgttcgctgcaatgccggtgagaaacatctactcgtggaactcaatgatcgctgggcttgccatgaacggcagcgagaggcaggccctgtcactcttctggaagatgcagctggctggtgttcgaccaaatgacataacattcattggtttgctgagcgcttgcagccactcaggtcttgtagacgagggccgctggttgttctacaagatggtgaatcactttgggatccagccagtcccagagcactatggtctcatggttgatttgcttgggcggtccggtcatgtcagggaggcagtggatttcgtcaagagcatgcctgtggagccacacccaggcttatggggtgcacttgctggcgcctgcaagatccatggcgaggtggagctcggtgaggaggttgccaagaagctcattgagttggagcctcagcatggcagccggtacatcctcctgtcaaacatatatgccacctcgaacagatgggatgacatggctaatgtgcgcaggatcctgaaggatcgcaaggtccccaagggtacaggcaatgccatagttggaaatgattctcagtcttcaggatatgaaatcgattcgtgattagtgcttctttggactgagaagtgcattcagtgtgactttgcacaagctgcgtgtggtagggagggatgaaccaccaccttggagacaccattgtactgaaacaagcccccctaaggatattacttttatggggcatttggaaagtgcataacgggatatattctcagcattcttgatgggttagtttgcaagtgcttggagaaaaaacactcagattatgaagaaatggtgaccaagggaagaaccaccaccttggagacaccattgtactgaaacaagcccccctaaggatattactttcatggggcatttgnaaagtgcataacggggtacattgttggtagagacggatcacttcattggaattttcaagagcact

SEQ ID NO: 37814 - DNA, 219 bp, Oryza sativa
  Clone ID: PAT_MRT4530_41508C.1
atgtctcccgcacattgtcacaccgcgctagtgccactacatccctccattgctagcaccgtagatcatcgtcgtgatggaggagagctgtcaccatcagtaccactctaccagcttgggttttctacgacggtcagcactgccgccagcaaccaatggccaaaatgcaccattttcaatggcggcaaccagccgccagcgataaatcattttcactag

SEQ ID NO: 37815 - DNA, 614 bp, Oryza sativa
  Clone ID: PAT_MRT4530_41509C.1
gaatctctccataggtgctggatttttcaaacggccccacagaggttgacgctgatgatggaagctcatcggtaacgaattgacaaccgacacctattagggggcgggaaattttttaaaaaagtcggctcaatgagtcggctaatgctgattgctcccaatcctattgcccccaattcacaaaatacatgaatcaccaaatcatccaaatgcaatcacaaatcgaaatcaagaatccccacaaaatcaacatcccaaatcaaaccattgctttgtggtggttactaaatcaacatcccaaatcacaaaaatccccacaaaatattcacaaatcaaaccaccgccatgccggagagaactgtcattggttccatgttggggaggaggacaaaccgccgtcgctgccggcacaccgaggaggggggagtagcaactatcgccatctcggggaggggagcatcgccaccaccgcttaggatttgaggagaggggagaggaggcgagataggagttgaataaaaagatagggtgaaaaaaggggcgtgcggacggagaaaaggaaaggaaaagagagggtgaaaaaagaggcttgcgcccggagaaaagggaaggac

SEQ ID NO: 37816 - DNA, 225 bp, Oryza sativa
  Clone ID: PAT_MRT4530_4150C.1
atggggcgggttgggctggaacgcccccgcccccgctctccgacttctccccctgaccctggcccaacagaggtggtcgggtggaaaacgtcactcgcccccgtccccgcaggggaccctgtgaatggctgtgcgtggctaccaacgccgtcgctcgtgcctggccgtcgacgccgtagtcgcgtgcgcctggccgcgaacaccgacgccgtcgcccgcgcctag

SEQ ID NO: 37817 - DNA, 257 bp, Oryza sativa
  unsure (1)..(257): unsure at all n locations
  Clone ID: PAT_MRT4530_41510C.1
cgcagtaccgcctcgccccccaccagttcgcgccctcttgcgcttcgtcacagtggcccgtgtttgagancgagagaagacaagatgggatggacaggctgcgtggccgcgcggcttctggaggctgccttgccgcggccgagctacctggagacaatttcgaggaggctgcggagaagtggagacgatctcgaccaggaagacgacgtacccccgcggtacgcgcgatatatatcattcatttatcacacccacgc

SEQ ID NO: 37818 - DNA, 495 bp, Oryza sativa
  Clone ID: PAT_MRT4530_41511C.1
gatacgcgaggataaagatagatccgaagtggttcccaaaacagagcagcgcatcggctggagatcgtatcggaaagtttctttcttgtccaataaggactagtaactacccatgggtataaatatgtacacttggggtcattttaaactatcatatagatcaatacaactactctcagcacattgccaccctctttttagaggtttttacttatcaccggcggaacttggcacctaacgcgtggctgcatcacctttcgatcttcgatgaaggggtaagtcctacgttccgtcggccctggcaattgtatcggctacattagtgttgttcaaggcttcgacctcttggatcgctctggttcggttgatatatttgcctaactacctatcatatatcttagttaatctagtttagtagctcgatttacttatatcggttgggatctgctgtagggtttttgccggtatcggctaaattgttttgctagattagat

SEQ ID NO: 37819 - DNA, 906 bp, Oryza sativa
  unsure (1)..(906): unsure at all n locations
  Clone ID: PAT_MRT4530_41512C.1
atgggcggcggcggcggccacgcgggccgccactccgtcggccccgcggcggccgcggctgcggcggcggcggaggccgcgtccgccgcggccgaccgcttcctccgctcccgcggcgccggcgcgtccacgcaggtcgagttatctctctctgcatcaaatttgggcgaccaagaattctttaccaagagcaatcccatggtcattgtatattctaaaagcaaagaaggagcacttgaagaacttgggcgtactgaagtaatattgaattctttgaacccatcttggaatgcaagaatcaacgtgcactaccagtttgaggttcttcaaccaattgtgtttcaggtatatgacattgatccacagtttcatgatgtcaatgaaaagatgcttaaactggaagagcaacaatttcttggggaggctgtctgtcttttgtctgaggttatcactaaacaaaacagactgttgactctaaagcttggcgtttccgaacataacctaccaaatcctagtaaatttggtgaactaaatgttcaggcagaagaaagtgctggttcaaaagcaataatggagatggtattccgctgttcagatcttgaaatcaaggaccttctctcaaaaagtgatccctttttactaatatctagaatatcagagagtggagtgcctgttccaatttgtaagacggaagtaaggaagaacgacctcaatcccaagtggaagcccagtgatcttgaatctccaacaattnggaagtaaggagaaccctttaatcatagagtgcttcaacttcagtagcaacggcaaacatgacctaataggataccctttgtaattcgacagcaagatagtaaaaatcggtcgcagaattggaaaagatgtatcatagtcaggatggggaaa

SEQ ID NO: 37820 - DNA, 1144 bp, Oryza sativa
  Clone ID: PAT_MRT4530_41513C.1
tggtggtaggtaataaagaccgctaaaaaattttttgaggcgaataaaatccaccgcgcgcccaccgcctagtccatcctcgtccttatcccttctcgcagtctctcttcctctctcccttctcgcggtctttctccgcctctctcccttctccgtctctcctccctcccttctccaccgccgctagctcgtcgccaccccaccaacgccggctgccgtcgcctcagctccaccgccgcctgccgcccccatcacgccgccggatccgcgcggggggtggccgccgccgccggatccacgcagggggcggccgccgccgccttcgcgacgccagatccgcgcaaggcctccgccgccggatccgcgcggggggcggctgccatcgcctacgcccgccgcacgccgtcgtcgccttcgccgcgggctgccgccgtcgccgtcgacgcaggccgccgccctcgcctacacccgccgccatcaccgtcatcgtcgccttcgccgcgggcagccgccgtcgccgtcgccacaggccgccgccctacatcccggtcggtccggcaccgccgcctctgccgtctcagcctcctcgaccgccgccgctccggatccaggccgtcgcgttggcctcctcatccaccgccgctcaagatccacgccgtcaccatggtctcctcgacatccgggcggcgctgcccaacaccagccaatagcccattagctagaaaaccctaaccttccttcccacaccacacgatccttcccacttcccagtccccacatgcgccgcctctttctcgatctttctcctcctcctccccgcctcttctccgctttctcctcctcgcacgcgcctctccgccttcttctcgcgccgcgccaccgcctacctcgcaccgcgcctctccgcagaacttgcgccgtgccaccttctcctcctcgcgctgtgtcgccaccctctccccacacgtctgcgcgctcgcgacctcctcctcgcgctgtgtcgccgccctctccccacccttctccaccgagcgtagattctccgccgccgccgccgggcatactcctctccccacgcgcgtgactcctcccttccccaccagcccgcgctcgcttcctcccacatcgcgcgcaccaggcgtgg

SEQ ID NO: 37821 - DNA, 726 bp, Oryza sativa
  Clone ID: PAT_MRT4530_41514C.1
atggagaacccctactacgcgagcttcctcaagaatcaccaccgccgctactgcttctccaccccgtcgtcgccgtcgccggctggcgcttactcctcctccgcctcctcctccttcccgttctttccgacggtgggggtgacgtcgacgatggccgcgacgcccccgacgacgactgccccgccgtcgcctccgctccgggaggccttgccgctactgtccctcacgcccgcctcgcgcggcggcacgacggcggcgcaagagcgtgcgcggcagcgtggggaggactgcaccgacgacgacgacggcgcggaggaggagggggcggacgaggaggacgtgccgggctcgacgcccggcggcggcggcggcgatagacaccaccagctccgccgtcgccgcgcggggcggctcttcgccgacctcaacaccaaggcggcggcgggagacccgatggacgtggagggctccggctccggctgctgccgcgccgccgacgccgacgacgacgcggacgtcacggtcgcgctccacatcggcctgccgagcccgaccgccgccgacgccgtcgtgcgtccgaaggggaagagaaaagggggagaggagagagaagggagagagagggatgaggaggaaggaaggagaaatgatgacatgtgtcagtcccataatatattttcgtgtgtgaatgacatatgtgtttcacggatattttttgaattctaa

SEQ ID NO: 37822 - DNA, 201 bp, Oryza sativa
  Clone ID: PAT_MRT4530_41515C.1
aacaaaaaaaatttctcaaaaaatggggggcaaagggggacaaagaccagggggcaaggccccgaggacggggggaatcgcccctcgggggaaaaatcgggggggcaaatggcaaattcccacccaaaaattgggccaaatcccctttggggagaacccggcccgaaagaaaccaaagaaggaatcggaatttgttcttcc

SEQ ID NO: 37823 - DNA, 1329 bp, Oryza sativa
  Clone ID: PAT_MRT4530_41516C.1
atggagaacccctactacgcgagcttcctcaagaatcaccaccgccgctactgcttctccaccccgccgtcgccgtcgccgtcgccggctggcgcttactcctcctcctccttcccgttctttccgacggcgggggtgacgtcgacgacggccgcgacgccgccgacgacgactgccccgccgtcgcctccgctccgggaggccttgccgctactgtccctcacccccgcctcgcgcggcggcacgacggcggcgcaagagcgtgcgcggcagcggggggaggaggactgcaccgacgacgacgacggcgcggaggaggagggggcggacgaggaggacgtgccgggctcgacgcccggcggcggcggcggtggaggcggcgatagacaccaccagctccgtcgtcgccgcgcggggcggctcttcgccgacctgaacaccaaggctgcggcgggagacccgatggacgtggagggctccggctccggctgctgcgccgccgaagccgccgcggcgggggacgacgacgcggacgtcacggtcgcgctgcacatcggcctgccgagcccgaccgccgccgccgacctcatctcggggctctcgtcagcagccgggagaagatcctccaccgcgcgtcgtgacgaggaagaggacgaggcggaggaagccggcggcgcgagcagggacgacggcgacggcggcgacgccgccgacgccgcggcgccgctagggttcgcgtcgacgccgatcgggcgtctgaacaagggccagtactggatcccgacgccgtcgcagatcctcatcggccccacgcagttctcctgccccgtctgcttcaaaaccttcaaccgatacaacaacatgcagatgcatatgtgggggcatgggtcgcagtacaggaaggggccggagtcgctgcgggggatacagccgacggcgatgctgcggctgccgtgctactgctgcgcggcgggctgccggaacaacatcgaccacccgcgggcgaagccgctcaaggacttcaggacgctgcagacgcactacaagcggaagcacgggctgaagccgttcctgtgccgcaagtgcggcaaggcgttcgccgtcaagggcgactggcgcacccacgagaagaactgcggcaagctctggtactgcctctgcggctccgagttcaagcacaagcggtccctcaaggaccacgcccgcgccttcggccacggccacggcgcgctcggcggcgccgccgccctcgacgacgacgacgacggcgccgtctccgacctcgaccacgactcctcctccaccgcccccgccgcccgatccctctaa

SEQ ID NO: 37824 - DNA, 400 bp, Oryza sativa
  Clone ID: PAT_MRT4530_41517C.1
atgaccaaaatacgctcagtgcacaattatcttgcaaaacgaggcctgacccatctcatcttggcggtgcggctgatacatcgtcgaggccggcgcggagggtcgcgccaccacgcatggacctacggcggacggaggttgatgtgggggcttgcggacaagaagcgacagcgcatggagacagagggtccgtgcgcgaggcccgttgctgggtcgcgccgccgtgcaaggacctgcaccggacagaggctggggcgggggctcgtggcggtcagcgcggaggcagctgcagcgcggcaatggagcggcggcgtgtggagggttgcgcgcatggcccgtgggttggtcgccgcgccgcgcacggacctgcgccggacggtcggcgcggatgcacgtggag

SEQ ID NO: 37825 - DNA, 370 bp, Oryza sativa
  Clone ID: PAT_MRT4530_41518C.1
ccggtgttcctcagttcggtacttcttcttccttcactctccccaccaaattcccccaaatcgcagctgttcgccacccgcattgcgccgccattgcctccaaatccgagtactccttgagtaatctcagatccatctcgggttcctcccgccgttggcagcagccggagcttttttccgcggaagaaatggcgccgtttcggtgagttcttggcagtttgggatgatgcttggtgggtaggaggactaggagtgcggcggctcggggagaggctgcgatggagagcgccgccggggaggaggggaaggctgccccgtcgcttcccctggcgaccctgatcggccgcgagctccgcggcggcggctccga

SEQ ID NO: 37826 - DNA, 249 bp, Oryza sativa
  Clone ID: PAT_MRT4530_41519C.1
atgaatgtgtcaaaatgtgtttccgaccagtgtgcttcgggaggacgcactggcgagaagggatggagggtcgggagaagagtggcgcactgggaggagatagctgctagaagggagggggcgcacgggaggataggagtgctgggacaatggggcaacagggaggggaggcgccagcagaaagccgcgggagaggaagggagcatggggccggattggacacgtatgcacgatattttaatcttttag

SEQ ID NO: 37827 - DNA, 224 bp, Oryza sativa
  unsure (1)..(224): unsure at all n locations
  Clone ID: PAT_MRT4530_4151C.1
gcgacaccggcgccgagttcggncnnncncnacatcgaccacnnaaaccngngtntccagcgggagctcaccgactggntcaactngntcaggaccgacctcggnttcgacggntggcgcntcgacttcgncaagggctactccncgccgntgggaggatctacgtngncaacatcancccnacgttcgtcgtcggngagatctggagctcactcatctacaac

SEQ ID NO: 37828 - DNA, 471 bp, Oryza sativa
  Clone ID: PAT_MRT4530_41520C.1
atggcggtgacgccgttgccaaagagggaggagaacccatcgttgccgtttcggtcggcatgtggtgcacgcgtgatctccggcaagccgacgcgatttaagagcttccatccatcgtcgtctcgccagcacgagaacaccctgagcttgcacgccgccgcgacacggatgaggcttagggccgagaccaggaggaggaagatttgttcgaggagcgcgtcggagatgccgctgcacgctcctcaaacccgccgtcgccggcgtgacacaacgttctctcagattcttcaccttcgtcccattgtcatgccgatgagtaggcgagcagcggcggtggcgcaggagaggccgcacccgacacctggagagagatggagatgggagatggggagagaggaggaagaagaggaggggatgagaatgacatgtgggcccatgtggggccaaccattttttaatttttttaactga

SEQ ID NO: 37829 - DNA, 3271 bp, Oryza sativa
  Clone ID: PAT_MRT4530_41521C.1
ctgcaggaatcggcacgaggattgctgcgacggtccaggtttggttagttgttgagggaggaaaaaatggaagatatttctgggcgcaagagaggaaggcaggtgtttgctgctgctgctgggagcatgatgggaagctgaccagcagcttctccggtatcctggtgcggcggagtttcgtgctctttggcgacgggtgcactggtgattggagatgaagctctctccgccggcgtcggcggatatgccgcaggccttgccggagaacgacggggaacaaagatgtctgaactcggagctgtggcatgcatgcgctgggccccttgtgtctttgccagtggtcaggagcagggtcgtctactttccacagggccatagcgagcaggttgcggcatcaactaataaggaagttgatgctcaaatcccaaattatccaaacttacctcctcagttaatctgccagcttcataatgtcaccatgcatgctgatgcagagacagatgaagtttatgctcagatgacattgcaaccattgagcccggaagagcaaaaggagcctttccttccaatggagttgggtgctgctagcaagcaacccactaattacttctgcaagacattgactgcaagtgacacgagcactcatggtggtttctctgttccccgccgggcagctgagaaagtcttccctccactagatttttcacagcagcctccggcacaggagctgattgcaagagatttgcatgataatgaatggaaatttcgccatatatttcgtggtcagcctaaaaggcatctcctgacaacaggctggagtgtgtttgtgagtgcgaaaagactagtagcaggagactctgttatatttatctggaatgataacaatcaacttcttttgggaatacgtcgtgcaaatcgccaacagactgttatgccctcttccgtgttgtcaagcgatagcatgcatataggtcttcttgcagcagcagctcatgctgcagccacaaatagtcgcttcactattttctataaccccagggctagcccttctgaatttgtgattccattggccaagtatgtgaaagctgtttaccacacacgtgtatctgttggaatgcgttttagaatgcttttcgagacagaggagtcaagtgtcaggcgatacatgggtacaatcaccagcataagtgatctagattcagtgcgctggccaaactcacactggcgttctgttaaggttggttgggatgagtccaccactggtgataaacagccaagggtttctctttgggagattgagcctttgacaacctttccgatgtaccccagtgcttttcctttaagacttaagcgtccgtgggcttcaggactgcctatgcatggcatgttcaatggtgggggaaatgacgattttgcacgctattcttctctcatgtggcttcgagacggaaatagaggaacccagtccctgaattttcaaggacatggagtctcaccatggcttcagccaagaatagattctccattgctgggccttaagccagacacgtaccagcaaatggctgcagcagcactggaagaaattcgatatggggacccttcaaagcagcatccagctactctgcaataccaacagactcataatctgaacagtggattaaattctctgtttgcaagccatgttctagggcaggtgcagtttcaacctcagcagtcacccctgcaagttgttcagcaaggccattgtcagaacactggtgactctgggttccttcaaggtcagcttccacggctgcagttgcataacactcagcagctgctaaaggagcaagagttgcagcagcagcaaagacagcatgttttacaagagcaatctagtcaagagatgcaacagcagctcccatctagtgatcatcatgttgctgatgtagcttctgagtctggatctgctcctcaggcacaatcatcattgcttagtggatcatcattctacaatcagaacctcttagaaggaaatagtgatccccctttacatctacacaacaatttccacaacttctctaaccaggaagcctcaaaccttcttattttgcctcgaagtagccaattaatggcatcagatgggtggccttcaaagcgattaactttagaatctgctgttcatcctgaagctccgtccatgcaccccaagattgagaaagtaaatcaccagggtatatctcattttcctggcgcctttccaccacaatcagcaagaggctgttccatcgtccaggattgcagggcagatgctgagaaccgcctactttcatcatcatttgaactccaggatggcatgacaagcatcataactgatgctaacagagaaactgatactatggccatacctttgttgagatatagtggtgcagatttgacaactgaaaacaccttagcaacctccaattgtttaggtgaatctggaacgttcaatcctcttaataacatatctgtaaatccatcacaaggagcaacctttgtgaaggtttacaaatcagggtcccttgggagatcacttgacatctccagattcagcagctactgcgagttacgtagtgagcttgagcgtctctttggtcttgaaggccaactggaggaccctgtaagatcaggctggcagcttgtatttgtcgaccgggaaaatgacattcttctcgtcggcgacgatccatggcaggagtttgcaaatagcgtatggtgcatcaaaatactctcgccacaggaggtgcagcagttggttcgtggtggagacggccttctgtcctcacctggagcaaggatgcagcagagcaatgcctgcgacgactattctgcaagccacaacatgcagaatatcgccggaaacattgcatctgtagcgcctctggactactgagatgtagaccagaatccaaactaagcacccttaagactgcagggtcaccattcgtgatcgcctgcattccatgcgatcttcactagtcctgtccgaatcagtagcaactcagtcaataatatagctagatgatccgttgtattccatctgatcatggacatgctgtatgatagctgctttagctctattaaatctctaatggcaggcaactaggcaagaacagttctatgatgaatgatggcagtcgctgtagaattgaccttattctgtagctataatatgatgtctagaactgatgattccaatttccaaatggagcccggaacatattaaaatcaatcatttgtcgccttcttc

SEQ ID NO: 37830 - DNA, 1925 bp, Oryza sativa
  Clone ID: PAT_MRT4530_41522C.1
acgtgacacaagctcataaggttacgtcgtctcttccttccctttgggggaggttgtcagaaacaaagacgtcgtcggccgaatcactaaatggtagtcgagctaagccagttagatgtacacttcgtaccaaggatagccatcaaatctcaagtcctagccgatttcgtagccgactggactatcccagaggatagaccggccagccaactagacaacgaaacttggaccatggcgttcgacagcgcgctcaacagccaaggagcaggagcaggagcagggttcatcttgacatccccttccggagatcaattcaagcatgcaatccacctcaatttcaggcaacaaaaaacacggccgagtacgaaggcctactcgaggagataagagcagcagctgcactcggtgctaagcgactaatcgtgaaaggagatttcgaactagttgcaaaccaagtacatagactacaagtgctctaaccccgagttagcaaaatacctcgccgaagtttgaaagctggaacgtagatttgacgggatcgaggtctgacacgtctaccgaaaagacaatgtcgagccagacctcgcacgccgtgcttctagatgagaaccactcgagcccggaacatttctggacatcttgatgaagccctccgtcaaagacacgcacgacaaaagcatcatagccaacaccgacattccgtcgggggttgcagaagttgcatacgtcgttgcaaacattgagataacagacgactggcgtattccgctaataaaagtcctggaatcagacgagctaccggacgacgacacggaggcagagaagctatcccgtcaggccaagatatatgccccgaacggtatcctcctcaagtgcgtctcatccgatgacggaaaagctctcctcgtcgacatccatgaaggcatttgcggatcacaagccggcggacgtaccttggtcggcaaagcttttagacaaggctttttctggccaacagtcttaaaagacacctgtgacattgtgcaacgatgtgaagcttgccagttctttagcaaacacaccaagttgccagcacaggtgctccagattatccctttgacatggccgttctcgtgttgggggctcgatatactagggccattcccacgaggacaagggggctacagattccagttcgcggcaatcgacaaattcgctaagtggattgaagcagagccaacacgagaaatcaaagtcgacaacgccataaaattcatcaaggggatattctgcagatatggattgcctcaccgcatcctcacagacaatggctcccagttcactagcggccagattactgcattgagctaggagtcaagatctgcttcgcctcagtatcccatcctcaaagcaacggacaagtcgagcgtgccaacggaatagtactccaagggatcaaaacctgcgtgtacgataggctcatggcctacgacacaaaatgggtagaagaactcccgtcagtccaatgagccgtacgaaccacgccgacaacatccaacaaggaaaaacctttcttcctcgtgtacggatcagaagccatgctctccacggaggtacggcatcagagcacacgagtacataaatattccgatgaggaacaagatgaaagacgaagtgacgatgtgaatctactgaacaacatcgtgaaccaacaagccctacgccgatatcatgagaggcgcatcagagctcgcacacttgccatcggcgactacatcctccgacgagttcaaaaccaggaaggtcggaataaactctcgttcaaatgggaaggaccgtacacggtggtgcgagtcttacgaccaggtgcgttcaagaatgcagatggtgagcaccttgagttatccaactcttggaacattgatcaactacgtaaattctatgta

SEQ ID NO: 37831 - DNA, 186 bp, Oryza sativa
  Clone ID: PAT_MRT4530_41523C.1
cccccgggctgcaggatctcaatatgttctcctaaaattattgcttgagtatagtggtgttccttttgtgaactcactaagcatatttgttttcaagctaagaatatacagatgaagcatggaaggagggatgcttttacattctggtttgttttgaagccttaacagtagtcagccaatgatcag

SEQ ID NO: 37832 - DNA, 183 bp, Oryza sativa
  Clone ID: PAT_MRT4530_41524C.1
atgacagggcggcaacgtggcgacgggagggagggcagtgccggcggcggttttggcttcggcagccacgtggcggcgggagggagggcgacgaggcagcaggggaacacggggcggtttgcagtggcagcggagctggagctcgcgggaaggaaacaacaagggctggagtcggaccgctag

SEQ ID NO: 37833 - DNA, 512 bp, Oryza sativa
  Clone ID: PAT_MRT4530_41525C.1
gccacgcttcctgtagtctgacatgcgtgctatgagacgtgtatatgcaacctgagatgctcaaggaagctgacgatcgggaggccctcacgtggccgcaccggtggacgagcgtgatcttctgggaaggggacgagttggggcacgcctgtcaggaccagcaagatcgtgaactctacctgagagagggaaatccggaggaggctctactggatgctgaaatggatactgacgagcagaccggtggactgactcgagtgtagaggcgaaagacttatcgaactcatctactacgtggttcccttcaaagtatccgtcatgatagtgtgaatcctattacgaggtctatgtgataaaggcaatgattagacggcattgcggtgcatatacctagacctattctaaaactttaaataggtaggacggcgcgagtgctccggtgaaccgagcagctccatcaggagcttcaattgagccatggatagtaagcagaactggaaacgcgagatgaa

SEQ ID NO: 37834 - DNA, 649 bp, Oryza sativa
  Clone ID: PAT_MRT4530_41526C.1
ggagggaagggggaagcgaaacggcggtccacggctcaccccgggtcgacggcggcgacgggaacggcgaccggagcggaggaaggcggcggcacggctcgggtagacggggacggcggcgttccagcggtcggcgggcgaaacgaaggggtggacgaggtcgatggccgttggaaacgaaatccccaactttgtgctctgccggtcagaccgtcgttgtgaggccggtcaaaccggactactttgtaacggctagaaaactagccgttacagggcaatcattgagcccactcaacctggccggtctgaccacagtgtagtggccgatcagaccgtccacggctcggtcagaccgccatcggcttggtggggccggtcagaccggccttaccacgccggtcagaccggcctaaggcccacggtcagaccgcaggtcacttttcagctcaaacgaccattagtaaaacgacgatatctcttaactcgggtctcagaatttggcgttcttggactttatggaaagcttattcaaagggctatccaacccatgaacaatccatccaagaaacacaacttttctcagggagaaagggctcacactccaaaggatactccaccggacataaccacatgaggctacccaaaccta

SEQ ID NO: 37835 - DNA, 552 bp, Oryza sativa
  Clone ID: PAT_MRT4530_41527C.1
atgcaacaaataaatgagacaatagacaaggaatttttcactgaggttcggaaactcgccggtttcctaatccctgttgaggcgagcccaactccaccgctcaaccacgaagccaccgcacgcctcctttgtcaaggggtgggcaagaaaactagccgttacagggcaatcattgagcctactcaacctggtcggtctgaccacagtgtagtggccggtcagaccgtccacggctcggtcagaccgccgtcggctcggtctgactggttgcggctctggcggctctgtatcgccaccaaaaaccagacctgtggggccggtcagaccggcctaaggcccacggtcataccgcaattcacttttcagctcaaccgaccgttagtaaaacgacgatatctcttgactcgggtctcggaatttggcgttcttggactttatggaaagcttattcaaagggctatccaacccatgaacaatccatccaagaaacacaaattttctcagggagaaagggctcacactccaaaggatactccaccggacataaccaca

SEQ ID NO: 37836 - DNA, 585 bp, Oryza sativa
  Clone ID: PAT_MRT4530_41528C.1
ctgatatgcgacttctcctcttctagccagccgttggaaccgaaatccccaactttgtgctctgccagtcagactgccgttgtgaggctggtcagaccggactactttgtaacggctacggctagaaaactagccgttacagggcaatcattgagcccactcaacctggccggtctgaccgcagtgtagtggccggtcagaccgtccacggctcggtctgaccggttgcggctctggcggctctgtatcgccaccaaaaaccagaccagtgcaacagactagtggggccggtcagaccggccttaccacgccggtcagaccggctaacagacccggtcagaccggcctaaggcccacggtcagaccgcaggtcacttttcagctcaaccgaccgttagtaaaacgacgatatctcttgactcgggtctcggaatttggcgttcttggactctatggaaagcttattcaaagggccatccaacccatgaaaaatccatccaagaaacacaacttaagtcaaggataatgggctcacactccaaaggatatccaccggacatacccacaagatgtcactcactccta

SEQ ID NO: 37837 - DNA, 349 bp, Oryza sativa
  unsure (1)..(349): unsure at all n locations
  Clone ID: PAT_MRT4530_41529C.1
cctttggtgcaggattcgcactagccaactccggcaagccaagatcccaacacaacccaactccggcaagccaagaatcccaacacaacccaactccggcgatggcgtcncanctggtggaagancaccggtcgggcgcggaagtccacacggggcacganctgtgcgancggaaggcccgcaanctgctggtgganctcggcctccccgacgggctcctcccgctgccgtccctggangaagtgggctacaaccgcgcccccgggttcgtgtggctccngcaaaccaggcgggcggngccacccacactttcaanaccatcggcaancaggtttntgtncccnggcaa

SEQ ID NO: 37838 - DNA, 350 bp, Oryza sativa
  Clone ID: PAT_MRT4530_4152C.1
acgcgctgaccggccggctccccggcgagatcggcggctgcgcgcggctcgtcgagatcgacgtctcccggaacgcgctcacgggcccgatcccggcgacgctgtcggcgctgtcgtcgctcaactcgctcaacctgtcgcacaacgcgatcaccggcgccatcccgacgcagctggtggtgctcaagctgagctccgtcgacttctcgtcgaaccggctcaccgggaacgtgccgccggcgctgctcgtgatcgacggcgacgtggcgttcgcgggcaacccggggctctgcgtccgcggcaggtcggagctcggcgtgtgcaaagtggaggaccgcccgcgcgaccgg

SEQ ID NO: 37839 - DNA, 560 bp, Oryza sativa
  Clone ID: PAT_MRT4530_41530C.1
atgcaacaaataaatgaagagacaaggaatttttcaccgaggttcggaaacttgccggtttcctaatccccgttgaggcgagcccaactccaccgctcaaccacgaagccaccgcacgcccccttcgtcaaggggtgggcaaggtaggagccggcccacggagaggactacccaagcctcgatcactaggtcggtctgaccgcagtgtagcggccggtcagaccgtccacggctcggtcagaccgccatgggctcggtctgaccggctgcggctctggcggctctggatcgccaagaagaggcggtcagaccggacaacatactttggtcagaccgccataatggaggcggtcagaccgcaggtcacttttcagctcaaccgaccgttagtaaaacggcgatatctcttgactcgggtctcgaaatttggcgttcttggactctatggaaagcttattcaaagggctatccaatccatgaacaatccatccaagaaacacaacttttctcagggagaaagggttcacactccgaaagatactccaccggacataaccaca

SEQ ID NO: 37840 - DNA, 762 bp, Oryza sativa
  Clone ID: PAT_MRT4530_41531C.1
acggttttgcacaattcaaaacctaaatcaactagtctcaatgtaaatgcaacaaataaatgggacaagagatgagggatttttcaccgaggttcggaaactcgctggtttcctaatccccgttgaggcgagcccaactccaccgctcaaccacgaagccaccgcacgcccccttcgtcaagaggtgggcaagtgttggagtcgaaatccccaactctgtgctcggccggtcagaccgccatagagtggccggtcaaaccggactactttgtaacggctagaaaactagccgttacagggcaatcattgagcccactcaacctggccggtctgacagcagtgtagtggccggtcagaccgtccacggcttggtcagaccgccgtcggctcggtctgaccggttgcggctctggcggctctgtatcgccaccaaaaaccagaccagtgcaacagaccagtagggccggtcagaccggccttaccacaccggtcagaccggctaacagccccggtcagaccgacctaaggcctacggtcagaccgcaggtcacttttcagcacaaccaaccgttagtaaaacgacgatatctcttgactcggatctcggaatttggcgttcttggactatatggaaagcttattcaaagggctatccaacccatgaacaatccatccaataaacacaacttttatcagggagaaatagctcacactccaaaggatactccaccggacataaccacatgaggctacccaaaccta

SEQ ID NO: 37841 - DNA, 739 bp, Oryza sativa
  Clone ID: PAT_MRT4530_41532C.1
atggttttgcacaattcaaaacctaaatcaactagtctcaataaatttgcacaaaataaaggagacaagagacaaggaattttcaccgaggttcggaaactcgccggtttcctaatccccgttgaggcgagcccaactccaccgctcaaccacgaagccaccgcacggccccttcgtcaagggaaactagccgttggagtcgaaatccccaactctatgctctgccggtcagaccgccatagagtggccggtcagaccggactactttgtaacggctagaaaactagtagttacagggcaatcattgagcccactcaacctggccggtctgaccgcagtgaagcggccggtcagaccgtccacggctcggtctgaccggttgggctctggtggctctgtatcgccaccaaaaaccagaccagtgcaacagaccagtaggaccggtcagatcggccttaccatgccggtcagaccggccaacagccccggtcagaccgacctaaggcccacggtcagaccgctggtcacttttcaacacaactaaccgttagtaagacggcgatatctcttgactcggatctcggaatttggcgttctctgactctatggaaagcttattcaaagggctatccaacccatgaacaatccatccaagaaacacaacttttctcagggagaaatggctcacactccaaaggatactccaccggacataaccacgtgaggctacccaaaccta

SEQ ID NO: 37842 - DNA, 731 bp, Oryza sativa
  Clone ID: PAT_MRT4530_41533C.1
tatgggctcaaatatgtctctatgaatgtaaatagcacaaatgtaaatgcaacaaataaatgagacaagagataaggaatttttcaccgaggttcggaaactcgccggtttcctaatccccgttgaggcgagcccaactccaccgctcaaccacgaagccaccgcacggccccttcgtcaagggaaactagccgttggagtcgaaatacccaactctgtgctccgccggtcagaccgccatagagtggccggtcagaccggactactatgtaacggctagaaaactagccgttacagggcaatcattgagcccactcaacctggccggtctgaccgcagtgtagtggccggtcagaccgtccacggctcggtctgaccggttgcggctctgtatcgccaccaaaaaccagaccagtgcaacagaccagtggggccggtcagaccggccttaccacgccggtcagaccggctaacagacccggtcagaccggcctaaggcccacggtcagatcacaggtcacttttcagctcaaccgaccgttagtaaaacggcgatatctcttgactcgggtctcggaatttggcgttcttggactctatggaaagcttattcaaagggccatccaacccatgaaaaatccatccaagaaacacaacttaagtcaaggataaaaggctcacactccaaaggatatccaccggacatacccacaagatgtcactcactccta

SEQ ID NO: 37843 - DNA, 286 bp, Oryza sativa
  Clone ID: PAT_MRT4530_41534C.1
tccaacgccattaaggcgaggcgaaccaccggcgcagcagcggagcgcggccgatccccttccctcccctcccccatctcgacgccggcggcgagcgagcccccacaggttccgtgagatccgggccatggcgcacgcggatgcggacgccggggacctccccccggcccccgcgaagaagaagaagtctcccaccgaggaggaggcggagaagaggaggaagaagcttactccggggagcttgatgaaggggcttattcggtctggtgggggtgaagcgaaccct

SEQ ID NO: 37844 - DNA, 437 bp, Oryza sativa
  Clone ID: PAT_MRT4530_41535C.1
cccacgcgtccgattgatccagcttctcatccgcagcttcacgtcttcctaaagcaggttgtagggttagatttggttgatgatgagagtaaacctgaaaggcgtccaacaaagcatatgcctacacctgaacaatggaccaatgtcttcaacccagcattttcatattatgcatattactgctatgctaacttatacacactcaataagttgcgtgaatcaaaagggatgaccacaatcaaattccgtccacatgctggcgaggctggagacatcgatcacttggcagcaacatttcttctttgtcacaatatatcgcatggaatcaacttaaggaaatctcctgggcttcaatatctatactatcttggccagattggtctggcaatgtccccattaagcaacaacctcttggtttttgattaccaccggaattc

SEQ ID NO: 37845 - DNA, 1035 bp, Oryza sativa
  Clone ID: PAT_MRT4530_41536C.1
aattgctatctatttaaaaaccctttttgaattcaaattcctttgatttatttaaatacttctttttatttttaaaccatcctttagccaccaaaagctgtcgtgggaactttacccttccatggatgtaggatcaaggaggccgactagagggggggtgaataggcggttttaaaacttaatggcacttaaaccaaaactaatctaagttgctaggcaaggtgaggtgcaaggttaactaagcaactaagttaagttttgcaaaacctaggtgatatgggctcaaatatgtctctatgaatgtaaattgcacaaatgtaaatgcaacaaataaatgagacaagagacaaggaatttttcaccgaggttcagaaactcgccggtttcctaatccccgttgaggcgagcccaactccaccgctcaaccacgaagccaccgcacgcccccttcgtcaagggaaactagccgttggagtcgaaatacccaactctgtgctccgccggtcagaccgccatagagtggccggtcagaccggactactatgtaacggctagaaaactagccattacagggcaatcattgagcccactcaacctggccggtctgaccgcagtgtagcggccggttagaccgtccacggctcggtcagaccgtcatcggctcggtctgaccggttgcggctctagcggctctgtatcgccaccaaaaaacagaccagtgcaacagaccagtggagccggtcagaccggccttaccaggtcggtcagaccggctaacagccccagtcagaccgacctaaggcccactgtcagaccgcaggtcacttttcagcacaaccaaccgttagtaaaacggcgatatctcttgactcgggtctcggaatttgacgttcttggactctatggaaagcttattcaaagggctatcgaacccatgaaaaatccatccaagaaacataacttaagtcaaggataaatggctcacactccaaaggatatccaccggacatacccacaagatgtcactcactccta

SEQ ID NO: 37846 - DNA, 439 bp, Oryza sativa
  Clone ID: PAT_MRT4530_41537C.1
aagcgacaggttacatcataaactaataccggaatgacataagacaacacagcagagagatagccgcagaaacgactgttccatttttggtgaaacagagggggggaaaaacatggcaacccttgacgactaacaatgggatcgacccaatacctacttgggaatcgatggcccagcgttggcgaatgaggtggcttgaagccgggaatccgggggcgggcgagctcctgaactccttgtacctccttgcgcggggtgggcagcatgatatgcgacgggaacacccctgtcctcgcgcggtggagcttcggagacgactcacacaccacttccggctcggaggcgtgacagttttggagcgggcaggtcgggtcagcgggaggatccttataagaggcgtgcgcggggcacgagcaacatgtgcgcggggtcaccggga

SEQ ID NO: 37847 - DNA, 761 bp, Oryza sativa
  Clone ID: PAT_MRT4530_41538C.1
acggttttgcacaattcaaaacctaaatcaactagtctcaatgtaaatgcaacaaataaatgagataagagacaagggatttttcaccgaggttcggaaactcgtcggtttcctaatccccgttgaggcaagctcaactccaccgctcaaccacgaagctaccgcacgcccccttcgtcaagggaaactagccattggagtcgaaatccccaactctgtgctctgccggtcagaccgccatagagtggacagtcagaccggactactttgtaacggctagaaaactagccgttacagggtaatcactgagcccactcaacctggccggtctaaccgcagtgtagtggccggtcagaccgtccatggctcggtcagaccgccatcggctcggtctgaccggttgcggctctggcggctctgtatcgccaccaaacaccagaccagtgcaaatagaccagtagggccggtcagaccggccttaccacgccggtcagaccggctaacagccccggtcagaccgacctaaggcccacggtcacaccgcaggtcacttttcaacacaaccaaccgttagtaaaacggcgatatctcttgacttggatctcggaatttggcgttcttggactctatggaaagcttattcaaagggctatccaacccatgaataattcatccaagaaacacaacttaattcagggagaaagggctcactctccaaaggatatccaccggacatacccacaagatgtcactcactccta

SEQ ID NO: 37848 - DNA, 157 bp, Oryza sativa
  Clone ID: PAT_MRT4530_41539C.1
ccaagctccaaccatggcgactaggccggagcggaggctgattcttaaagggaagtatctactccaacgcgagcaatgacacctacggatcaggaggacggcagcagcagcagaagaagcagcaggatgaagcggccgccgctggagacaagacgtt

SEQ ID NO: 37849 - DNA, 417 bp, Oryza sativa
  Clone ID: PAT_MRT4530_4153C.1
atgcctgcaagcaataagccattcaagggcattgcaagcatgaaagtgtgggctaagaagataattgcaggactgatgcttgggttggaaacaatgatggtggtggcgtcccaatttgaccttcatgtcacgaccaccgagaccaatttgaatctctcctggggcttccgcgccgctttgttgtttccaaggtacgagcagacctccgaaccacatcaccgtcaacaagggagcaagcagcctcacttcaacaccgccatcgtcactcctagtcgtcgccacctcaagccaactgccacagcctactcttgtcatggttgccacgaggccatgggcttgtggacgaggtggcacaacccaattggggcagccccattgccatccctactggtgacggagttcgagggagaggcctaa

SEQ ID NO: 37850 - DNA, 876 bp, Oryza sativa
  Clone ID: PAT_MRT4530_41540C.1
atgacgataggcttgccagtaagagaaggtgtgagcagcgcgaagctcaccctcatcgtagcgtgttttctgctaccgtttcttgtcgaggctgaatcgcgggcaccggcgccactctccttcagcttcgacttctccaattcagccagctaccgcctggaggacctcctgttcgagggcaacgcaagcgagcccagcaacaagctggtggacctcacctgcaacgagttcgcggagacgatccacaagtgcaaggggcggatgtcgtacgcccacgccgtgaagttctacgacgccaccacgggcgaggtggccagcttcagcacgcgattcaccttcgctatcgccatcagaagcgacatcagcaacccgacggacacaaagggggacgggctggccttcttcctcgctgcttacccatcaacgattccatcgaattcagatggaggcaaccttggcctccttgccaccaatcattcgaaggcctacggcacagaccggttcatcgccgtcgagttcgacacatacaacaacatctgggaccccaataagacctacgaccacatgggcgtcgacatcagcgccatcgagtcggctaacacgacaagtttgccgagctacagcctgaatggcacgatgacagcctccatcagttttaacagcagcacccggatgctgcttgccaacctgcattttgatgatcatccatcgtttcaaccggccgaggtcagtgcgattttgccggatccggtcacattgcttccacaagaggtatccgttgggttttccgcagccaccggcggctctggcagtgagctccatcagatactttcatggtccttcaactccactcttggtttggccctctactgctaa

SEQ ID NO: 37851 - DNA, 333 bp, Oryza sativa
  Clone ID: PAT_MRT4530_41541C.1
atgaggttcgtggcggcgtacctgatggccaccattggcggcaacgcgagcccgaccaaggacgacgtgcgcgccatcctcggcgccgtcggcgccgacgtcgacgaggacaagctcggctacctcttcgaccaggtcgccggcaaggacctctccgagatcttggccgccgggagcgagatgctcgccttcggcggtgtcggcgccgctccggcagccgccgccactgccggtggtggcgccgcggcagctggtgagaaggagaaggaggaggagaaggttgaggaggaggaggaggacgacatcgtgttcagcctcttcgacgacgaatga

SEQ ID NO: 37852 - DNA, 477 bp, Oryza sativa
  Clone ID: PAT_MRT4530_41542C.1
atggcaacaaacaatggaggggaggagatgaaagtggagagcggtgtggttggggaggtgggtggcgaggaagaaggggatggcgcagaggaggaggaggaggtgcggcaggtgcctggtcggcgagtagtaaagcagcggtggaggttgcctgcagtggatccggcgacatggattccaacaacggcgacggacggcgaaactttttacaaaaagaatacaccgtttagaagtttgaaaagcgtgcgcgcggatgagttggaaaaattaagggaagaacccaactccaacaacacgcggcctgcttggttccgcgcgttggaacctcgggacagcctcggtcccgcgccgctgttctgcggcaccgactcgctatcccggctccatcgctcccgcgcaatggcgccgcggtaccgactcgatcccgcagtccagtcgtgcgggaccggctcggtcgcgcatcccgggtccacgtga

SEQ ID NO: 37853 - DNA, 246 bp, Oryza sativa
  Clone ID: PAT_MRT4530_41543C.1
atggcggcgagctcgagcttggatttgtcgaagactatggcggcgtccgggttcctgatcttccttctccgcggcccagcggcgcccagcgctgtcaccctccggggaaggagcgggaggggcggcggcggcctcgccttctccgcttcgtcctccaattggtgtgcccttgatttccgatttcaagaacagtggagccatggctcatcacttcagctccagaaagttcagaaaaagaggagttag

SEQ ID NO: 37854 - DNA, 1351 bp, Oryza sativa
  Clone ID: PAT_MRT4530_41544C.1
ttccgaatagaacatacttatttttatatataaattctcggtgtatagactttaaaaaaaaggaaatatatggggacttcgtcggtgcccgccagctgatcgagaaaatgccggagtttgggtgcgtgaccaatgtggccgtgtacaccgcgttgctcgacgggatgtgcagtttcggggaggtggatgcagcgctgaggctggtggaagagatggagggttggagcttgggtgcagggtgcgtgcccaacgtggccgagacgaccgcctactcctcagcccgcgaggacctcacgctgtcggagaccgaggaggaggaggaggaggaggaggtgcgcagtggtccctgcatctgcaccgattgctcgtttagcccccttcatgagtcgtcctcgtcgtccgacgacgacaacgccgtgccctcccccaccttctccctgttcctcgccttggcggagcagttctttggctgctctctcccgaatcagtgcgacatttgatgtaatcagatgggaattattgtatcaggggaagagatttgaggacttggacaatgaggtgagctacgagcggttccggcggcgcgagcggcgaggggtggtagcccgcgactacattgaggtgtactcctccatgctcggcagctacggccgcgccgtcgtggagcagcgcgttgtcatggtgaactggatcatggaggtcagtatgctctgcattgtacacgtatgctgcgaccatgactttgccttgcattcacaagcgatgaagctgcagccagagaccgtgttcatggggatagggctgatggaccgcttcttgacacgtggatatgtaaagggctctaggaacctgcagttgctgggaatcgcctgcaccaccttggcaacccgcattgaagagaatcaaccctataattgcatccttcaaaaagctttcaaagtagggatcaatacttacagccgaagtgaggtcgtcgccatggagtggctggttcaggaggtccttgacttccagtgctttgtcacaacaacccatcatttcctctggttctatctgaaggctgcgaatgcagatgacagagtcgaggacctggcgaagtacttggccttgctctcacttctggaccacaaacatctctccttctggccctccactgtggcagccgcagtggtagcccttgcttgccttgccacaaacaatgagtcatcatgccatttggttatggagactcacatgagaacgaagaatgatgatctgcctgaatgcctaatggtttttttattctctagacttctctattccaatctatctccaggatgcaacaggaagggtctgcatccaggtgggctac

SEQ ID NO: 37855 - DNA, 2051 bp, Oryza sativa
  Clone ID: PAT_MRT4530_41545C.1
gcttatcattggtcgcctcacctcacctgctccaattgggaacgccactccccttcttccgcccgagctcaagtcccaatccgagagagtcgatcagcggcagctagagcagagcgatggccgcgctgctgggcatcctcctcgcggccttcctcgccgccgccgccgtcctttttgcgctccgcctgctccactccttcctgtgggtcccgcgccgcctggagcgccggttccgccggcagggcatccggggcccgccgcgccgcccgctctccggcaacgccgccggctaccgcgacctgctcgccgccgcccagtccgcgccgctcgcgtccttccaccacgccgtcgtggcccgcgtcgcgccgcaccaccgcgagtggcccgagcggtacggccgcccgttcgtgttctggctcgggccccgcccgcggctggtggtctccgacccggaggtcgtgaaggccgtgctgaccgacaccacggggaccttcggaaaggctggccccggcggcaacaacccgctcgcgcggcagctcttcagcgaggggctggtggggctcaccggggaggcgtgggcgcgccaccgccgtgtgatcgcgccggcgttcaacatggagagggtcaaggcttggattccagaaataacatctatcacctcatccatgctggataaatgggaactacaagatgaagtacgcactgagtttgagattgatgtaaacaaagaattccacactttgattgcagatgtaatttcctgtgtggcatttggaagtagctatgaggaaggaaagcgagttttccaattgcaagaggagcagctaaaacttgttattcttgcaatgaggactgtgtatatccctggcttcaggtttgtcccaactaagaagaaccagagaaggaagatcgtaaaccaggaaatccggaattcgttgcgcaaattgattgagatcaatggaaggaagtgtgaggattccaacaatttgcttgggatgatgttatccgctagtaaaattgacagtgaattcaaaatgggaattgaagaaataattgatgaatgcaagactttttactttgcggggaaagaaacaacagctaccttgttgacatgggcaactcttcttctagctttacatcaagaatggcaaaacaaggctcgcgatgaagtccttcaagtgtgcggcaagtatgagcacccaaaagcagaaaacctgagtgaacttaaaattcaagtaatactttgtttaatgtttgaatgcaaccaggtaaatatggtgttaaaagaaaccctgaggttgtatcctccggccgtgtttctcaataagatagccaaccgggatgtcaaactgggcaaacttgacattccggctggcacgcagctccagttgcctattcttgacattcatcatgatgttagcatatggggtgccgatgcagatgagtttgatccatcaaggtttgcagagggcaagagctatcaccttggcgcatacttccccttcgggattggccctaccatctgtgtcggccagaatcttgcaatggttgaagcaaagtcacactccaaccccagtatggtgctcaagttcttgtccataagatttgagacttcgatggacctgtgtgtggatttctgggtttttgcaattacagagagcccggaggatccaaacaaggccaatgtcattctctctttgattgatctcctctcttacgaccggctccagatcacgggcacgcgctctcgcttctcgccaacctttgcccttgataaaaacggcaggcaaggcaggcagatcgaagcagacatcccggctatgcgacgctggcggatggcgaggcagctgctggcgacggtggcagatgcgacagcggctggcaacgtcatggtcagcggtagctgtcgtgagccaaacggttgccggcgacagcaagtggaggcgcggaaggagtcggacagcgaaggaggagactgggtgcgggtgcgggcgcggcgtcgacgacggaagcgggcgacggtgactgagaggaggcacgggcgacggtga

SEQ ID NO: 37856 - DNA, 773 bp, Oryza sativa
  Clone ID: PAT_MRT4530_41546C.1
cccacgcgtccgcggacgcgtgggttgaggtaagataagtatgaagagatagggtagaaatatctttacaagagtacaaagatgcggggcattgggggtggggccctgtagcgagcaagccaaatgggagaacaccacatatcagctgaatcttatccatagaaaagagggaattgaaggggcaggaaggatatcccggccttgtggcacacttgactggagatgtataaagagaggaggatgtgaagaaagaagatatctaccaccaagctaattaagcaaaagaagaagaagaagaaagaagaagaagaagatgcagaccgctgctagcagtgtcgttggattgtcggccgtgttgcccgctgctgtgaaggggcgcagcctgcagattcaggctcctcgccgtgttgcgttgcgcgttcgtgcggcggcggcggcggtggcagtggaggctgcggaggtggactacagctctaacatctcggtgtttccgatggaggcgtgcgacctcatcggcggcgaggcgtgcaacgtgcagatgtacccagaggccaagctctcatcatcggctgctgttgctgtttctcgtgcggcggcggaggaagtcgacagggactacctatcctacgacgagcccaccacgttgttccccgaagaggcgtgcgacgatctgggtggcagatttctgcaaggccacctgcatcccattcccatccttggcgaattgggagcttctatcatctttcctcctctggtccattaccctaattccc

SEQ ID NO: 37857 - DNA, 1745 bp, Oryza sativa
  Clone ID: PAT_MRT4530_41547C.1
ccggccaggatccatagaaaagagggaattgaaggggcaggaaggatatcccggccttgtggcacacttgactggagatgtataaagagaggaggatgtgaagaaagaagatatctaccacggaagtggcgctcccgcgggccacgcccccccgctcgcccctcccccctcccccgcccgcctcctcccccgcggccggcgcggcctccccggccaggcccccacccaaccacgtcggagccggacgccgacggcgcccggaggttccgcacccgcagcctcatgtccaggagcaacccgtcccctcgcgcagcaagcgcttccgggcccccctctccgacccgcggcccagtgcgaacgtccccatcggcggctcggaaaaggacgcgagcgaagttatccggggttaagagtccccctgcatccttgtgtgtgatgtacctgtaccccacgtacggccgacgcgccaagctaattaagcaaaagaagaagaagaagaaagaagaagaagaagatgcagaccgctgctagcagtgtcgttggattgtcggccgtgttgcccgctgctgtgaaggggcgcagcctgcagattcaggctcctcgccgtgttgcgttgcgcgttcgtgcggcggcggcggcggtggcagtggaggctgcggaggtggactacagctctaacatctcggtgtttccgatggaggcgtgcgacctcatcggcggcgaggcgtgcaacgtgcagatgtacccagaggccaagctctcatcatcggctgctgttgctgtttctcgtgcggcggcggaggaagtcgacagggactacctatcctacgacgagcccaccacggtgttccccgaggaggcgtgcgacgatctgggcggagagttctgcaaggccacctgatcccattcccatccatggagaattggagtcttctatcatccttcctcctctgctccactaccttaattccatgtagctacagatttatatgttaatcatcatgtaatggtacatatctccttgttaataaggcacgctagtctagctcctcaaaatgatttacaataatataatatttacatacatataatacacttactccatcgaacaatacctctgttatctcatggttacttcccatgatcccatcatcaacaccaacattcatcacactttgctgcgttagagcaggtacaatggcaggctataagccagctacaaacatattttacgaagataaatcaagagagagaagagcaacgggctacagatttgtagccagctgtagcacggactccaagacgcagtgtgtctatgacaggtgggactagatattaatagtgtagtatgtaactattgtatgaatgggctattagattgactatagatgaattggagctagtagttggctatactattgaacttgctcttatatagcaacaggtacagtatatgaattaattatctcacaactattggaaagttggcgccagaaaacgaaaccacaaaagattctggcttgtcgtgccgggacgttgtgatcgatgaacaccttgacttcggtcttatgggttctattctacctctcatgcgctctcgcctttgtgaaggttctgaatcatctccaggttcccaggactctccttctgaactggcagaaaatttgtggctttgtagcatctgacttttctgttaatgaattatttcaatagttttttcctgaatattatctgcccttatgggg

SEQ ID NO: 37858 - DNA, 293 bp, Oryza sativa
  Clone ID: PAT_MRT4530_41548C.1
tttagacttgcccacaaacaaaaaaagaaaagagaaattgcttttgcaaaacgacggtggtgaaaatcgagttttaattcgaggagcacggttagaccgacattgtccagtcggttagaccggttgcctggcccggtcagaccgcaagtacagcggcggtcagaccggcctcggggcaattttgcgcgaaattcaaatcagacttttatgaagcgaaaagaagaaaaatatgaaaaaaaaaagaataccgaatccttgaaacaatcttgacgacaaggacgtattcgatgtga

SEQ ID NO: 37859 - DNA, 458 bp, Oryza sativa
  Clone ID: PAT_MRT4530_41549C.1
cccacgcgtccgcccacgcgtccggtcttataagctgacaaataaatgaagcaatcaaaattgatattagggtaagttcttatacttctataaagattaaggccagaaaatagagagggatcttagattttgtcacagatgatatgatacttcaccctgtgtgacattttcaactgaggagttgtaaagaatatctgcaacaataatttggaagtgaatcatgacaagtattcttcatataatttactagcatgattctatttctttttgcaagagatcaatgctgctattaaattcagtcaagagtgtatcattacctttctaacattaatattgcccttggatcataaggccacaccatgaatgcctgcacttttggtctttgaaaatatatttgtattgttttgagggtgaagctagctatggagcaacatgcacagattagaaaaaatgtaaaa

SEQ ID NO: 37860 - DNA, 860 bp, Oryza sativa
  Clone ID: PAT_MRT4530_4154C.1
atgacgtcaccaccggcggcggcggctcggcggctcggacggcgcacgctcgccggcgaacggcgacgcttcggcacgaacggaggacaccaacgggtagagcgcgacgcggcgaactcaccggtgaccaaaagagcggcggaagaccaacggacggcgacggcgacgaggttaaaacggcggcggtcttcgggtcgacggcggcgatggtgctccggcgatcttcggcgacggcgaaggggcggacaaggacggcgacggcttggcgaccacgacggcggtcttcccgagcaacggcgacgtctggaatggcggcggcgctcggctggagcaacggcggcgacggcggctcgaggctacacggcgctagagcgtttccgacgacgagaggcgaaggcgagggaggcgactggtagagaagagctcgggggtccttttaaaggggctaagaggcggcggcgaaggcccacggcggccggcgacgagaaggaaaggtcgggctcggagagagaaaagccgatccgattcgacttcgaatccaacgatttccaaaccgatttagccgatgtttccaaaagagaaaaggtagaggagatcccgaagattgtttcccctctatcaattcggccggaaacggaaaggatcgatcgaatttggaagggaacggcggcggcgcgaaactagggtttcgggcggcggcggccggaggtagacgacgatctgacaggcgggccccacctgtcagcgacagcgagagagagaggagagcggcggctcgggcgcggactgggccgacttgggccggggagagagagaagggttttgggccgactttcggcccaaagccaaaagagactttt

SEQ ID NO: 37861 - DNA, 256 bp, Oryza sativa
  Clone ID: PAT_MRT4530_41550C.1
atgcctacaaattcctgtgacgagatgggaggggcagagaaaggtgagcgaccgacagaagcaactcggcgaccgtggcggaaagtagcatcgacgccgccgggaggaggtcgggaatacgggagatggggggagaagaagaaagaagatgaaactgttccaagattcgtgctcatccacgtggctaacatctacagtggggcctcatggggtgggagctgcggccctgccccagagaatttttttccgcctgtag

SEQ ID NO: 37862 - DNA, 1350 bp, Oryza sativa
  Clone ID: PAT_MRT4530_41551C.1
ttcggcacgaggaagcgcgagggcttcactctctccacaacgacaaggacagagagaaaaaccccaaattccaatcccaaaccctaatccccgctcgccatgccgagggggcgcgtgcccggcggctcgaccgccaacttcagcgcccacctcatcgcggcccagctcgggatgcagtgccgcatgggtcccgcggcggcggagcagatgaggcgcgtcatcgcgtcgtcggactgcgacaccggccgcgtcatgaggatgtttggtgccatggaaggtggcgacagtgattctgattctgatgactctgcggagacggagaaagttgggccactgcatgaggcagcaagcgcagggaaaatggatacttgcaaacatttggtggagcagcttgggtttgacatcaatgctgaagcaagtgatgatttgggtatgacacctttggcttgtgcggtgtccaagggaaaagcaattgctgtgaggtattttcttgacaaaggtgctgatccaaataagcaagacaacatcggttttactcctctgcactatgctacaaaagaagggtatgatggactggcacgactactgctgtctaaaggggctagtgttgatgttatttcttctaaaggcacagccctgcatcttgctgcctccagttggaagtctggcatcatgaagattctattggagcacaatgcagatccaaacaaggtctccgcagattcagagacaccattagctgcaacacttattgcttctgatggactgaatgaacctgctgtgctgaagtgcataaagcttcttgttaaggctggtgctaatttgaaccgcgctattcctgatacaccactggtgatagcaactaacaaagactttgttgaatgtgttgagtacttgttggaggctggtgcaaacgccaatattccaactaataacggtggtaagacaccaatagaaatagccgcgaagtctggaagaaggaagcttgtggagattctatttccttgcacgttgccaattaaaggtgtgtcaaactggactgttgaaggaatcatcacccatgtgaaatcaaaaaaatcaaagaagaaagcatgcgctcaggataaggaaagtggtacagacaaaaaggctcagttgaaatcattgggtgcaagtgcagttcaggggaaggactatgttggtgcatccaaattctacagtgagatgagggtgagaggagtagcaactggcatttccttggtgaggttaaacatggaagaggatgaaaaagtgcctggaagttctaataccagttacatttagacttgcataggactgaaaccagattgggcaaaaggttactatcggaaa

SEQ ID NO: 37863 - DNA, 924 bp, Oryza sativa
  Clone ID: PAT_MRT4530_41552C.1
atggcctccatggagcccttgaaccggatggtgaggatggtggcgcgcgcattctacgacaacgtctcgctggccagagaccccaagtccgctcgcggcgacaactgtgggcttgccgtcgttgtcctcgacgccctcaccaggcggcgccactgggtccgagaggaagatttggctaaagcattaaagatttcctctaagcaactgcgccgcattctccagttttttgaagaagagaagctggttgaagttaatttcttaggaagtactggtgcacaggaaggtgttgaatctggtatggaaagtataaagccacagcactcatggatgaatcgtaagcgcacagtcctcgcgggggaacataaagaagaaaacaacaacactgcaaatctggatcaaagttcagaagccaagagtgacaagaaacagctctcagaggaagatgagatgaagagcatacaggaggcatacgcaaaagcttattatgaggctatccagaaaaggcaggaagatgagggcaaaagggcgatacaagaagaaagcctagcatgtatttctgaccagccatttgcttctgatgcacagtttgagaggcggttgggtgccaaatcaaaacgtgatgatggtggtgaatctggtgatgatggcattgaattgaaaccatttttctcctcggtttctcctctcctcaactcaagcctccgcgccacgctgcgcggccggctaaaatcctccgccgctcgccgctcgccgtcgtcctccgcctccgccgccatggacaccatggagcagttaaatcggttggtgaggatggtggcgcgaggattctatgaggacgtctcgcttgaggaagaccagtccaaacccaacggcagcggcagctgtgggattgtcgtcgtcgtcctcgatgccctcaccaggtga

SEQ ID NO: 37864 - DNA, 307 bp, Oryza sativa
  Clone ID: PAT_MRT4530_41553C.1
cgagggctatgagggcatgagccctagttcaccaaggcactagaaactagtcaggtggcagaggcagtgcctagggcctaatttgtaattaggcttgcctaggcaggagaatgcccttcagtgcctagtattgccttagcaggctaggtactgcctttagaccatccttattaggtttttccctagtttgtgtaatgatgtattggattcctgatgaagcagggaactaatcagacatttgtattcacaacgatttatggtgaacctaggcttttcagaccaaccggtaagcattttattttggtat

SEQ ID NO: 37865 - DNA, 573 bp, Oryza sativa
  Clone ID: PAT_MRT4530_41554C.1
ggatgcggtgccggttggcgaggttcagctctcaccgggtgtcgaggattgtctcgtttggcattggacggctgaccagcgctctcagcgcgttcggtgcaccaggaattcttctatgaccagcatttctttgcctgtgccgatcttctctagcacgcaaagtgtcctgccaaatgcaggttcttcctttggttcgcatttcagtagcgctgctgaacggctgatctccttcagaagcgtggcatcgatagtcactcgacctgcctcttttgcgctaaggatcttgagacggcgaaccacatcctcctcgactgcgtgttcgctcggcaggtctggctccgggtgttgttgcctcttggctgggctgccttctctcccccctgtggcagctggttccaggactggtggccgtcctctagggcctgcttacctaagcatctccgcgagagtttcgactccctggtgctcctggtctcttggaaactgtggaaggagttgaactctagggttttcgactctgctctctcttcagtctcagtgattttggagtctatccattcggagggccatcta

SEQ ID NO: 37866 - DNA, 200 bp, Oryza sativa
  unsure (1)..(200): unsure at all n locations
  Clone ID: PAT_MRT4530_41555C.1
ataaatcaagtcattgaaacagcaccaacatgaacctcattggaataaaaaaaaataaaagcaatcatgaaacaacaatcaagaaattcaaagataataaaggatcangtgantagttcaccatcaccaacaacacagtaggagaccatgtgaagtgttcactgacacagtatgggccaagaccagcatgaagctcattg

SEQ ID NO: 37867 - DNA, 1449 bp, Oryza sativa
  Clone ID: PAT_MRT4530_41556C.1
aactagtggatccccgggctgcaggcttctctctccccgcctccgccctctcccaattcctcctccggcggcggcggcggcgttgggacgcgcgagcccatcaccatggcgggcgggaagatccagaagaagcggcacggcggaggagcaggcggcggcggcggcggcgggggcgggggcgcgcggctgcagggagggatcccgttcgagaagtccaaggggcagcacatcctgcggaacccggcgctggtggactccatcgtcgagaaggccggcctcaagcccaccgacaccgtcctcgagatcggccccggcacgggtaacctcaccaagcgcctcctccaggccggcgtcaaggccgtcgtcgccgtcgagctcgacccccgcatggttcttgagctcaaccgccgcttccagggcgaccctctcgcctcacgcctcaaggttatccaaggagatgtccttaaatgtgatcttccatactttgatatctgtgtggcaaacatcccatatcaaatttcatctcccctcacattcaagcttctgtcacaccgcccaatctttaggtgtgcggtgattatgtttcaacgtgaatttgccatgagacttgtagcacagcctggagatagtctctactgccgtctctctgtgaatgtgcagctcttgtcacgtgtgtcacatctcctgaaggttggacggaacaacttcaggcctccacccaaggttgattcatcggttgttcgtatcgagcccagaaagcccctacctcctgtcagcttcaaagagtggggtatggacttggtgaggctttgtttcaaccggaagaacaagacacttgggtgccatctttaagcagaagcgtgtccttgaattgttagagaagaactacaagacaatgcagtctctacagctcacctcagatgcagaaaaaggtgaggagaagatgtcaccagatgatgttgcattgctatcaagtatggtcgatgacatgaacatggaaagcagctacgagaatgatgatgatgatgagatggaaatggatgatgccgatatggtagtagagagccgtgcatgtttcaaagaaaagattatggggatattacagcaaggagattttgcagagaagagagcatcgaagctcagccaggttgacttcttgtacctcctgtcgctcttcaacaaagctggtatacatttttcctgaagaaacccgttatggtctagctagaaaagagtattttctttctttcttagtacgtcttgaaaggtgtgaaggcactgcgagaattttgttctaactatatatatttttatttctagtatggaaagtaatttaattcaatgttgcctacctctatctctgtaatgttttgtttagcttttcatggttgattttgaaatgttgtggatgttaaaactgaatgattgtttgctttggccacacattgc

SEQ ID NO: 37868 - DNA, 2622 bp, Oryza sativa
  Clone ID: PAT_MRT4530_41557C.1
gaggatatcttccagcttgtaggtcgaccactagtggaaaattgtttggatggcttcaacagttcaattttcgcttatggacagactggtagtgggaagacttacacgatgtgggggccactgtctgccttgtccgacgatacggtcagcaaagagagggggctgactcctcgtgtttttgaactactgttttcacgcatcaaagagatctacaatgaacaaattactgatttgttggaccccgtgcaaagaaaccttcagattagagaagatgttggtacttcttctgtttatgttgagtcattgacaaaggaatccgtgttcacgataaatgatgttacacagttgctagaaaagggtttggcaaaccgaagaactgaggctactactgcaaatgcagaaagctcacgatcacactgtgtttttacttgtttcattaagtcagaatccaagaatatggaggacggatcaaactttacaagaacaagtaggatcaacttggttgatcttgctggatcagaacggcagaaattaacaaacgcagctggtgatcgcttaaaagaagcagggaacataaaccgttcactttcacaattgggctgtaagagtgaaacactaagcactctaagatttgctcaccgtgcaaaagatataaaaaacaatgctgttgtcaatgaacaaagagaggatgatgtcaatgttctccgtgagcaaatcaggcagctgaaggaggagcttcaacacgtgagatcaaatgggagcttgccaggaagcaatggcagcccttccactgggtggaattctcaaaatagctttcttttgaaaatgagcttgagtcgtccaactgcattccccaccatcaaagatgatagtgatgaggagatggagattgatgacaatgatgttgaaaagccttgtaatttagaaaacaagtcttcatttcctcacggggatgttgaaacaagtagatgcaagtcaaacttggcagcaagcattcagaagggccttcaagtcattgaaagccatcggaatagtgttacttggaggagatcatcattaggtcttaacactagacttatggacgctcatctttcagttccagtttgcaaagttgatgtggctattcaaaccgaccccgaagaatctgaaccaagacaaaacactatggctctaattcctagcaatcagcctgaagcaactacagatggaaacagagaaatctctgattgcataaatctacagttagtaacagttgatggatcaataccctctaatgatctaaagcaacaggaacaagtctttaaagctgtggagaaggtccttgctggagccatcagacgagagatgttacgtgatgaacagtgtgcaaagcaagctgctgaaattcaacagctaaaacgtttggtgcaacaatataagcatgaacgtgaatgcaatgctgcaattgcacaaatacgagaagaaaaaattgcaaggcttgaaacacttgtggatgggattttaccaactgaagaacttatgcatgcagagaatctctctctccaagacgaaaacaagattctccatcagaagtatgagaaccatcctgaagttttgagtgctaaaatcgagcttgaaagaatccaagaagaattggagaggtacagaaacttcaaggatgagaaggaagttttactggaggaaatccaacacctgaaaaatcagttgcattacatgctgtcatcatcaatggcattgtgtaggcctccagttgaacttgtccaggcaattagtactgtctcagatcgtccaaccatttcggctttggaagaagctggtgatgacggccacagcattgtcgatgctgctgagagtagatggattactcttacagaagagcttagagttgagcttgagaagagtaaatctctatctgaacgtttgcagcttgaagtggaatcagaaaagcaatgctcagaggaattaaagggggcattggaaatggcaatgcaggggcatgctagaattttagaacagtattgtgaattacaggaaaaacatgcatccttgctctcaatgtgtcgcaccatcaatgatgggattgaagatgtgaaaaaggaagctgcaaaagctggtgtgcgaggggctgaatctaagttcattaatgctcttgctaggcaagtatcaattttaagagctgagcgagagaaggagcgtcggttttggatggatgaaaataaaggccttcagcaacagctaagtgatactgctgaagctgtgcaagctgctggtgagcttcttgtacggttaaatgatgctgaggaagctgcatcacttgcgcagaagcgggctgagttagcagagcaggagatgaacaaggcctttgcagaaatcgacaacttgaaaagggatcatgaccaagaagttcttgtgctaaaccagcggctcgctgaatccaaactgcccagcaatgttgtacagtcacctgagcctagtgagaccggccccgctagatacgacacaggtgggagcttcggcgatgagcaatggcgagaggagttcaagcccttccagtcggtcgaggtctccaaaagcagtgatcccagctcatggttttatgggtacgacaaatgcaacatttga

SEQ ID NO: 37869 - DNA, 294 bp, Oryza sativa
  Clone ID: PAT_MRT4530_41558C.1
ctaaagaagatccttgtggatttgcagtctgtacttccccaagttcttctgtaactgtgttccctctgatgggaattttgtagataagctgcattcatcaaacctgcaactctgcagcctaatcaaaatcaatccccaatcccagtcagccagaggaccagacgcaagggcggcgctgctgccttctgcacgctgcggctgcgacggccgacggcgacgggcgaggggcgctcgctgcttgggcgcctgggtggtcggcgtgacgccgccgagccgaggtcgccaagacgccat

SEQ ID NO: 37870 - DNA, 255 bp, Oryza sativa
  unsure (1)..(255): unsure at all n locations
  Clone ID: PAT_MRT4530_41559C.1
ntttattntttttaaaagcacaatttcggtctctatactaggggggaactcttaataggtggcaacaataaatgttatataagaagtccatatggtcctcaacatggtccaaaggtctacaaagttttggagagatcattacatttcacacatacacggtgtatctgttatagcatttcaattacaagcagtgttggtacacgacacactgaaaagagtagcgttttaatgttcaggcatcatatggttagatgg

SEQ ID NO: 37871 - DNA, 1373 bp, Oryza sativa
  Clone ID: PAT_MRT4530_4155C.1
cgattttcttttcttttcttttcttttgttgcgtcgtcttcgattcctcctgtgctgtgcgcaccatggcggccaccgcgctccacctcccgccactcctcctcgcgcgccgcctccgcttctcctccgccgccgcttccacgtctacctcgcgcaggaccacgcgcctctccgcgcagctcgacgacaccgccgctgcttccacctccacctccacctctgataagcccgccgccgcctcctccttcgcgccgcctcccgacttcaagcctccggagcccaagaccttcgaggtgaagcccggccagtccgacgacatcgtcaccgcctccctcgccattcccttccgcctcggcaccggcgtcttcgcccttggatattcggtatcgctggtttctcctgacgaggtggcaccagatgaatatgctttggatttccaaggtcggaaggttaaggagtcatcaaagatagggcagtgtcctcgaccagaaaagcctatcgagatttacgagtttgaaggctgcccattctgccgaaaggtcagagagatggtggccgtcttggaccttgatgttttgttttacccctgccctaaaaatggccccactttccgtccaaaggttttagagatgggcggaaagcaacaatttccttacatggtggatccaaacacaggggttgccatgtatgaatctgatgccatcataaaatacctggccgacaaatatggtgatggaacagttccaattatgctatcacttggtatattaacaactataacagcagggctcgcaatgagtggacgtagtgggaagggttctaagtatactcctgcaaagcttccacccgagccaatagaactatgggcatatgagggatctcctttctgtaaaatagtacgagagacccttgttgaattagagttgccacacttgctacacagctgtgcacgcggcagccccaggagacaggaatttttgaagaaatacggcattttccaggctccttatatcgaagatcctaacacaggggtcaagatgttcgagagcgctgatatcatagactacctgagggccacatatgcggcttgagaatcccttctacttctcatatctcaagtgtcaatatgcagtatatgctacactgataacctgacatatctcaagtgttaatatgcattctctctattcttatgttgtagattctctctattctttacaaggaatcggcgaattcataatgcagtacatgcacatacacataacactgctcattttattgtacacgaatttttattgaaacgattattgtaaaagaatttatactccctgtttacttgttttatagagaatgacactgaaatgaggctgtag

SEQ ID NO: 37872 - DNA, 3034 bp, Oryza sativa
  Clone ID: PAT_MRT4530_41560C.1
acgtgacaagtcaggaacgttgcttccaaccaagcaattgccaaacgtgagttggtgacaacattttggtttgaggatttcaatccaaatgaattaacatcttcatatatttcttgaatatgcttcttattgtaatcgcttccaaatggaacaatggggcagagcacaaaaattgaaccatcgctgaataagatgaaaaccgaaaatctatcccacagatgatcactcccatatgagaatgccactggacaaattgatgaagcattctggcatttgccaggtagaattggttgcaaatagaactcctgctctggttgctctaaatcaaatgacagatcaaataacctgcagaaataataactattgttcctggttcttgagttccggctccctgagggtcagctttacattgttctcctcattaaggagagagagcttctcaagcgaagattttagtaacgacatctgggagtccgaaacatggcttcttccgacctttggtgtctgccatgttgacattcctgtaccagccgcactgccaatggccgggtgagcaaatcgtttcatcctcgcactcagagcagtgattgaagagcacaacgcatccagctccacatctgcaaacctatctagctgtgctttgaactcctgctctgcttgtgacaatggtttcttgtttgccgcaggaagtatcttgaagccctcgatgcgtttttctaacaaatcgtataccttaaaggcccgatttatccggttgtttatatcttggtctttggcttctatggatagaagtgattgcttcactgcttgcaagcgtttctgcttgtcctcaatttctgtcttcaggtaatccccatgttccttgagctcaatgaaaaccttatgcccatactccacgtagtactcatggaaaactttaatatagtgatgaagagtggattttccttcaatagagtcaggggtcaatgacctcaagcttgatgaagatggaactatgggtggatctggacctgcgatgagctctttactgatcattccagttgtaaaagattccacgtccttaatgctcttgctgtctatgtcaagctgaagaggcgttggttccttccaacccttcatctccaccacaaagcactcacctgggcatgtaatgctgactaactgcacatggccatatgcatctgctatggtaacaaaaccagaaaggaagggagaatttgcctcattgtttcctgtagtgaggataggatgcacagagggtggagtggatgccatttcagggtatgaaaatggcaggaagtgcagtgtgaccatgtcaagtcccccaccatgggcacaataaaatctctctggaacaaggggatctagaaacaatgataaagagctatcattggaagtttttgctagtgctaaatctacaattgcgagtcttagcaaaggaggagaatgccccatccagacagcatcagtattactcttcacatttgatcccgtactggacgggcgatacgatcgcatggcccaagaatcttctgaattagagtcacatatcatagcaacactctttatctgcccatgtgaatcaacattaaggcgggtaggaattcctatgctccactgtggttgaatttcatcagcaagagcatcaatctggagttgcccactaccccaggcagttacaagaatggaatctttgccaacagaactatacacaaaacccacagctttgccttcacaagagttgctcttgctttcaggttcattgttttcttcgcaaactctacaaagaggtccctgtaaagttagagaatcatctaatgatgcgtatggatgagctctagacatcaatgcactattatcagctggctgacgtgacaagtcaggaaacgttgcttccaaccaagcaattgccaaacgtgagttggtgacaacattttggtttgaggatttcaatccaaatgaattaacatcttcatatatttcttgaatatgcttcttattgtaatcgcttccaaatggaacaatggggcagagcacaaaaattgaaccatcgctgaataagatgaaaaccgaaaatctatcccacagatgatcactcccatatgagaatgccactggacaaattgatgaagcattctggcatttgccaggtagaattggttgcaaatagaactcctgctctggttgctctaaatcaaatgacagatcaaataacctgaaaacagcatctgatgtcaagactccaaaatgactactgctaaaagggtgccacgatgtttgcagtactttgatgccatcattgttgctaggtaagatctgagaagcaactggcacagtcctgcatatgaccttatcaccatcttcagaaaccctctcatgcacatacagaatacttatgttatgtgatccagcaagtagtagcgatgaaccgtcggtattaagtgataaatgagtgaccttgtaaccaagatcagtctccggcatcaacatctcggaaggcacggcggcttccacggcgacatcatccccgtccttccccggctccgcatcgcgaacccgcacgcatatccggtgtacgcctcgcgccgaagggtcccacacgtacagccgcgacgccgacgcatcccacgcggcgccgccaccgccgccgccgaggccctccccgccgtccccgcgggagaatgcggggtgagaggggagcgccacccactgagccgcggcgtaggccctcctcggcgacggccgcaccttgggcctcgacgaggtggaggcggaggcggaggcggaggcggaggaggacggggtgagcgcgagggacggggaaggcgagtggcggcggcgggagcgcggggtgcccagggcagcgggggagtggcggaggggaggcggggatgagggcggcgaggacggcggcggcggcgcggtgatgcgggtcatcgccgccgacgaggtcgagtgcttgccgccggagaaagagatatgcggggtttggggtttgggatggcaggtcaggcctacttgtccatgggcccat

SEQ ID NO: 37873 - DNA, 1287 bp, Oryza sativa
  Clone ID: PAT_MRT4530_41561C.1
atgaattgggacatgaagctagtgaattcgtcctacgagtgggtggagcgtgaactggcgttccagccggtggtgcgtgggtggcaggcggcggtgcgtgcggggttgctggaagctaatgtgacgccatggaacgggtttacaatggaccatgtctctggcaccaaggttggtgccaccacgttcgattcgtcaggccgccgccggagtgccgcagatctcctcgcctttgcacgccctggccgtctccgtgttgccatccgtgcgacggttactcgcatcatcatgagcccaattgaacctgttgcacgccgtggaaggtctccacagccagcagtagcagcaagcggtgtcgtttaccaggaccgtcttctccagcagcaccacgcattgttgcgcccagggggggaggttatactttctgcaggctccctagggagtccccagttgctgctcctcagtggcattggccctgccaatgatcttacatccctaggcatcccagtttttgctgatgtccctgatgttggcaagcatatgtttgacaacccccgtaacggcatctccatcatcccatcaatcccaatcgatcactcccttatccaggtagttggcattccttctgctaatgggaatgagtcctaccttgaggctgcatcatacattgttccccttgctcccatcttacgccgtggtggtccgttcagcccgtcttcgccactttatgttactgtggtaaccatcatggaaaaggttcctggaccattgtctgaaggttcactttggctcacatcatccaatcccttggagagcccttcagtgcggttcaactacttgagccgtcgtgaggacttggcacggtgtgtgacgggcatgcggcgtgtggcgaaagtgcttgagagcacgacaatggatgtgtttcgttcagcgatgggatcattgagccaagacagcaggaggagggagttcaggattgttggggctgcactgccagttgactggagaacaaatgacacagctctgggtgatttctgccagcagactgtggcaacattatggcattatcatggaggatgtgtagctggaagtgtggttgacagggatttccgtgtttttcgtgtgcgtgctcttcgtgtggtggatggatcaacattcagggaaacacctgggaccaatcctcaagccacaatcatgatgatgggcaggtatatagggcagaagatgattgatgagcgtcacagcagaaggcaagtcagaacatcaacagattcctcttccaacgcctga

SEQ ID NO: 37874 - DNA, 1034 bp, Oryza sativa
  Clone ID: PAT_MRT4530_41562C.1
atggaggtattgtgtgcgtatgggatgcagagtcgaatttggaaggagtccaaatttggtatgattggagtttgtaaagtttgtttctttggtcatctactttgagagttcttcgatttgcgttttctcgagtttggcggtctaaccggtgaaacaccggcggtcagaccggtggcattgcggcggtcagaccggcggagtacctgcggtcagaccagcgacggcgtcaggcaacttcaggcacagctgctgatcttggcggttcgaccgtacgttctacttcggtcagaccgacgatattcgagcggttcgaccggttcgactacttcgaaaagtttataatccttatgtgattcttgatcaaattaatattgttgctttaaaaactgaatttgaaaataattgcaaagctcgcaatattcttttgagtgggatttctcgtttggattttgatcgtgtttcacatcttgaaactgctaatgagatttggaacgatttgaaaaactttcatcaaggaacttcaaacattaaagaacttcatcgggatctttttaaaaaggaatacataaaatttgagatgaaacctggaggctttggatgactatcttactaggtttaacaaaattttaagtgatctttgatctgttgcttcttcttatgatataaattacacacaatctgaggtttctagttactttttgaatggtcttgtcatgtttatttgggagatgaaaattatatcaattcaggagtctgttgatatatctacttttactttgaattcgctttacacaaaactcaaaacacatgagatgaatattctttctcgtaaaattgactctaagtctagtgccttgatttcttcctcaacttttttgaatattggtgcttcttcatcgaattctactattcttgctttaattaataccatatccgatgagcaactcgaacagttcgaggaggaggacttggctttggttactaataagttttctcgagctatgaataatgttagatactggaaaagagatggt

SEQ ID NO: 37875 - DNA, 224 bp, Oryza sativa
  Clone ID: PAT_MRT4530_41563C.1
ggtgaacagaagttaattcttttagaattagtaatatactaatactcattgtgaactgcatgaagtttaacatagactttaatcttgtactactctacttgtcaggtgggccaaggttaccaccatgattgaaatcgctaagcaaaaaccatgtacacaaaggcttatttttttttttgaaacataaggttaaaccatgagccttacacttttataccgtgttc

SEQ ID NO: 37876 - DNA, 162 bp, Oryza sativa
  Clone ID: PAT_MRT4530_41564C.1
atggcggtggcccgtcgaggtaggcacggcggtggcccgggggaggcggcagccccatcgagtctgcgcatatgtgtgtgttatgtggaggattatggctgtgttcgctgtagcatgttcccaactagaacaatgcgcacggaaaacggaacggttcattag

SEQ ID NO: 37877 - DNA, 406 bp, Oryza sativa
  unsure (1)..(406): unsure at all n locations
  Clone ID: PAT_MRT4530_41565C.1
gtcgacccacgcgtccgcccacgcgtccgcatggaatgtgctggtgaaaagtggaagttgttttcatggattgctgactaaccaacaacttggttgattcatcaggtgtacaaatgggaatccggatggttgatttgacgtatgttgagtgttgccatctctntgcctggggattttgagtgggctgaangattagtgcagtcatatgcatagggttcttgcctggtaacgatgctgcccgttaagcagtttgatgaaggtttctgtttgttgttttcatgctgaggatttgttgtgccaagattgcaggaatggtgcttcattactgttaagtgttaattgtacataatctgcatgcctatgaatcgatcaactgatattgcctccaaaaaaaaaaaaaaaaaaa

SEQ ID NO: 37878 - DNA, 437 bp, Oryza sativa
  Clone ID: PAT_MRT4530_41566C.1
cccaacttctcagggggtttaacccaaagaaatatatttggggttttacacaacgaaacatttgttttcactgaaaggaactttgggccttactagttgcatacccggcctgggccctttaactgacaaaagggaatagtcctccaaaatccaccaaaaatttcctttttgggacccacgtctttgttttattcctggatatcaaaaacccgaaaaaattgcttattgggacactttttggctgaaaagctttttcctgatctcaggaagcttttgcttgaaaaaaatttccaccctcccatccagcgggttgtcgaaaacaatcttgccgtcctgcgatgcaatcaccacacctccaaagcaaaaggggccatgggcgtcacgggcggtcttgggcgggggaaggtaaaccttgccgccaatgaggatcttggggg

SEQ ID NO: 37879 - DNA, 468 bp, Oryza sativa
  Clone ID: PAT_MRT4530_41567C.1
ggtcgctgccgcctcctctccacgcagatcgagatttggctggtaatatactgctcacgcgaatcttgcccttccgtgtttagattagattgaagagtgggagaccatacaattcaattcttagacgtaggatttcctacggaatcaaacctagctaggaactaggaccaatacataaatggaacatattattttagcctgcaatatctcataagctttgtcaatcgtcttggtctcctgactctccatgtttcgggttggaagttgccttgcagtcaccttgcagcgcaacagggtatttacctccacccgtaattgattgatgaaattgttcttcgtatggacctgtccaataacaaagaaaaacatatgcatggttgtctacaagtgcccatgttgttgcagctacccttgagtataaattgcactcccatcgggtagacacttctttccaatactgtgaataca

SEQ ID NO: 37880 - DNA, 247 bp, Oryza sativa
  Clone ID: PAT_MRT4530_41568C.1
tcgcgtgcgtcgtcgccgccacaacttcctcctcctccactccctcaaccatctcgctgtgccgccatcgctgcctccactccctcaacaagccatctcgccgtgacaccatcgctgctccctccccgccggatctcccagtgaggaggctagggccgccgggtccgatgatcccattctccttgtcagaggatccggcgccctagagaggaacgagagccgccgccgccgccgtttctcgtctttc

SEQ ID NO: 37881 - DNA, 2411 bp, Oryza sativa
  Clone ID: PAT_MRT4530_41569C.1
atgtcccaagttggatccgcccctggcttactctgcgagtcacccctttcattttcttctgcaccaaccaggcttgcgcacttgcacacaactgtatttgtggacaccaagatcaaaccttggggtggagacatcctttcatttagcatactggagtacttgttaagggagaaaaatgataggccacgaagaaataacagcccaaccaaaattcttgttgggaaggatctattgaaggaattggagcacaggagatcgtcacctagtgtgattgcaaaactgatgggaattgatgtattgccacctgcttatgtaacccacaatcggcaccaagatttcaaggacgtctttgaagtgtcagagatgtattcgaagtgtcagaggaaccacaagaggccgtcacgaaagagagatcacataatttccctaaagggttgccaagcttgaagcgaagtgcattaaagctaagaaagcttatgccatcaaagtctccctacggcgatgaaacatttgataacaatgtagtgaaccaagatggttttgatcgcttgaactcgctagagataaataatcctttgtttgagaaattccgcaaagcatcaatatgagaaccaaattatcgatatgagaaagatagtactttcaagtactttcaggaagtaccctgatgatattagaaattcatcaagaggaaagcttgaagatttcaatagcattgttgttttggagccaggcttagggaaagtccaagagtcggggaaagccttttgtacgccagacccctctcacatcaataagaatttcaggagagagatgcagcaggctgatttttctttgcagaatagagggagggtttcaccaaatcttttagacactgaagatgttgatgtgtctagaataaaacgagaaagatacttgagtaggaatgccgtagattcactgttagaaggaaaggagtcatcatttgatcatcataacgtaccggatacgagtagttctggatcatctcagaactgtgttagtggtgaagttaactccagacaaagcaacaggccatcatcaaatagctcacccaggaaaaaccgtcagaagtatgaggaaggcagtgttggttcgaaaactcttgcagagatgtttgccttatctgattcagagaggctaaagagagattccgactcacatgcgcagattcgacacaataaacttaaccggggcaacagcaatggcaaggaaggatgcttcatagttttgccaaagcatgcacctcgattgcatcctcacagttcattggacaagaattcccctcacagtaattttatcccaaatacatcaaatacttaccacagtggtcagtctcacttcaactctttctgcgatatatcaagactgcagcaaattggaagtcccagccaagataacttgaggaatgcttgtgcgaaacatcagaccttgcggcaacatagatctgcttccccttctcatgataatcgaaaccattcgcggtgttcaactgacaacttttcaacgtttgactgcataaatgagaaaatattggtcacaacagatgaggacttggtgaaaaaacctgctgaaactgtacattcttcatttgaatcatgtggggaagaaaaggtttcagcatcacctttcaattgccgtgattatgaatcaataactgtttctgatcatagttatgtggcaaagtctcataaaagcttgaaagaggttgggcaaccaagcccagtgtccattcttgagcctccaactgatgaagacagttgttgttccggatacttcaagtgtaacttacaagacatgcctaatgtcgagaaactaattgatgactgtgagctccgatatgaacaagtatccttgtcaagtgatgatgacagtggttcttcttaccggtctctggaagcttttcaggttgaggaggaaaggggcttctcgtatctccttgacatgcttataaactctggtatgatagtcgctgactcacagctcttgtgcaagtcatggcactcgcctggttgccctgttggacctcaggtcttcgacaggcttgagaggaagtacaataagatatctgcatggccaagaccagaaaggaggcttctgtttgatcttgcaaatactgttctttctgagatccttgcaccatggaaatccagtagacggtgttgtcctgtttggggccctgaagggcctgttgaggtggtttggcaaacaatggtcaggcggcaggaagagcttgcagtaggacatcctgatgacaaagttcttgatccagaatggctggaagttggtgaggacatcaatacggtgggaaagcagatagccaagatgttacatggtgatctcttggatgaaattatattggagttcctctcaggatgtgttgcttcatgagg

SEQ ID NO: 37882 - DNA, 359 bp, Oryza sativa
  unsure (1)..(359): unsure at all n locations
  Clone ID: PAT_MRT4530_4156C.1
cggacgcgtgggcggacgcgtgggcggcggcggcgtgggcgctccccgtggccgtggggctagtggccatgtggttggtgtagtgggcgagtggtgcaagcgacagcagctgcagctgcagttgcagccttcgggttcagtcgtgcaggaaaaaaagttggncgttggttggtcggttggctttgtattcttggnagnaaaaattgtgaagaaattgttgcttnattttactaaatttttttaaaaaaaaaaaaaaaaaaaaaaaaaaaaaaaaaaaaaaaaaaaaaaaaaaaaaaaaaaaaaaaaaaaaaaaaaaaaaaaaaaaaaaaaaaaaaaaaggggcggccggttctaaagga

SEQ ID NO: 37883 - DNA, 2217 bp, Oryza sativa
  Clone ID: PAT_MRT4530_41570C.1
atggacatctctaggacaaatgaaggctacacgagccgcgcccagatggccaacaacctcaaccggtgtggtcttgatctgactggcttcgctttggagctgcggggcatgtgcgttgtccagggatatccgcatggagtggactaccagggcaagaagctttcacagcaggatggtgacgatgcacagccccgtgccgcttgggagatggtgacaaccaggagaagcgctgctaccggtgagggctgtcaccccgaaagcagcaaccacaacaaccatggcagcccacctccacctccccctctgccgccaccaccgccaactgacaccaaccccatcctcacccaaatccttgcccagcaggccaacatgatggctgctttcctccaccacatccagaatccgctgcaacacaatgctccaccaccaccaccacccccacagcactccaagcttgccgagttcctccgcatccgcccgcctaccttgtctagctccaataaccccgtggatgccttggattggttgcatgccgtggggaaaaagttggacaccgtccagtgcaatgatgaggagaaagttatcttcgcaacccatcagttgcaggggcccgcatcactatggacccacgtgccagctggagtcatggccctcaagaagagggaatttcgggagttgaagcaaggcaaccgttctgttacggagtatttgcatgagttcaataacctggcccggtacgcccaggaggatgttcgtgaagatgaagaaaagcaggagaagtttctgcctagtcaaggacgcagggatgttcaaggtcagccgcgtctgtgcttctactgttttgagcctaggcacttcacggataaatgcccgaagccgaggcgtcagcaaggccaagcgcctccccaccccaacaatgatggaaaggatgccactcggggtcgtgtgaaccacattactacagaagatgtgctgacaactccagatgtcatcgccgaaaagaaagacaagacaaagaggatgtgcgttgactaccgagctcttaatgaagtcactatcaaaaacaagtaccctcttccccggattgatgatttgttcgatcagcttgaaggtgccactgtcttttccaagattgatcttcgttccggatatcaccagttgcgtatctgtgcagaagatatccctaagaccgcattcaccatgcagtacgggctgtatgaattcacggtgatgtcgttcggtctgaccaacgctcctaccttcttcatgaatttaatgaacaaggtgttcatggagtatttggaaaagttcgttgtggtctttattgacgacatactggtgtactcacagtcagaggaagaacataagcagcatctccgtctgttgctaaagaaggaagaaaaatttgtgtggagtccgcagtgtgagagagcatttcaaactctcaaggaaaagttggtttcctcgccagtgttaatcttacctgataatcgcaaggatttcctggtgtactatgacgcttcgggccaaggattggggtgtgtgttaatgcaagaaggtcatgtggtagcttatgcttcactccagctacgaccccatgaaggcaactatccttcccatgacttggaattggccgctatggtccattctctgaagatctggcggcattatctctttggaaatcgctgcgaaatatacaccaatcataagagtttgaaatacatcttcacccagtcggatctgaatcttcagcagagaagatggttagagctcatcaaagattatgatgtgggaatccattatcaccctggtaaggccaacgtggtggccgacgcgctgagtcaaaaaggctattgcagttctctttgcgtccgcggcattccaccagaacttaatcaacagttggaagccctgaacctaagtgtcattagccatggattcttggctgcactggaagccaagcccaccttgcttgatcaaatacgcgaggcccagaagaatgatccggatatgcacgggatccttaagaatatgaagcagggtaaagccgctggcttcacgaaagatgaacacggaaccttatggaatggaaatcgtgtatgcattctggacgacaaggaacttaaacagttgatacttcaggaagctcatgaaagtccttattccagccaccctggcagtacgaagatgtacttagacttgaaagagaaatattga

SEQ ID NO: 37884 - DNA, 1447 bp, Oryza sativa
  unsure (1)..(1447): unsure at all n locations
  Clone ID: PAT_MRT4530_41571C.1
accgaagtttncttctctcccgttcccgtagcctctctccatctctcgctctctttctcctcggtttaaagcttcctcgagtcgcctcctccgaatccccacagcccaggccaaaggcagcctgagccagggtggggagcttcctctcctcgtcttcctcctcatcctcctgatcccggaaggaccccaggattacaagtacttcatgtcaatgaccaatctaaggaggcgactccatcatggagatgtcgatggaaggaagaatgagcatgttgacatatccagcgtagattcccttaatgaacctttactagggaaatctagctctgatactggtggatcagaggtatatgatcccagaaggcaagacttatgggatgatgatagaaagaaggaacagctacactggtcatttcttttctcaaatttgattgcgcaatgggcacaatggttagcaaatattattgttggctctggatcactatttggtagattgtttcccttttcgttggacaaccagaacagcagtccagtgtatcttagtcctttgcaggaagatagactgaatactttaaggtctagattgcaaatccctttcgatggctcccgtgttgaacaccaagatgctttgagacaactttggaggttagcataccccaaccgtgacattcctccactgaaatcagaactatggaaggagatgggttggcaaggcactgatccatcaactgacttcaggggtggaggattcatatcattggagaacctcatatttttcgctaggaactatcctggttcctttcaggcgcttctgaacaaagtacaagggcagagagcagactgggagtacccttttgcggttgctgggatcaacatttcatttatgctgatccaaatgctggatctacagtcaagtgttccatcttcaaagtcaggagttcgttttgttgaactgcttggacgagatgagaatgcatttgatcacctctactgcatagcctttcggcttctcgatgctcagtggcttgtgaaacgtgcttcttacatggagttcaatgaggtattgaaatctacaagaactcagttggagcgtgaactagtactagaggatgtattggaggtgaaggacctgccgtcttacacaatgctggacaaataatccaaataagtaagggactgtatgtggcattcaagtgaaaaaagttatccggatctgcaactgatttatgttggcggggccttttgttgtctgaccatctgagtgcatatttatcttttccttgttcaagagaaaaattcaggcctgtgtacatagtgttcattttctgtaacttatgactcgccatttcaaggcaataataagcatcaagttgatcacaaaaaaaaaaaaaaaaaaaaaaaaaaaaaaaaaaaaaaaagggcctcgtgccgaattcctgcagcccgg

SEQ ID NO: 37885 - DNA, 4605 bp, Oryza sativa
  Clone ID: PAT_MRT4530_41572C.1
atggtggaggcgtacgacacgggccgcatcaacttccatcatatgatggtgacaaccaggagaagcgctgctaccggtgagggcagtcaccccgaaggcagcaaccacaacaaccatggcagcccacctccacctccccctccgccaccaccaccgccacccgataccaaccccatcctcacccaaatcctcgctcagcaggccaacatgatggctgctttcctccaccacatccagactccgccgcaacacaatgctccaccaccaccaccaccacccccacagcactccaagcttgccgagttcctccacatccgcccgcctaccttctctagctccaataaccccgttgatgccttggactggttgcatgccgttgggaaaaagttggacaccgtccagtgcaatgatgaggaaaaagttatcttcgcaacccatcagctgcaagggcccgcatcactatggtgggaccacttccaggctatgcagccagaaggacagccaatcacctgggcccgcttcaccgccgctttccaaaggacccatgtgccagctggagtcatggcccttaagaagagggaatttcgggagttgaagcaaggcaaccgctctgttatggagtatttgcatgagttcaataacctggcctggtacgccctggaggatgttcgtgaagatgaagaaaagcaggagaagtttctagtaggaatggaccctgaactttctgtgcgtctggtctccggggattaccctgatttccagctcgtagtggacaagagcatccgcctggaggccaagcacaaggaactggagtcacacaaacgtcgcttggcgaatttccgtaatcaacagggggctaaccaaaggatccgctacaccaatccctatccagggggatcctcctcacaacaacagcagcaacaacctcgcccaccgcagcaacagcagaatcagcaagggaaccgtgcaccccgtccccctgcaccggccgtgcagcctagtcatggacgcagggatgttcaagaggatgtgcagacaactccagatgtcatcatcggtacgttcttcattcattccatccccgctaccattttgtttgactctggagcttcccactcgtttatatctgtgcaattcgtggggagaaatcagctggggttagaaaggcttaggaactcactgctcatcaccacccctggaggagctatgacagcaaagtattatagcccggccgtacctatagagatccagggaattccttttccctcggatctgatccttctagacaccaaggatttggatgtgatcctcgggatgaattggttgacccaattccaaggagtagtggattgtgcaaggcgtactgtcaccgtgtaccggaagcctgatcaaccggttgttttctttgcgcacccgactcccaccggcagctcagtacttcatcaactaggactgtcagaaatacccgttgtcagtgagtttggtgatgtatttccggaagagctacccggcatgccgcccaagcgggagattgagttcaggatagatcttgctccaggaaccactcccctgtacaagcgaccctaccgtatggcagcaaatgaattggctgaagtcaagaagcagttggaagagttgaaagagaagggatatatacagccgagcacttccccctggggtgctcccgtgatttttgtagaaaagaaagacaagacaaagaggatgtgcgttgactaccgagctctcaatgaagtctataaaaaacaattgtgtatccgtgaagaagatatccctaagaccgcattcaccacgcggtacggactgtatgaattcacggtgatgtcgttcggtctgaccaacgctcctgccttcttcatgaatttaatgaacaaggtgttcatggaatacctggataagttcgttgtggtctttattgacgacatattggtgtactcacagtcagaggaagaccatcatcagcatctccgtctggtgttgggaaagctctgggaacatcagttgtatgccaagctcagcaagtgtgaattctggttgtccgaagtcaagttcttagggcatgtgatatctgttaaaggagttgctgtggatcctgaaacagtaacagccgtcaccgattggaagcaacccaagacggtcacccagctacgaccccatgaaggcaactatcctacccatgatttggaggtggccgctatggtccatgctctgaaaatctggcggcattatctcattggaaatcgctgccaaatatacaccgattataagagtttgaaatacatcttcacccagtcggaactgaattttcggcaaagaagatggttagagctcatcaaagactatgatgtgggaatccactatcaccctggtaaggccaacgtggtcgctgacgcgctgagtcgaaaaggccattgcagtactctttgcgtccgtggcattccaccggaatttaatcaacagttggaagccctgaacctaagtgtcgttagccatggattcttggctgcactagaagcaaaacccaccttgcttgatcaaatacgcgaggctcagaagaatgatccggatatgcatgggatcctcaagaaaatgaagcagggtaaagccgctggcttcacggaagatgaacacggaaccttattgaacggaaatcgtgtatgcgttacggacgacaaggaacttaaaaagttgatacttcaggaagctcatgaaagtccttattccatccaccctggcagtacgaagatgtacttagacttgaaagagaaatattggtgggttagtatgaagcgggaaatcgccgagttcgtggccctttgtgatgtgtgtcagcgtgtcaaagcagagcaccaacgaccggccggactcctccaacctttacaggtaccagaatggaaatgggatgaaattgggatggatttcatcaccagacttccaaaaacccaaggcggatatgattctatatgggtagtcgtggatcgactaaccaaggtggctcggttcattcctgtgaagaccacctatggagggaacaaattagctgtgaagaccacctatggagggaacaaattagctgaactttacttcgctaggatcgtgagtctccatggcaatcctaagaaaattgtatccgataggggaagccaattcacctctcacttctggaagaagctccaagaagagctggccacccgattgaatttcagcactgcttatcacccgcagacagatggacagaccgagcgtctgaatcaggtcctggaagtcatgctccgtgcctgtgttctagattttgggaagacctgggataagagtctcccttatgccgagttctcctacaataacagctaccaaaccagcatacaactggcaccctatgaagcgttgtatggacgcaaatgccggactccactgttgtgggaccaagttggggaaagccaagtgttcgggattgatattctgagagatgttgaagctaaatctcagcagaaaagttatgcagataaccgacgccgcgatctggaattcgcagtggacgattttgtgtatcttcgggtcacgccattatggggagtgcacagatttcagacaaaagggaagctcgcacctaggtatgtggggcctttctgcatcatcactcgacgcggagaagttgcttaccagttggagctgcccgcatccttgggcaatgtgcacgatgtgttccacgtgtcgcagctcaagaaatgtcttcgagtgctatccgagcaagccgattcagagcagattgaggttcgcgaagacttgacctacgtggagaagccggtgaagattctggacacaatggagcgtaggaccaggaattgggttatccgtttatgcaaggtccagtggagcaaccacgccgaggaagaagctacttgggagcgcgaagacgagctccctcgtccgtttctgccactcgccgcactttcttcccgccggaatcgagctcgcgccatcgctctctctctccggcgtcaccgccgagctcgggtccgccgccgtcgtcgccccggaccgcttcccacctcggcgtcgtctcctccggcttcgccgcactgccaccgacctcgtccacccctccgtttcggtccctgaccgccggaactccgccgaccccgtcgacccgagccgcaccaccgcctccctctgctccggccgcctcctccgtcgccgtcgtcgccctggggtgagccgtggaccgccgcctctttcccccttcccttcccctctctcggccgccgctccgccgcgcctatggccggcgccggcgaccataggggcgcgggcgccgcctaacgccagccgcaacgacgtggccgcctccgggcgcgccgtgtggccaccacgtggggctcggccgtcagccgcccgtgccctcgggtgcggctgacgcgtggggcccacggcgccggctggtgagccacgggtgcacccggtccaccgtcgaccgaggggctgccgcgtagggcccaccactcccgtggacccggtccgcacgccccctcttctcggcttgttcaccctaggataaacaaaaccccaactagtgggtaccctattcat

SEQ ID NO: 37886 - DNA, 2008 bp, Oryza sativa
  Clone ID: PAT_MRT4530_41573C.1
tcctccgtttcttgtcttctccagcgcgagcaacacagagagggggagagacagggtgccgccgtttcggtcgccgacggccggaacgctagctcggaggatgacgctactatcatgcacctggcacgcatggtggaggcgtacgacacgggccgcatcaacttccatcatatggtgcgccgtgggttggtcgaggacaacatgaagatcctggagctacgttaggagaatttgcagctgaaggacttggacgccgtggaggcgcagctgtgtcagctcaagattgctcagggggagatctgtcgccccaagcgccgccgcgtttgccgcagccagaagatcaccgcccgcaagagtacctctaggcctgagcttgttcgtcagttcttggcgtggacctgcttcgtggagactccttgcgtcgagcccgcgcccttggttccttaggaggagggagcctctggcgttggcagcacggaggatgtgttgttgctcaccttccgccctggcccgtcgcagaagagaagcgctgctaccggtgagggcagtcaccccgaaggcagcaaccacaacaaccatggcagcccacctccacctccccctccgccaccaccaccgccacccgataccaaccccatcctcacccaaatcctcgctcagcaggccaacatgatggctgctttcctccaccacatccagactccgccgcaacacaatgctccaccaccaccaccaccacccccacagcactccaagcttgccgagttcctccacatccgcccgcctaccttctctagctccaataaccccgttgatgccttggactggttgcatgccgttgggaaaaagttggacaccgtccagtgcaatgatgaggaaaaagttatcttcgcaacccatcagctgcaagggcccgcatcactatggtgggaccacttccaggctatgcagccagaaggacagccaatcacctgggcccgcttcaccgccgctttccaaaggacccatgtgccagctggagtcatggcccttaagaagagggaatttcgggagttgaagcaaggcaaccgctctgttatggagtatttgcatgagttcaataacctggcctggtacgccctggaggatgttcgtgaagatgaagaaaagcaggagaagtttctagtaggaatggaccctgaactttctgtgcgtctggtctccggggattaccctgatttccagctcgtagtggacaagagcatccgcctggaggccaagcacaaggaactggagtcacacaaacgtcgcttggcgaatttccgtaatcaacagggggctaaccaaaggatccgctacaccaatccctatccagggggatcctcctcacaacaacagcagcaacaacctcgcccagtgccatgacctcaatttgtggtacgcgttccacagccgcagcaacagcagaatcagcaagggaaccgtgcaccccgtccccctgcaccggccgtgcagcctagtcatggacgcagggatgttcaaggtcagccgcgtttgtgcttcaactgtttagagcctgggcacttcgcggataaattcccaaagccgaggcgttaggaaggccaagcgcctccccgccccaacaatggtggaaaggatgccactcggggtcgtgtgaaccatgttactgcagaggatgtgcagacaactccagatgtcatcatcggtacgttcttcattcattccatccccgctaccattttgtttgactctggagcttcccactcgtttatatctgtgcaattcgtggggagaaatcagctggggttagaaaggcttaggaactcactgctcatcaccacccctggaggagctatgacagcaaagtattatagcccggccgtacctatagagatccagggaattccttttccctcggatctgatccttatagacaccaaggatttggatgtgatcctcgggatgaattgttgacccaattccgaggagtagtggattgagcaaggcg

SEQ ID NO: 37887 - DNA, 1518 bp, Oryza sativa
  Clone ID: PAT_MRT4530_41574C.1
atgcggaagaagccggcgagggcggtgccggagtggctcaacagcccgctctggtcggccccgccgccttcgtcttcgtcgccgtcgccgcccgtgccccccgacccctacggcgccgacctctccccgcccccgcctcctccgcccaagccgccgccgaccgtcccgcccccgtcgtacgagcaggcggtggggtcgtcgaggagggcgaggagcgaggcggggtgggaggaggaggaggaggaggatggggaggtcgggggtggggccgcgctccgggcgcacctgctcgccgacttcaagctcgcgctgtcgaagaaggtggtgaacatgggggagctgcggaggctcgcctgcctcggcgtgccggacggcggcgccgccgtccgcccgctcgtctggaagcttctgttgggatatctgccaactgagcgtgctttttggcctcatgagctagaaaagaagcggagccagtatagtgcatataaagatgaatttctcctaaatccttcagaaaaaatacggagatttgaggagtcaaagttgctaagaaagaaagaattaaatagtgacaaaattggccttctaccaagagccaaagttactaatgaagagcaccctttgagctttggtaaatctagcttgtggaatcaatacttccaggaatcagaaatcctggaacagatagatcgagatgtgaaaagaacacatcctgaaatgccgtttttctctgccaaggctaaccaggaatctctaaggcgtgttctcattatcttctcaaaattaaatcctaccataagatatgtgcaagggatgaatgaagttttggcacctcttttttatgtgttcaagaatgaccctgatacaagcaattcagcctcagctgaagcagacactttcttttgctttgttgaattgctcagtggctttaaagacaactactgtaagcatcttgacaacagccaagtgggtattcggtctacactttcaaagttgtctcagctcttgaagagacatgatgaagagctatggcgacatatggagatcactacaaaggtatatccacaatactatgcatttagatggatcacactactgttgacaatggagttcagcttcaatgtgtgtattcacatttgggatgctatcttgggtgatccagaaggtcctccggacacgttgctaagaatatgctgtgccatgctcatccttgtccggaggcgcctcctagctggagacttcactgccaacatccagctgctgcagcactatccaccgactaacatcgaccaccttcttcacattgctaaccgactaagaggaagcgtagccagctagcgatacattctcattttctgcatatctgtacctcgatcttgtctttgtggtggtgttcatctgatcatattgcgaacttagcaacgtaggtagctgtgtttatcccattttggtgtgggtgtggctggcagtgtggttgcagaagagagcattgaggccctagatgcatttcttgtagtg

SEQ ID NO: 37888 - DNA, 3144 bp, Oryza sativa
  Clone ID: PAT_MRT4530_41575C.1
atgaagtatgggggcgtttttgctcccaagttcattacttcaggaaattcagctccattagtttccgatcgttcttatgctcaaattgtcataagtgccattccggtgaagagtgcctttcagagacttcagttctctctgggcagtaagaactccagtgatgtttcgattgatcggccgttattaactgttggcactgtttgtgcacgggccatagaaccaatctttgtgatgggccttttcattgtaggacatccatggtcacatcatgatgatccacgggggaacttgagagttcctcgtgctgatctcaccatccctcaacgtctagcgaagaggcatgaagaattttgcttggcgctggtggaactagagcttccggagcaagattgggatcaccacagggagttgatccttggtcacattttgggtgaaaggctctttgagatgcgttccgtcatgcatagggatgcatatatgtttcccttagactttattgagtgggagcatttgaatcttgctactgcttcttttggacagttaacctactgggcaaagttcaaggacatcgattctgtgcccaggaaaatagttcttcatgaccctgttggtcccattggaggaggtgaatcttggaccatctctgtctttatactggaagggggtattattaacatgccacctgaggaggatcttccacctgcgggcccacagccaaactctaacaatgatggtgatggtaatgaccttgatgtgggcaacatttggcagatggggcagcctgttggtgcagaaaacacgcgctggcctgagagctcagtacttcatcaactaggactgtcagaaatacccgttgtaagtgagtttggtgatgtgtttccggaagagctacccggtatgccgcccaagcgggagattgagttcaggatagatcttgctccaggaaccactcccctgtacaagcgaccctaccgtatggcagcaaatgaattggccgaagtcaagaagcagttggaagagttgaaagagaaaggaaaagaaagacaagacaaagaggatcttaaaggtgccactgtcttttccaagattgatcttcgttccggatatcaccagttgcgtatccgtgaagaagatatccctaagaccgcattcaccacgcggtacgggctgtatgaattcacggtgatgtcgttcggtctgaccaacactcctgccttcttcatgaatttaatgaacatggtgttcatggaatacctggataagttcgttgtggtctttattaacgacatactggtgtactcacagtcagaggaagatcatcagcagcttctccgtttggtgttgggaaagctccgggaacatcagttgtatgccgagctcagcaactgtgaattctggttgtccgaagtcatgttcttagggcatgtgatatctgctaaaggagttgctgtggatcctgaaacagtaacagccgtcaccgattggaagcaacccaagacggtcacccaggtccgcagtttcttgggtttggcagggtactatcggagattcatcaagaatttctccaaaattgccaggcccatgacacagttgctgaagaaggaagaacaatttgtgtggagtccgcagtgtgagagagcatttcaaactctcaaagaaaaggtggtttcctcgccagtgttaatcttagtggatactcgcaaggatttcctggtgtactgtgacgcttcgcggcaaggattggggtgtgtgttaatgcaagaaggtcatgtggtagcttatgcttcacgccagctacgaccccatgaaggcaactatcctacccatgatttggagttggccgctgtggtccatgttttgaaaatctggcggcattatctcattggaaatcactgcgaaatatacaccgatcataagagtttgaaatacatcttcacccagtcggatctgaatcttcggcagaaaagataccatggattcttggctgcactggaagcaaagcccacattgcttgatcaaatacgcgaggctcagaagaatgatccggatatgcatgggatcctcaagaatatgaagcagggtaaagccgctggcttcatggaagatgaacacggaaccttatggaacagaaatcgtgtatgcgttccggacgacaaggaagttaaacagttgatacttcaggaagctcatgaaagtccttattccatccaccttggcagtacgaagatgtacttagatttgaaagagaaatattggtgggttagtatgaagcggcaaatctccgagttcgtggccctttgtgatgtaccagaatggaaatgggatgaaattgggatggatttcatcaccggacttccaaaaacccaaggcggatatgattctatatgggtagtcgtggatcgacaaaccaagttggctcggttcattcctgtgaggaccacctatggagggaacaaattagctgaactttacttcgctaggatcgtgagtgtccatggcattcctaagaaaattgtatctgataggggaagccaattcacctctcacttctggaagaagccccaagaagagctgggcacccgattgaatttcagcactgcttatcacccgcagatagatggacagaccgagcgtctgaatcagactccactgttgtggggccaagttggggaaagccaagtgttcgggactgatattgtgagagaaggtgaagctaaagtcagaaccattcgagataacctaaaggtggcaaagtctctgcagaaaagttatgcagataaccgacgccgcgatctggaattcggagtggacgattttgtgtatcttcgggtcacgccactacggggagtgcacaggtttcagacaaaagggaagctcgcacctaggtatgtggggcctttccgcatcatcgcccgacgcggagaagttgcttaccagttggagctgcccgcatcctcgggcaatgtgcacgatgtgttccacgtgtcgcagctcaagaaatgtcttcgagtgccgtccgagcaggccgattcagagcagattgaagttcgcgaagccttgacttacgtggagaagccggtgaagattctggacacaatggagcgcaggaccaggaatcgggtaatccgttattgcaaggtctag

SEQ ID NO: 37889 - DNA, 4113 bp, Oryza sativa
  Clone ID: PAT_MRT4530_41576C.1
atgggttgggaactatgtcatgtcctccgtccgtatgccgtggtgatggccgccaacctcaaccgtcgtggtctggatctgactggctttgctttggagctgcggggcatgtgcgttgtcctgggatatccgcatggagtggactaccagggcaagaggcttccggagcaggatggtgacgatgcggagccccgcgccgcttgggaggtcactgcgatgatcctcaccggctcccctaagaggacttcgctggccgtcaccgcgggtagggactccttccccgccacctgccagaacgctgcactcctcgccatcggcactcttcaccagcgctacccggacgagttgcagcactcgccctaccgctactaccctcgtcgtggaggagcccgcgactacgccaccttccaggatgctagctcggaggatgacgctaccatcatgcatctggcgcgcatggtagaggcgtacgacgcggcccgtatcgacttctaccgcatggcgcgccgtggcctggtcgagaacaacatgaagatcctggagctgcgtcaagagaatctgcagttgaaggacttggacgctatggaggcgcagctgtgtcagctcaagattgctcagggggagatctgccgccccaagcgccgccgcaatccgccgcaacacaatgctccaccaccgccaccaccacccccacagcactccaagcttgccgagttcctccgcattcgcccacctaccttctctagctccaataaccacgtggatgccttggattggttgcatgccgttgggaaaaagttggacaccgtccagtgcaatgataaggagaaagttatcttcgtaacccatcagctgcaggggcccgcatcgctatggtgggaccatttccaggctacgcagccagaaggacagccaatcacctgggcccgcttcaccgccgctttccagaggacccatgtgccagctggggtcgtagcccttaagaagagggaatttcgggagttgaagcaaggcaaccgctctgttatggagtatttgcatgagttcaacaacttggcccggtatgccccggaggatgttcgtaaagatgaagaaaaacaggagaagtttctggcagggatggaccctgaactttctgtgcgtctggtctctggggactatcccgatttccagcgcctggtggacaagagcattcgcctggaagccaagcacaaggaactggagtcgcacaagcgtcgcttggcgaatttccgtaatcaacagggggctaaccaaaggatccgctacaccaatccctatctagggggatcctcctcacagcagcagcagcagcagcctcgccccgtgccacgccctcagtatgtggttcgtgtcccacagccgcagcagcaacggcagaatcaacaagggaaccgtgcaccccgacctcctgcaccggctatgcagcctggtcaaggtcgcaaggatgctcaaggccagcagcgtctgtgcttcaactgtttcgagcctgggcatttcgccgataaatgcccaaagccgaggcgtcagcaaggcccagcgccaaagccgaggcgtcagccgaggcgtcagcaaggcccagcgccacccggccccaacaacggtggtaaggatgccacccggggtcgtgtgaatcacgttactgcggaggatgtcctgacaactccagatgtcatcctcgatacgttcttcattcattccatccccgctaccattttgttggactctggagcttcccactcatttatatctgtgcaattcgtggggagaaatcaactaagggtagcaaagcttaggagctctctgctcatcaccacccctggaggggctatgacagcaaagtattatagcccgaccatacctatagagatccagggaatttcttttccctcggatctgatccttcttgacaccaaggacttggatgtgatcctcgggaagaattggcctgatcaaccggttgtcttctttgcgcacccaactcccaccggcaactcagtacttcatcagctgggactgtcagaaatacccgttgccagcaagttcagtgatgtgtttccggaagagctacccggtatgccaccaaagcgggagattgagttcaggatagatcttgctccaggaaccactcccatgtacaagcgaccctaccgtatggcagcgaatgaactggccgaagtaaagaagcagttggaagggttgaaagagaaggggtacatacggccgagcacttctccctggggtgctcccgtgatttttgtagaaaagaaagacaagacaaagaggatgtgcgttgactaccgagctctcaatgaagtcactatcaaaaacaagtaccctcttccccggatcgatgatctattcgatcaactcaaaggtgcctctgtcttttccaagattgaccttcgttccgggtatcatcaattgcgtatccgtgaagaagatatccctaagactgccttcaccacgcggtatggattgtatgaattcacggtgatgtcattcggcttgaccaacgctcctgccttcttcatgaatctaatgaacaaggtgtttatggagtatttggataagttcgttgtggtctttattgatgacatactggtgtactcacagtccgagaaagaacatcagcagcatctccgtctggtattgggaaagcttcgagaacatcagttgtatgccaagctcagcaagtgtgaattctggttgtccgaagtcaagttcttagggcatgtaatatctgctaaaggagtcgctgtggctcccgagacagtaacagctgtcaccgattggaagcaacccaagacggtcacccaggtccacagtttcttgggtttagcagggtactatcggaggttcatcgagaatttctccaaaattgccaggcccatgacgcagttgcggaaggaagaaaaatttgtgtggagtccgcagtgtgagagagcatttcaaactctcaaggaaaagttggtttcctcaccagtgttaatcttacctgatacccgcaaggatttcctggtgtactgtgaagcttcacgccaaggattggggtgtgtgttaatgcaagaaggtcatgtggtagcttatgcttcacgccagctacgaccccatgaaggcaactatcctacccatgatttggaattggccgcggtgagaagatggttagagctcatcaaagactatgatgtgggaatccattatcaccctggcaaggccaacgtggtggccgacgcgctgagtcggaaaggccactgcaacgctctttgtgtccgcggcattccaccggaacttaatcaacagttggaagccctgaacctaagtgtcgttagccatggattcctggctgcactagaagcaaagcccaccttgcttgatcacatacgcaaggctcagaagaatgatccggatatacaggagatcctcaagaatatgaagcagggtaaagccactggcttcacggaagatgaacacggaaccttatggaatggaaatcgtgtatgcgttccggacaacaaggaacttaaacagttgatacttcaggaagctcttatgctccgtgcctgtgttctggattttgggaggacctgggacaagagtctcccctatgctgaattctcctacaataacagctaccaggccagcatacaaatggcaccctatgaagcgttgtatggacgcaaatgccggactccgctgttgtgggaccaagttggagaaagccaagtgttcgggactgatatcctgagagaagctgaggctaaagtcagaaccattcgggataacttaaaagtggcccagtctcggcagaaaatggatgattttgtgtatcttcgggtcacgccacagcggggagtgcacaggtttcagacaaaagggaagcttgcacctaggtatgtgggacctttccgcatcatcgctcgacgcggagaagtcgcttaccagttggagctgcctacatccttgggcaatgtgcacgatgtgttccacgtgtcgcagctcaagaaatgccttcgagtgccatccgagcaagccgattcagagcagattgatgttcgagaagcctgtgaagattctggacacaatggagcgtag

SEQ ID NO: 37890 - DNA, 3969 bp, Oryza sativa
  Clone ID: PAT_MRT4530_41577C.1
atgcggcgcatgcgcgggcgtggccgacgtggcccggagaaggtgggagcgtgggcgcggcggcggttgcggtggcgcctgcggcgccggctggaggaaggggacgggcccgacaggggggccccacctgtcagcgaccccgggggagaggagggaggcagccggctcggctgggcctcggcctatcggccggtccagcgggaagaaggggggaaaggagaatgggccggcggcccaaatgaaggaaagagaaaagaaaaaggaaaaagaaggaaaaaggattttcctgggattaaatattgcttgtgctcatttttaaaagatggccgacaacctcaaccgtcgtggtctggatctgactggcttcgctttgtaactgtggggcatgtgcattgtcctgggatatccgcatggagtggactaccagggcaagaagcttccccgcgccgcttgggaggtcactgcggtgatcctcaccggctctcccgagaggacttcgttggcagtcaccgcgggtggagactctttccccgccgcttgccagaacgccgcgctcctcgccatgcactattcaccaacgctatccgggcgagttgcagcactcgccctaccgctaccaccctcgtcgtggaggagcccgcgactacgccatgttcagggatgctggctcggaggatgacgctaccatcatgcacctggtgcgcatggtggaggcagtcgtgtggggcatggttataccggtgtgtgtctaatgatgaggagaaagttatcttcgcaacccatcagctgcaggggcccgcatcactatggtgggaccacttccaggctatgcagccagaaggacagcctatcacctgggcccgcttcaccgccgctttccggaggacccatgtgccagctggagtcgtggcccttaagaagagggaatttcgggagttgaagcaaggcaaccgctctgttatggagtatttgcatgagttcaataacttggctcggtacgccccagaggatgttcgtgaagatgaagaaaagcaggagaagtttctggcaggaatggactctgaactttctgtttgtctggtcttcggggattaccttgatttccagcgcctagtggccaagagcatccgcctggaagccaagcacaaggaactggagttacacaaacgtcgcttggcgaattttcgtaatcaacaggtggctaaccaaaggatccgctacaacaatccctatccagggggatcctcctcacagcagcagcagcagcaacctcgccccgcgccacgacctcaattcgtgcccgtgcactttgcggataaatgcccgaagccgaggcgccaggaaggccaagctcctcctcgccgcaacaacggtggtaaggatgccacacggggtcgtgtgaaccacgttactgcagaggatgtgcaggcaactccagatgtcatcattggagtagtggattgcgcaaggcgtactgtcactatgtaccggaagcctgatcaaccggttgttttctttgcacccccaactcccaccggcagttcagtacttcatcaactaggactgacagaaatacccgttgtcagtgagttcggtgatgtgtttccggaagagctacccagtatgccgcccaatcaggagattgagttcagaatagatcttgctccaggaaccactcccctgtacaagcgaccctaccgtatggcagcaagtgaattggccgaagtcaagaagcagttggaagagttgaaagagaaggggtatatacggccgagcacttccccctggggtgcccccgtgatttttgtcgaaaagaaagacaagacaaagaggatgtgtgttgactaccgagctctcaatgaagtcactatcaaaaacaagtaccctcttccccggatcgatgatctgttcgatcagcttaaaggtgccactgtcttttccaagattgatctccgttccggatatcaccagttgcgtatccgtgaagaagatatccctaagaccgcattcaccacgcggtacgggctgtatgaatttatagtgatgtcgttcggtctgaccaacgctcctgccttcttcatgaatttaatgaacaaggtgttcatggaatacctggataagttcgttgtggtcattattgacaacatactggtgtactcacagtcagaggaagaccatcagcagcatctccgtctggtattgggaaagctccgggaacatcagttgtatgccaagctcagcaagtgtgaattctggttgtccgaaatgaagttcttagggcatgtgatatctgctaaaggagttgctgtggatcccgaaacagtgatagccgtcaccgattggaagcaacccaagacggtcacccaggtccgcagtttcttgggtttggcagggtactatcggaggttcatcgagaatttctccaaaattgccaggcccatgacgcagttgctgaagaatgaagaagaatttgtgtggagtccgcagtgtgagagagcatttcaaactctcaaagaaaagttggtttcctcgccagtgttaatcttaccggatactcgcaaggatttcttggtgtactgtgacgcttcgcgccaaggattggggtgtgtgttaatacaagaaggtcatgtggtagcttatgcttcacgccagctacgaccccatgaaggcaactatcctacccatgatttggagttgtccactgtgagaagatggttacagctcatcaaagactatgatgtgggaatccattatcaccctggtaaggccaacgtggtcgccgacgcactgagtcgacaaggccattgcagtactctttgcgtccgtggcattccaccggaactgaaccaacagttggaagccctaaacctaagtatcgttagccatggattcttggctgcactggaagcaaagcctaccttgcttgatcaaatacgcgaggctcagaagaatgatccggatatgcatgggatcctcaagaatatgaaacaaggtaaagccgctggcttcacagaagatgaacacggaaccttatggaacggaaatcgtgtatgcgttccggacaacaaggaacttaaacagttgatacttcaggaagctcatgaaagtccttattccatccaccctggcagtacgaagatgtacttagacttgaaagagcaatattggtgggttagtatgaagagggaaattgccgagttcgtggccctttgtgatgtggctcggttcatttctgtgaagaccacctatggagggaacaaattagctgaactttacttcgctaggatcacagatggacagaccaagcatctgaatcaggtcctagaagacatgctccgcgcctgtgttctagattttgggaagtcctgggataagagtctcccctatgccgagttctcctacaataacagctaccaagccagcgtacaaatggcaccttatgaagcgttgtatggacgcaaatgccggactccactgttatgggaccaagttggggaaagccaagtgttcgggactgatattctgagagaggctgaagctaaagtcagaaccattcgggataacctaaaggtggcacagtctcggcagaagagttatgcagataaccgacgccgtaatctggaattcgcagtggacgattttgtgtatcttcgggtcacgccattacggggagtgcacaggtttcagacaaaaggaaagctcgcacctaggtatgtggggcctttccgcatcatcgctcgacgcggagaagttgcttaccagttggagctgcccgcatccttaggcaatgtgcacgatgtgttccacgtgtcgcagctcaagaaatgtcttcgagtgccgtccgagcaggccgattcagaacagattgaagttcgcgaagacttgacctacgtggagaagccggtgaagattctggacacaatagagcgcatgaccaggaatcgggtaatccgtttttgcaagctctag

SEQ ID NO: 37891 - DNA, 210 bp, Oryza sativa
  Clone ID: PAT_MRT4530_41578C.1
gctagtaaaaaataatctaagtgggtgtgtctttgtataatgggtatacacctttcatctgcacactcatctattaattttatcatcataaataatttcatcacataccaaaatctgttgatcttcctgttcccattttacgttccgaagtactttatttcacttaccattattttgtagtactacaacagaccataatctaccttgaac

SEQ ID NO: 37892 - DNA, 4565 bp, Oryza sativa
  Clone ID: PAT_MRT4530_41579C.1
atgaacgaagtcggggctcgatggacatctctaggacaaatgaatgctacacgagccgcggcccggtagtcgagatgtcatggcacagggctggtgtcctgctgctaggggctcaaccttggttacctgtctcgggaatcctggccgtagccagggttgggtcgatgtacacctctgatcagagtaaatctattcgaatagctgtgccctcggttatgggcaagcctagcaatgtacccaaatggccgacaacctcaaccgtcgtggtctggatctgactggattcgctttggaactgtggggcatgtgcgttgtcctgggatattcgcatggagtggactaccaaggcaagaagcttccggagcaggatgatgacgatgcagagcccggtgccgcttgggaggtcactacggtgatcctcaccggctctcccgagaggacttcgctggcagtcactgcgggtggagactccttccctgccgcttgccagaacgccgcgctcctcgccaccggcactcttcaccagcgctatccagacggacgagttgcagcactcgccctaccgctaccaccctcgtcgtggaggagcccgtgactacgccgccttcagggatgctagctcggaggatgacgctaccatcatgcatctggcgctcatggtggaggcgtacgacacagcccatatcgacttccatcatatggtgcgccgtgggttggtcgagaagaacatgaaggtcctggagctgcgtcaggagaatttgtagctgaagaaggacttggacgccgtggaagcgcagctatgttagctcaagattgctcaaggacaggtctgccaccccaagcgccgccgtgtctgccgcagtcagaagatcaccgcccgcaagagtacctccaggcctgagcttgttcgttagtccttggcgtggacctgcttcgtggagactccttgcgccgagcccgcgcccttggttcctcaggaggagggagcctctggcgttggcagcacagaggatgtgctgttgctcaccttctgccccggcccgtcgtagaagtagacgagcagctagtaggcccgcgcatggtgacaaccaggaaaagcgctgctaccggtgagggcagtcaccccgaaggcagcaaccacaacaaccatggcagcccacctccatctccacctccccctccgccaccaccaccgccaccttacacaaaccccatcctcacccaaatcctcgcccagcaggccaacatgatggctgctttcctccaccacatccagaatccgccgcaacccaatgcgccaccaccaccaccacccccacagcactccaagcttgccgagttccaccgcatccgcccgcctaccttctctagctccaacaaccccgtggatgccttggactggttgcacgccgttgggaaaaagttggacaccgtccagtgcaatgttgaggagaaagtcatcttcgcaacccatcagctgcaggggcccgcatcgctatggtgggaccacttccaggctacgtagccagaaggacagccaatcacctgggcccgcttcaccgccgctttccggaggacccacgtgccagctggagtcatggcccttaagaagagggaatttcaggagttgaagcaaggcaaccgctctgttatggagtatttgcatgagttcaataacctggcccggtacgccccggaggatgttcatgaagatgaagaaaagcagaagaagtttctggcaggaatggaccttgaactttctgtgcgtctggtctccggggattaccctgatttccagcgcctggtggacaagagcatccgcctggaggccaagcacaaggaactggagtcacacaaacgtcgcttggcgaatttccgtaatcaatagggggctaaccaaaggatccgctacaccaatccctatccagggggatcctcctcacagcagcagcagcagcagcagcctcgccccgcgccatgacctcaatttgtggtacgcgtcccacagccacagcagcagcagaatcagcaagggaaccgtgcaccccgttcccctgcaccggccgtgcagcctagtcaaggacgcagggatgttcaaggtcagccgcgtctgtgcttcaactgtttcgagcctgggcacttcacggataaatgcccgaagccgaggcgtcagcaaggccaagcgcctccccaccccaacaatggtggaaaggatgcaactcggggtcgtgtgaaccacgttactacagaggatgtgctgacaactccagatgtcatcatcggtacgttcttcattcattccatccccgctaccattttgtttgactctggagcttcccactcatttatatctgtgcaattcaaggggagaaatcagctgggggtagcaaagcttaggagctctctgctcttcaccacccctagaggggctatgcagcaaagtattatagtccggccgtacctatagagaactagggaattcctttcccctcgaatctgatccttcttgacaccaaggacttggatgtgatcctcgggatgaattggttgacctaattctaaggagtagtggattgtgcaaggcgtactgtcactatgtaccggaagcctgatctacgggttgtcttctttgcgcacccaactcccaccggctcaatacttcgtcagctaggactgtcagaaatactcgtcgccaacgagttcggtgatgtgtttccagaagagctacccggtatgccgccaagcgggagattgagttcaggatagatcttgctctaggaaccactcccatgtacaagcgaccctaccgtatggcagcaaatgaattggcagaagtcaagaagcagttggaagagttgaaagagaaggggtatatacggccgagcacttccccctggggtgctcccgtgatttttgtagaaaagaaagacatgacaaataggatgtgcgttgactaccgagctcttaatgaagtcactatcaaaaacaagtaccctcttccccggatcgatgatctgttcgatcagcttaaaggtgccactgtcttttccaagattgatcttcgtttcggatatcaccagttgcgtatccgtgaagaagatatccctaagaccgcattcaccacgcggtacgggctgtatgaattcacggtgatgtcattcggtctgaccaacgctcctgccttcttcatgaatttaatgaacaaggtgttcatggaatacttggataagttcgttgtggtctttattgatgacatactggtgtactcacagtcagaggaagaacatcagcagcatctccgtctggtgttaggaaagctccgggaacatcagttgtatggcaagctcagtaagtgtgaattctggttgtccgaagtcaagttcttagggcatgtgatatctgctaaaggagttgctgtggatcttgaaatagtaacagccgtcatcggttgacagcaacccaagacggtcacccaggtccgtagtttcttgggtttggcagggtactatcggaggttcatcgagaatttgtccaaaattgccaggcccatgacgcagttgctgaagaaggaacaaaaatttgtgtggagtccgtagtgtgagagagcatttcaaactctcaaggaaaagttggtttcctcgccagtgttaatcttactggatactcgcaaggatttcctggtgtactgtgacgcttcgcgccaaggattggggtgtgtgttaatgcaagaaggtcatgtggtagcttatgcttcacgccagcgatgaccctatgaaggtaactatcctatccatgacttggagttggccgctgtggttcatgctctgaagatctggcggcattatctcattggaaatcgctacgaaatatacaccaatcataagagtttggaatatatcttcacccagtcggatctgaatcttcggaagagaagatggttagagctcatcaaagattatgatgtgggaatccactatcaccctgataaggccaacgtggtggccgacgcgctgagtcgaaaaggccattgcagtactctttgcgtccgtggcattccaccggaacttaatcaacagttggaagcaacctaagtgtcgttagccatggattcttggctgcactagaagcaaagcccaccttgcttgaccaaatacgcgaggctcagaagaatgatccggatatgcatgggatcctcaagaatatgaagcagggtaaagccgcaggcttcacggaagatgaacacggaaccttatggaacagaaatcgtgtatgcgttccgggcgacaaggaacttaaatagttgatactttaggaagctcatgaaagtccttattccatccacccaagcagtacgaagatgtacttagacttgaaagagaaatattggtgggttagtatgaagcgggaaatcgcagagttcgtggccctttgtgatgtgtgtcagcgtgttaaagcggagcagcaacgaccggccggacacctccaacctctaaaggtaccagaatggaaatgggatgaagtctcacttgatatactatttggaactcctttttaaacattatgtt

SEQ ID NO: 37893 - DNA, 964 bp, Oryza sativa
  Clone ID: PAT_MRT4530_4157C.1
atatatggttggtttttttcataacatgaaatatgttaattattgaaaagcacaatgattaagggcattgtgacaaattgtgtggccaaatggattattgtagtagtagtatccatagccagttagccactatgagcatgtgacgatgagtcacgccataggtagtcgacgagacgtgatcctgtaactcttaatttcccatcatcagagattcagaggtatatatggtccttctctcaagtcatcatactattaatcttcctctccattcccaactgcaggctgcagcatgaggaggaggggtgagggtgacgtttaattggtagcaagagcaagagcagatgcagcagcagcagcagtagcgggcagtgaggcgtacacgtccagctccagcacatagtgcgccccctccaacacctctagcgtcctccacagcacgtgcccggacgctcgccggagcttccccgtcccgccgaccaccgccagctccctcacctccgcaaggacctcgtcgcggccggcgatgacgagggtgctcccgttgtagggcccgtgggtgagcttgaaggtggcggtgaccacgacgacggggtcgacgaggccggcgaggacgtaggagccctgggcgcggccgacggggttggagtcgaggctggggccctcggtgaggaggtcgtccatcaccgtcgtgtcgccgaagtgcctgtttcccggcggcattgacggatgcagaggccccgtgcccttcaccacctgcacggccgtctccccggcgatgtcgtgcatgtacaagtgcagccgcaccgcccgccgccgcgccgcagaggccggcaccgcgaacgaggcggcgaggacgatgacggcggcgaggaggagtactggccactggtggagcttggccatcgcgtctctgccttcagtgcagcctgagcctgaggctgaggagatggagaaatcctcgtgc

SEQ ID NO: 37894 - DNA, 1117 bp, Oryza sativa
  Clone ID: PAT_MRT4530_41580C.1
cgctcgctcaccaccaccaactcctcctcgtcttcatcaacgcgctcggtcgcctcgcctcgctctggaacgcatgatggcgagcatggcggcgctgctgcagcgtctgctggtggtggtgaatcaggtggacccgggcgcgccggggttctggcgggagttcttggtgggcatgctgaagccggtggcggcgacggcggtggtggcgatggcggtggcgctgagcttcacgcagcggctggggctcgagggcgagatgctgtacgccatggcgcgggcgttcctccagctctccgtcatcggcttcgtcctccagttcatcttcacccagaagagcgccgcctggatcctcctcgcctacctcttcatggtcaccgtcgccggctacaccgcggggcagcgcgcccgccacgtcccgcgggggaagcacatcgccgccgtctccatcctcgccggcacctccgtcaccatggccctcctcgtggcgctccgggtgttcccgttcacgccgcggtacatcatcccggtggccgggatgatggtcgggaacgcgatgacggtgaccggggtgacgatgaagaagctgagggaggacgtggggatgcagcgaggggtggtggagacggcgctggcgctgggcgcgacgccgcggcaggcgacggcgcggcaggtgaggaggtcgctggtgatcgcgctgtcgccggtgatcgacaacgccaagacggtggggctgatcgcgctgccgggcgccatgaccggcctcatcatgggcggcgcgtcgccgctggaggccatccagctgcagatcgtggtgatgaacatgctcatgggcgcttccaccgtcagcagcatcctctccacctacctctgctggccggccttcttcaccggcgccttccagctcaacgacgccgtcttcgccgccgactaatcttccctcttccacaacaccttgcattttgattcattatggattactgcttagtgattagtagtagtagtaattagttgttgagtacttacttagtaggacgagagagaaagtaagagtgtgtatgtcttgaggttaatttcttcttccataataaatcatgtgttgatgactaaaaaaaaaaaa

SEQ ID NO: 37895 - DNA, 4235 bp, Oryza sativa
  Clone ID: PAT_MRT4530_41581C.1
ttatggtagtcgtgggtggttagttttaatcgtcagctctttctgtttgctggttctgtgtgggatcttcagatggtgacaaccaggtgaagcgctgctaccagtgagggcagtcaccccgaaggcagcaaccacaacaaccatggcagcccacctccaccttcccctccgccaccaccaccgccccctgacaccaaccccatcctcacccaaatccttgcccagcaggccaacatgatggctgctttcctccaccacatctagaatccggcgcaacagaatgctccaccaccaccaccaccacccccacagcactccaagcttgacgagttcctccgcatccgcccgcctaccttctctagctccaataaccccgttgatgccttggactggttgcatgccgttgggaaaaagttggacaccgtccaatgcaatgatgaggagaaagttatcttcacaacccatcaactgcaagggcccgcatcactatggtgggaccacttccaggctacgcagccagaaggacagccaatcacctgggcccgcttcaccgccgctttccgaaggacccatgtgccagctggagtcatggcccttaagaagagggaattttgggaattgaagcaaggcaaccgctctgttatggagcatttgcatgagttcaataacctggcccggtacgccccggaggatgttcgtgaagatgaagaaaagcaggaaaagtttctggcaggaatggaccctgaactttctgtgcgtctggtctctggggattaccctgatttccagcgcctggtggacaagagcatccgcctagaggccaagcacaaggaactggagtcacacaaacgtcgcttggcgaatttccgtaatcaacagggggctaaccaaaggatccgctacaccaatccctatccaaggggatcctcctcacagcagcagcagcagcaacctcaccccgcgccacgacctcaatttgtggtacgcgtcccatagtcgcagcaacagcagaatcagcaagggaaccgtgcaccccgtccccttgcaccggccgtgcagcctggtcaaggtcgcagggatgttcaaggtcagcagcgtctatgcttcaactgcttcgagcccaggcacttcgctgataaatgcccgaagccgaggagccagcaaggccaagcgcctccccgccctaacaacggtggtaaggatgccacccggggtcgtgtgaaccacatcactgcagagaatgtgctgacaactccagacgtcatcgttggtatgttcttcattcattccatccccgctaccattttgtttgactctggagcctcccactcgtttatatctgtgcaatttgtgggaagaaatcaactgggggtagaaaggctaggaactctctgctcatcaccacccctggaggggctatgacagcaaagtattatagcccggtcgtacctatagagatccagggaattccttttcccttggatctgatccttctagacaccaaggacttggatgtgatcctcaagatgaattggttgacccaattccaaggagtagtggattgtgcaagacgtactgtcaccgtgtaccagaagcctgatcaaccagttgttttctttgcgcacccgactcccaccggcagctcagtacttcatcaactaggactgtcagaaatacccgttgtcagtgagttcggtatgccgcccaagcgggagattgagttcaggatagatcttgctccaggaaccactcccctgtacaagcgaccctaccgtatggcagcaaatgaattggccaaagtcaagaagcagttggaagagttgaaagagaaggggtatatacggccgagcacttccccctggggtgctcccgtgacttttgtagaaaagaaagacaagacaaagaggatgtgcgttgactaccgagctctcaatgaagtcactatcaaaaacaagtaccctcttccccagatcgatgatctgttcgatcagcttaaaggtgccactgtcttttccaagattgatcttcgttccggatatcaccagttgcgtatccgcgaagaagatatccctaagaccgcattcaccacgcggtacgggctgtatgaattcacggtgatgtcgttcggtctgaccaacgctcctgccttcttcatgaatttaatgaacaaggtgttcatggaatacctggataagttcgttgtggtctttattgacgacatactggtctactcacagtcagaggaagaccatcagcagcatctccgtctggtgttgtaaaagctccgggaacattagttgtatgccaagctcagcaagtgtgaattctggttgtccgaagtcaagttcttagggcatgtgatatctgctaaaggagttgccgtggatcctgaaacagtaacagccgtcaccgatttgaagcaacccaagtcgttgctgaagaaggaagaaaaatttgtgtggagtccgcagtgtgagagagcatttcaaactctcaaagaaaggttggtttcctcgctagtgttaatcttaccggatactcgcaaggatttcctggtgtattgtgacgcttcgcgccaaggattggggtgtgtattaatgcaagaaggtcatgtggtagcttatgcttcacgccagctacgaccccatgaaggcaactatcctacccatgattttggagttgaccgctgtggtccatgctctgaaaatctggcggcgttatctcattggaaatcactgcgaaatatacaccgatcataagagtttgaaatacatcttcacccagccggatctgaatcttcggctaagaagatggttagagctcatcaaagactatgatgtgggaatccactatcaccctagtaaggccaacgtggtcgccgacgcgctgagtcgaaagggccattgcagtactctttgcgtccgtggcattccaccagaacttaatcaacagttggaagctctgaacctaagtgtagttagccatggattcttggctgcactagaagcaaagcccaccttgcttgatcaaatacgcgaggctcagaagaattatccggatatgcatgggatcctcaagaatatgaagcagggtaaagccgctggcttcatggaagatgaacacggaaccttatggaacggaaatacgaagatgtacttagacatgaaagagaaatattggtgggttagtatgaagcgggaaatcaccgagttcgtggccctttgtgaggtgtgccagcatgtcaaagcagagcaccaacgaccggccggactgctccaacctctacaggtaccagaatggaaatgggatgaaattgggatggatttcatcaccggacttccaaaaactcaaggcggatatgattctatatgggtagtcgtggatcgactaaccaaggtggctcggttcattcctgtgaagaccacctatggagggaacaaattagatgaactttacttcgctaggatcacctgggataagagtctcccctatgcggagttctcctacaataacagctaccgagccagcatacaaatggcaccctatgaagcgttgtatggacgcaaatgccggactccgctgttgtgggaccaagttggggaaagccaagtgttcgggaccgatattctgagagaagctgaagctaaagtcagaaccattcgggataacctaaaggtggcacagtctcggcagaaaagttatgcagataaccgacgccgcgatctggaattcgcagtgcacgactttgtgtatcttcaggtcacgccactacagggagtgcataggtttcagacaaaggggaagctcgcacctaggtatgtggggcctttccgcatcattgctcgacgcagagaagttgcttaccagttggagctgcccgcatccttgggcaatgtgcacgatgtgttccacgtgttgcagctcaagaaatgtcttcgagtgccgtccgagcaggccgattcagtgcagattgaagttcgcgaagacttgacctacgtggagaagcctgtgaagattctggacactatggagtgcaggacttggaatcgggtaatccgtttttgcaaggtcctgtggagcaaccacgccaaggaagaagctacttaggagcatgaagacgagctaaaggcagcccatcccgacctcttcgtcagttcttctgaatctcagggtcgagattccgtttaagggcggtaggtttgtcacgtcccaaaacgaccctaaaatataacctt

SEQ ID NO: 37896 - DNA, 447 bp, Oryza sativa
  Clone ID: PAT_MRT4530_41582C.1
ctctctactctatctctatcccaatctctcccccctctctcccttctccctcccctcacaggcagcgggcgggcgaggacgggggcaggcaaagctgctcgggcactggcggcgacggcgggcggctgggacggaggcagagtgggcggcaggcgacggaggcagagctccctgggcggctgaggcggagccggagcgggcgggcagccggcagcggaggagctcgctcgggcagccggtggcggaggcggaggtagaaggcgctcttcgacgacgccgcgggtagcggcgacgcctccttcgtctcctcccactacaaccgccgcgcggaccacacctactcgtcgtcgtcatccatgcgcgcgatggccgccggtatcggggaggatgggggaaagcggcggaagttggggacgagacgcgcgatgggtgccggtcttggggagg

SEQ ID NO: 37897 - DNA, 1329 bp, Oryza sativa
  Clone ID: PAT_MRT4530_41583C.1
atgatgatgaagacaaggacagggacaggcagcgcaggagtcgtcacaagagccgctctgtgtgggattggctcgggcgcctgtcctcaagtcacagcagggagccagaaaggagagatggccagggggcgctcgcgcaaccgggagcgctctgatccacgtagcagaagcggccgttcccgagagccaagcaaggtgagaccacctctctcttcatccttcacctctcagaacaatcctgcctcagacacccttctaccctctcccaatcggcttgcctctccatgcaagcaaccaagctcggtccgcaaaccgagcccggacggggacgccactgctaccttctccgtcaaccttgccatcccggaccaggctgttcttcaagctgacaactgcttctgttcgcaggggcaggaggatgttcttaccctcccggagagccaccttgacccaatgctgcacgaggcggcggtgcagtactccatctactcgccggacacaaattccctccgtgctgtttcccctgttttcgtattttcctcttttgcagaacaggtgactcaagttcatggggcgtcggtggcaggacaggtgaacaatcaagctcaagctgcattgctggtaagccaggtgaacaatgtggaagagttcattgacaccctctcgattccgcttcagccgccgctcctgcctgctctggacgcaaatgctcgccatccaagccacgtgaaagtgacaatacctgcaatttcctcggcacaatgtcatagcgaacgcctgcttggcatgaggcgggcgggagcaaaacttgaaacttttgctcaagagatcatgtcaaaaaagtttggtataattgatgatcatgcttcctttgatgataacatcaaaaagatttacttgcagcgctacaagaaaccgttgtccccctccttcttgaagacaatcactgagctggcggagaagggaggatgcaagagcatccgcctgaaggcagcaagaaagaaggcagcgatcgcgcccctctttgctggttgtgtttcaagaaaggccttgttactttcaccatcaactagagtagtagttgcagcagcttctgtgcccatgtcacaagacaatgtttacttgtttaactggaatgtaagggttctgaattccaaggcgaagcaagatgcagtgaaagttattttgcaacaatatggtgccactcttgtctgtcttcaggaaactaagattgcttccatcaataatcgtattattcttaacactttgggtcaaagatttgtgcgacactatgttgccctgccggctgatggcactaggggctgttag

SEQ ID NO: 37898 - DNA, 461 bp, Oryza sativa
  Clone ID: PAT_MRT4530_41584C.1
ttcttcttctcaccttctttttccccagatcgccgatgcactgcccgacttcaccttttcgcttcctggttctccgcacacaaacactaatcctaggctgcggtgccgatggcgctgggggcggcatggcgcaggagcatcgtgctgcaaggcgtatgtgtccactatagagaagggaatgtgaaagagcacgcgacaactggatctcgcaccgagcgggggaagctgccctagctatcctaaagctctttgacagacgaatatgctgcactgcagggcaatctgaggcaccatggaacgatccaaggggggtcccgcgcgcgtcgaagactccaccggagctggaagcacacgaccgtgacacgacctaaacgtgcgctactaagccatctgcgaggagctccccacgccaaaaggggacatgctgattcaccatacgccgctacaaagcctagaacaga

SEQ ID NO: 37899 - DNA, 440 bp, Oryza sativa
  Clone ID: PAT_MRT4530_41585C.1
gcgcaagggtatcttcaagacacgtgagcaaatgctggcggagaccaaggatatgaaggaggaggatctggaagcggacaataagtctcgatatctttccgcagagatgtacgagcaccttttggtgctgcgtcgtacctgtctgaaggtgtctcgggcaggtctgagcaccactctcaactcagtggatgcgttctgtgccctgcaagctatcgtcgctctgctgcagtacttgggtgggcctgacaaggagaagctggcggccatctcacgctttcctaccatgagcaagtctgcctccaatatgcttttctatactcgataactggcggactgatcgagtcgttgctacagtatcttcttcttttgtatgatagttttcaattgtgtttcttccacctttaaagcttattgatttcaaaaaaaaaaaaaaaaaaaaa

SEQ ID NO: 37900 - DNA, 2065 bp, Oryza sativa
  Clone ID: PAT_MRT4530_41586C.1
atggcattgcagccatttaccgacgacctcctcgccgagatccttctccgcctcccgtcggcggcctccctccaacgcgccgcgctagcctccaagtgctggctcgccgtcgcctccggccccgacttcctccgccgattccgcgcccgccacacctcgtcgcctctcctcggcctgttcgtctcccacgggagctccggcctccccgtgttccaccccgccgcgaccgtccgctccgaccccgacctcggcgccgcggtactcgggggcgacttctcgctcatccgcgtcggggacggcgaggatccccgctggcaactccgggactgccgcaacggccgcctgctcctctgcggaggtagatccgtcgccgtctacgacccggtgtcccgccggcgcgtctccatccgccgcccacaggacgaccccttctcggacgcctacattgccgactgcttgctgcacgggcgcggcgacaacggcgcggcgtcgttccgcgtggtgtccgtgcagcgccatggccggaggatgcgcgccgcggagtacaactccggtactcgagagtggagcttccacccgtgggtggaaaacatgaggcggcctcgccggggccaggcgatgcatgcggcggggattatcttctggaaatgcgaggacaattttgtgatattgcttgacacgctcacgatggaattctccatgctcagtctccctgtaagcttgttccagccttccaagtacgccataggggagatggaggatggcgtgtgctgccttgtatgccttgatggcaccatggacaacgtccacatgcaagtgtggctgctcatggaggaggacggtggtggcaggaggtgggaattggagaaggaaatgccggttagtgaagtgcttgacaggcattccctggtgcgacaagtccgaacagtggctagtggattggttcttgtttcctgggatgaccgctatcctcaatttgccattgacctgaagaatatgaaggtcatggctgagtttaggtgcagcggcgagacttatcttttccaaacgccatggccacccgctttgttggtcgatagcgaggttcaaccagcggatttggctattcctttacaatctgcagaatatgtggagccgcttcagatgatcgctactcagaacatgatgaaacatgttaatcttgctgcagagagaactgatgttgtgaattcagagggcccattggatttggtattggaaccacatggcccactggacgcacaacaagctatggctgctgaagcggagaccttggtggtaacagcagacctgaaattagtcaggtctactgaagcacaaaaccagtcagtagctgaaaaacctgagatcatgaaggggcctgaagtcccagtttcgaaaaggagcatgtcacgtttggaaaaaagaagaggggaaagatatgagagtgctctccacaaggcaatggagaggaaagctcgttacatgggtggtgtggaacagcttagtacttctcttggaagaaactacagaagatcagagaagccaattgttgtggactctagttacgagagatactaccagtgtcgtcaacgtcgagagaagccaattgttgtggactctcgttacggtaaatactaccagcgtcgtcaacgacgaccagccgcaggagttcagggaaggtgaaccggactcaacaaagaatccccacgaggtttgtcattgaatctgaggaactttaacaacagccctgtcaatcgaaattgcgcagaagcccggcagtgtgaggcggccggcaagtcggcagcggggctgtcgctgacggcatggcgttcaagcacgatgttctacgcaagtagcatggctatggccgctgccgtcatggagcttgacatcgaggcacccatggcgtctaagagcatggtgcaagaggcgggaggacggaggcaccagcgcgtggagttgggtggtctcctcgagttcgaactcgtcctcatgtccccgttgtcaccgagctggcccaccgccggagctacgatagtgctgttgcatgccattgtcagcgagt

SEQ ID NO: 37901 - DNA, 255 bp, Oryza sativa
  Clone ID: PAT_MRT4530_41587C.1
atgcttaggaactggtccttcggatactacgttcaagacctcactgagatgcaggtgcctctgattgctggaagcaagttatccctctcaattgcaggggctaatgttgaaccagagccaactactgaccgattcgtcgatatcatgttgcaagtggataaagcagaaagctgtaagtataaggttagtttagcatctcagcagtttgtggcttgtcaccaacaacaaggtttttttatgtggtccttggactag

SEQ ID NO: 37902 - DNA, 468 bp, Oryza sativa
  Clone ID: PAT_MRT4530_41588C.1
atggagtggtggcagagggcggtcgtcgtgccggtcaagcgcgcctgggtcgtcgtcgccgcccggctgcgtcgcaagaaacaatacggatacgcatgcccgattagtcataactatctgcagactgcctgtgttgtcaccatgtttgtgctcattcaggtaaaccgcttacttatttctcatgccgatcgacgagatgggcgcggcgtgctggtgaagctccacgacgacatccagacgtgcgcgtacgaggacgtgcagtttcaagagaaagtaccagttttgtattttgctgcagtctttctcttggtttcagaaatcagaactgctatcatcagcctatggggctgtaggcatatcgctctcacactgaaaaaacaaaacaacatattcagttcaggagagggcagtaagcaggctgagaaaacattggagataccttgtaaaaagaaggaaagtaccggataa

SEQ ID NO: 37903 - DNA, 253 bp, Oryza sativa
  Clone ID: PAT_MRT4530_41589C.1
atgtctttcgtgattagtctcacacctctcatcacaataaaagatgctataactggtaataatttgtttagctcctggtttggaatggtatattcctggtttggagatagatctgtacagccgggtatggttgttcagaatggttgggcctatacaacagggtatgttgtatagcgttggattaatattgtttaattattacttaactgttttattaaattctgaaatgtttattaaatgctgtttatgcaaa

SEQ ID NO: 37904 - DNA, 555 bp, Oryza sativa
  Clone ID: PAT_MRT4530_4158C.1
atatgtagtgctccatagaggattatgtcatagccactctgcattagtcaaggggtcaatgtgtttaagcaaattgatcaagcaagttgcatacccatgggagagcagaatccatatgcccacatagattatccagacaccaatctcttcttcatctctgcatttgggtaaaggtttagataggtagccatgaacagcttagatgatgttccaaagccacactttgtattgataccattcatggcacaaggccacaccatccccatgattgacatggcacatttcctagccaagcatggcgccatggtcagcttcatcaccaccccggtcaacgcggtacggattcaatccaccattgacagggcaagagagctcaacatcccaatccggtttgttcccctccggctcccctgtgccgaggtaggaatgctcgatggctgcgagaacgtcgaccagatcttggagaaagaccaggtgatgaagatgacagacgcctatggcatgctgcacaagcctctggtgctgtattcttcaagagcaaaacgtcccaccttc

SEQ ID NO: 37905 - DNA, 481 bp, Oryza sativa
  Clone ID: PAT_MRT4530_41590C.1
tttaagggaaagcacgcgcgctttattgatattttcaagtgtacagatgtgtgaatttatcctcaagctttgaaagccatgatcgctgcggttcaggactgttcaaatctaaaacatcttccaaacctccgagccaaaaaaaaagaaagagaaattaagaaaaagaatgaatggactccaaaattcttttgcacgaatacatgtggcctatccacaacttgatcgagcccccacaaagagcgtactaacatcagtagtaagttgcacttgcttcccctatataccctgtaaaactgcaatcatgaaacacaccaaaactgcaccttaatctccaaatcgcgacaacttccatatctgtagtgtacataggcagaactagcgagtcgccaattgagcttcaccattgcagatcaatcaccctcgtgctcaaggggcgctgtaggtcgagccaagttatgcagtcccaggttcccagctgtgg

SEQ ID NO: 37906 - DNA, 744 bp, Oryza sativa
  Clone ID: PAT_MRT4530_41591C.1
caccttaaacggttttatgcacattccgttgaaataaaaattaaagcagataatacgcctgtaacggaagcggatctttttctcagtcaatttattatccagcaacttcaacaattaacgcccacgattcctgtgttatcggaagaaaattgtgccattccattaacagaacgggcaaattggcaagaatattggattattgacccacttgatggtacccaacaatttatcaatcgaaccgatcaattttccattgcgattagcttagtacaacacaatcagcctgtaatcggcattatttatgcgcccatattagccaaaacttattttgcaatgcgaacaagcggtgcttttttgcaagaaaatggcataattcgcccgcttactcctcacaaaattatggccaataatgagcgcttacgcatcgcaatgggagcaaccaataggacgacagtagcccaatgcctacaacaacctctacaagcagatatctttcaatatggctcgagtagcttaaaagccggtttagtcgcagaaggcaaagccgactgttacattagattaggcgatactggcgaatgggatactgccgccgctgaagtgctattaaatgaaatcggtggcaagatttttgatcttaattttcaaccgcttagctataatcagcgacaacattttattaacccgcattttgtaatggtggcagacaaacaggctgactggcaaaaaatctttcaattcaat

SEQ ID NO: 37907 - DNA, 422 bp, Oryza sativa
  unsure (1)..(422): unsure at all n locations
  Clone ID: PAT_MRT4530_41592C.1
ccaagacgtcgagcgtccttactttgctgttcgcaacctatgagaatgcgacaccatcaacatgtactcaacctatgcaatcccggagtgccactgctgggtgcccgcacgcttgtcgtcaagtccgccggcccatgatcccttcacttcgtcatgccggagcatcatggtttcagtcatcgcggccgttcgtccgcaatgtcttcacctcgtcaagccggcgtcgtcgtgacgtctcctctccacaccaacatgatatcgtgacgtccgttcgtgatgcgttctcttcattatccgaagatgagatttgtccgtccanggggcttttcccctcttgtcagatcggttcgtccgtccgtggcgctttccccctcttgtcaagaatcgaggtcattcgttcgtgataaaaaaaaaaaaaaaaa

SEQ ID NO: 37908 - DNA, 243 bp, Oryza sativa
  Clone ID: PAT_MRT4530_41593C.1
atggcgtttccggacaccggacagaacatgtctcctgcagagatcggtcagtgcgagcaagcagctagccgagaacagggcgccgggcgagacagcctctgccgctgcgtgcagaatggcagcagcggccttcgaaaaaggtggattgatgccaacgccaaacaggaatccgaagtgatcgagtacgtgaagctcccccaagcgcggtatcatgtggctgtcgagtactcgctccgtccttaa

SEQ ID NO: 37909 - DNA, 3651 bp, Oryza sativa
  unsure (1)..(3651): unsure at all n locations
  Clone ID: PAT_MRT4530_41594C.1
atggtgttcgtccgcgcgccggacgggaggacccaccacgtcgacctcgacccctccaccgccacgctcgccgacctcacggcctccgcctcccgcgtctgcggcggcgtcccgccggagcagctgcggctctacctcgcccaccgccgcctcctcccggccgagccgtccccgctgctgtcctccctccgggtctcggcctcctcctccctgctactccacctccccctgctcggagggatgaccggcccgacgacgacccccgcggcacccccgcccccgcccgccgccgtcggcgcagccgcccgcccgccccgcgcgctacgacttcctcaactccaagccgcccccgaactacgtggccggtctggggcgtggcgccaccgggttcaccacccgttcggatatcgggccggcccgcgcggcgcccgatctgcctgaccggtccgccgccgccgccgccgcccccgccgtcgggcgcggccgtgggaagccacccggggacgacgacggcgacgacgatggcggcgacgaggagaaggggtacgacgagaaccagaagttcgacgagttcgagggcaacgacgccgggctgttctccaacgccgactacgacgacgacgaccgcgaggcggatgcggtctgggagagcatcgaccagaggatggactctcgccggaaggatcggcgggaggcgcggctgaagcaggagatcgagaagtaccgtgcttccaaccctaagatcaccgagcaattcgctgatttgaagcgtaagttggtcgatttgtcggcgcaggagtgggaaagcatacctgaaattggggactactcgctgcgcaacaagaagaagcgatttgagagcttcgttcccgtgccggacaccctgctcgagaaggctcggcaggagcaggagcatgtcacggcactggatcccaagagccgtgcagctggtggcaccgagacgccatgggcgcagactccggttaccgatctgacggctgtgggcgaaggtcgtggcaccgtgctctccttgaagctggacaggttgtcggattcggtatctggtcttactgttgttgatccaaagggttacttgacggacctgaaaagtatgaagattactagtgatgctgagatttctgacattaaaaaggcgcgattgttgcttaagtcagtgacacagacaaacccgaagcatccaccaggatggattgctgctgctaggcttgaagaggttgctggcaagcttcaggttgctcggcagcttatccagcgtggctgtgaggagtgccccacaaatgaggatgtttgggtcgaggcatgccggctggccagcccagacgaggcaaaggcagtgattgctaggggcgtgaaggcaattcccaattctgtgaagctgtggttgcaggcagcaaagttggaaactagtgatttgaataagagcagggttttgagaaaagggttggaacacattcctgattcagtcagactgtggaaagcagtagtagagcttgcaaatgaggaggatgcaagactgttgcttcacagggctgtggagtgctgcccactccatgtggaactgtggcttgccctagcaaggctggagacatatgaccaagcaaagaaggtacttaacaaggcaagagaaaagcttcctaaggaacctgccatctggattacagctgcaaagctggaggaagctaatggaaacacccagtcagtaatcaaggtgattgagagaagtataaaaactttacagagagaaggattggatattgacagggaggcatggctaaaggaagcagaagctgctgagcgtgctggatctgtattgacttgccaggctattgttaagagcactattggcattggtgttgatgaggaagacagaaaacgcacatgggttgccgatgctgaggaatgcaagaagcgtggttcaattgagacagcccgtgccatctatgcgcatgcactcagtgtcttcgtttccaagaagagtatttggctgaaagcggctcagcttgagaagagccatggaaccaaggagtctctttataatctcctcagaaaggctgttacctacaatccacgtgcagaagttttatggcttatgagtgcaaaggagaaatggctggctggagatgtcccggctgcccgagccattcttcaggaagcttatgcttctctccccaattcagaggagatctggctagctgccttcaagcttgagtttgagaacaatgaaccagagagagcaagaattcttttgtcaaaggccagggaaagaggaggcactgagagggtctggatgaaatctgcgattgttgaaagggagttagggaatgtagacgaagaaaggaagctgttggaggaaggtctgaagttattcccctcattcttcaagctgtggttaatgcttggacaaatggaagaccggcttggccatggatccaaggcaaaggaggtttacgagaatgcactgaagcactgcccgagttgcatccctctttggctctctctagctaatctagaggagaagataaatggcttgagcaagtcacgtgctgtcctcaccatggcaagaaagaagaacccagctacacctgaactctggcttgcagcagttagggctgaattgagacatgggaacaagaaggaagctgatgctctactagccaaggcattacaggaatgcccgacaagtggtattttgtgggctgcagctatagagatggtgccacgtccccagcgtaaagcaaagagctcagatgctataaaacgatgtgaccatgatccccatgtcattgcagctgtggccaaacttttctggcatgataggaaggttgataaagctagaagttggttgaatagagctgttactcttgctccagacattggagatttttgggccttgtactacaaatttgaactgcaacatggaaatgctgatacacaaaaggatgtcctacaaagatgtgttgcagcagaaccaaagcatggagagagatggcaagcaataacaaaggctgttgagaactcacatctgtcaattgaggcccttctgaagaaagctgtgttggctcttggccaggaagaaaatccaaatgctgcagatccctagtctgtctcacttttaacttttgataagtctggtcacaggtctaattcttctgcgcatgctggcaatggaatatatagagaaagaaacacagttgggtagtgaactgggatggactcgagctgcgacctcgtgattctgtgtaccaccgaactgattgctgcactcctccaaccatgaagccttacctgaagaagaatcaggcatgcgattactacaatttgtatcggcgatcaccagttaaaacctgtatcgtttgtatgccctaattgccagcaatacttctgtactaccatgagcatgtttattcctccagatgcataccacaaattcttagatgggtgtatttgctagccgcgacttgggatgatgtaatttttcttgggttcggtttattctcagagcactggcgtctgtatctacgactgtaagatctgcctgaatgtcggcttaatatatgagataatgccccatttttcagcccacctaaaactaaaaaaaaaacaaaaaaatantaaaaaaaaaaaaaaaaa

SEQ ID NO: 37910 - DNA, 157 bp, Oryza sativa
  Clone ID: PAT_MRT4530_41595C.1
acagtgttggctaccattttaagcagccggacacagattgaaattttcagatgaaggcagccagcctttcgcttgcagaatgttttagccagtacatgttcctaggattttttcctggaagaaatcgatcaacctgaggaagcttttttttgctgct

SEQ ID NO: 37911 - DNA, 189 bp, Oryza sativa
  Clone ID: PAT_MRT4530_41596C.1
gacctaattatcccaccctggtattcttattaacgcataatttgtcataagaaactgacaccataaacacacttttctattttaacacatatataattcaaacacacttactcactactcttagttgatcatagccccttataacaactctacaactaagatcactattacccctctgtggtaaacatc

SEQ ID NO: 37912 - DNA, 621 bp, Oryza sativa
  Clone ID: PAT_MRT4530_41597C.1
atggtgtccccggacatgatccgcaacgtggtgggcatcgtcggcaacgtcatctcctttggcctcttcctctcgccggtccccaccttctggcaaatcatcaagaataagaacaagaacaagaagaagatggaagtggtgctagcggcggaggctctcttcatggcggcggtggcgcttggcgtactcttaggcgtgcacacccatcaaagacgctccttgatcgtcggcatcctctgcgtcatctttgacaccatcatgtactcctcaccactcaccgtcatgagtcaggttgtgaagacgaagagcgtggagtacatgccactgctactatcggtggtgagcttcctcaacggcctctactggacatcatacacgctcatccgcttcgacatcttcatcaccatccctaatggtcttggcgtgctcttcgctgccgtgcagctcatcctctatgtcatctactaccggaccacacccaaaaagcagaacaagaacctcgagctgccaaccgtcacccctgtcgccaaggacaccagcgtcggccctatcagcaaggacaacgacctcaacggcagcactgccagccatgtcaccatcgatatcactatccagccataa

SEQ ID NO: 37913 - DNA, 111 bp, Oryza sativa
  Clone ID: PAT_MRT4530_41598C.1
atggcagaagcaatccagaggactcgaagtcaactcgccgatagatcccgtcgagccgttctcgacaaagatctcgttgatcctcgtaccagcgtaccccaatacccttag

SEQ ID NO: 37914 - DNA, 412 bp, Oryza sativa
  Clone ID: PAT_MRT4530_41599C.1
ctaggcccagatgccggcgaggaaggcggcgatgcgccgcgccgagcgcgcgaggaacgaggcgcagagctcggcggggtcgtcgacgcagccctgccacgagcacgcccgcaggagcacgcggccgcggccgcgcccccgcgctcccccgtcgccgccgccgccgccgccgccgcgggcggcgcgcagccggacgacgtggcgccacaggcgggcgaggcacccctgctcccgcggcggcacgacgacggcggactgcaggtacgccgacgcggcgtgcttcagcaggtggttcctgatcccgatgttggacgcgtcgaactcgtggatatcgtggctcgagtactcgcgccagctccctcctcctccacctccacctccgccgcctccgcctccgcctccggacgcgtgg

SEQ ID NO: 37915 - DNA, 722 bp, Oryza sativa
  unsure (1)..(722): unsure at all n locations
  Clone ID: PAT_MRT4530_4159C.1
gcgcganaacaaatcggcagatacgaagggaacattccaacctcctcccacacggctccaccaagaggcgcggcccgctcgatccgctgattcaccagcgtcggtctggtcgccgagtggcaacgtaggccaacccctacgcgatgccgtcgtcgagcaggacggagacggtgaagaacgcgctgtcgcggtgggcgcggagagtcggcgagacgaccaggaaggccgaggacctgtcgcgcaacacatggcagcacctgaggacggcgccgagcatcggggaggcggccgtggggaggatcgcgcaggggaccaaggtcctggccgagggcggccacgacaggatattccggcaggcgttcagcgcgccgcccgacgagcagctccgcaagtcctacgcgtgctacctttccacctccgccggcccggtgatgggcatcctgtacctctccacggccagggtcgccttctgcagcgacagcccactctcctacgaggccggcggcggcagcaaagagtggagctactacaaggtggcgattcctctgcacaggctgaggtcggcgagcccgtcggccagcaagcagaggcccgcggagaagttcatccagctcgtgtcggtggaccgccatgagttctggttgatgggctttgtgaactacgacagcgcggtcaagcacttgcaggaggctctcagcggcttccaccacctgcaagcgtga

SEQ ID NO: 37916 - DNA, 204 bp, Oryza sativa
  Clone ID: PAT_MRT4530_415C.1
atggcaagagccgcgaccgtggccgccgtagccgcggcgtgcgtcctcgcgctggccgcgggggcgggccaggcgccggccagctgggagcgggagcgggagctggggatcggcggcattaataacccccgcatgaatggcaccaagtataggttgtatttgggcttggatccttatgagcacagaattttaagtttcgactaa

SEQ ID NO: 37917 - DNA, 342 bp, Oryza sativa
  Clone ID: PAT_MRT4530_41600C.1
aaaaagaaaagcatttcctcctgggaaaataaaaaaaacaagaaggaaaaacccccccccccccatgggggtttccattttaggcaacacagcgggaaagtttattcaaccatccccaaaaggccaatcatttggaaaaaggggcggggggttaaaagggcccaaaaaaccccccccaggaaaaacctgggggttgggctgaaaacggaaaaaggctccatggaagcccaaaaaaaacaattgcccatttttaaacaaggggacgaaacctttcttccaaaaacctaaccggacttaaaatggtagacggggagccaaaggaggctccctaaattccctggg

SEQ ID NO: 37918 - DNA, 217 bp, Oryza sativa
  unsure (1)..(217): unsure at all n locations
  Clone ID: PAT_MRT4530_41601C.1
acgagatcatttaaataaatgaaatacaacgcccttggacaccaaaaaacggaagtacggatgtgccaagatgattaccattattctgtaatgggatcatcgagccctggctgccgaatgcacacgacaattacaaaacntcagctaaatatatctggaaggtttccgtgagcagcctcaaagatgctccggacggttgatcttgcttgttctcaag

SEQ ID NO: 37919 - DNA, 543 bp, Oryza sativa
  Clone ID: PAT_MRT4530_41602C.1
aggatatgatagcacatatcattgagatggaggcggattacataaacacatctcatccaaatttcatcggcggcagcaaggctgttgagcaagcacagcagcaagttaggtcttctagactggcagctgtggctagaagagagggagtagatgctgataagtcacaagcttctgataaaactcaaaagccgcgtgcgcttttgggtagaactggtgtaaatggagtagtcacagatcatctccagggtttacggcctgctgctgaggctgaaaggccaggatcttcaggtagtggaagcacatctttctggggatcaatatcaatattttcttctactagtgatgatcgtacacattcttctgcaaaagacaactcatcgaacaaatcttatacagcttctacttcccacctggagcattcactctctacgatacagttgagagagccaccagttgtcttgaaaccttcagaaagccagtctgagcaggaggcgcttgaaatagcaataactaagttgctactgaagtcatattacaatatag

SEQ ID NO: 37920 - DNA, 555 bp, Oryza sativa
  Clone ID: PAT_MRT4530_41603C.1
atgagggggatgggcgacgacgggatggggccgatggcgatggcgccgccgcgttccggccacgccacggcggcggcaccgccgccgccgcagcacaagatggcgatgatgatgcacatgaccttcttctggagcgaccgcgcggtggtcctgatccggggctggcccggggagcgcggcgccgggatgtacgccctctgcctcctcttcgtgctcgcgctcgccgcgctcaccgaggggctctccgtgctctcgcgccgcctcgcccgccgcggcggcggcgccgcctcctcggatggcggccgcccggcgccggcgccggcgtcgtccgcggcgctgctgaccgcggtgcacgcggccaggatggggatggcgtacctggtgatgctggccgtcatgtcgttcaacgtcggggtgctcctcgccgctgtcgccggccacgccctcgggttcctcctcgcgcggagcagggtgcggccggccgcccgtgacggcggcggcggcgtggcctgtgagcacggtggcctccctcccgcggatggatccaagacttag

SEQ ID NO: 37921 - DNA, 2880 bp, Oryza sativa
  Clone ID: PAT_MRT4530_41604C.1
ttttttttttttttttgcaattttttttttttttttttttttttttttttttttttttttttttttttttttttttatgcaacacaaatttgttttgcgtatccttaccaaccaaccttgtcagattttgcaaggcaaaaccgtcttttaggatacaggcattcggacgctcgatactaacaccgagcaaccatagactcttccctgggcttaaactaaaactatacccatcactgatatatcattttatgatgaaacgattgggcagcgaaatatactgtacaaagggggcaaacgggcaaaactcgctccatgtcatggcttcattggggcgcaacactgagtgaaaagaatagtagtagaactagaaaagcatacatctatctggtgcaaacaaactgaatgcagaatgcgtgcaaccacggtacatcgcctggttcaaccactggttcgttcgggtgacggtcgtgaatggcgagatcaaaatccgttaccgcttgcatcgggattgaatggcagctgctcccctgagtggctagatttccttgaccttggttgctttggggtcgaatatggcgagcttccatcttggaaggatgaagaaagcccatgagcccttggtagacctgttgcatcggcatccagggaatagcctctctcaactgtgtccgcttcaagtggtatctcatccaaagtcttgtatgcttgctgaaggaccttgagggtgtcacgtatttgcctcctctttatggttatttcatcgggttctctgagcatgtccgcaaagaggtcgtctctataaagcttagttataaggtaattatgcagctcccgttttgtgtggttaaccagaaaatgcatgattgcctttggaacgaagtcctcaacatttttccgcactatattgtaatatgacttcagtagcaacttagttattgctatttcaagcgcctcctgctcagactggctttctgaaggtttcaagacaactggtggctctctcaactgtatcgtagagagtgaatgctccaggtgggaagtagaagctgtataagatttgttcgatgagttgtcttttgcagaagaatgtgtacgatcatcactagtagaagaaaatattgatattgatccccagaaagatgtgcttccactacctgaagcccacggcctctcagcctcagcagcaggccgtaaaccctgatagtggatgacaaaatcaaaagaagaaatgccaggtgtaagtgctcttctagccacagctgccagtctagaagacctaacttgctgctgtgcttgctcaacagccttgctgccgccgatgaaatttggatgagatgtgtttatgtaatccgcctccatctcaatgatatgtgctatcatatcctgcgcaggcttaagcccatcccgtaaaaacctcccgatgacttcatccatgctcctacggagcagaggaaactgctgcagctcaacagcaagacagcgatggctcatcttgactagctcatcgtatatgaaacctgcacactgaaggcttggatcaagcaatctgctgatctgcctgcgtacaaggacctcaaaaggtacctcaggtacgaacaaagcactcctaggaccagttgcgttctgtatagccatacggatgtcttcatcggtaacatcttcacaagggtcaacatcctctaagctttttacatatatagattgaaaaatataatggatccttgctccaccacaaagctcaattgttgatatgtcctcattttttccctccaccattgaggagaaagcttcacagtactttgccagaatgttcaaaagcttagcaccttgaccagccttggactcgactggatcaccataaaaggaaagctccttagcagtagttgtcaattgagaacttatacgtgacttcaatcctggcagaacagtctttatatgctggaccaaaatctggtttaacttctttgctaattgtggtataccacagtactgagcaagaccattatacgctggatgattacggaagaaactttcttcgcgcgccagagcttccttgatactgagatctgatttgatatcctgttgactgcggtttaccacaccaacatagcctagtcgtaatggaatcacatttcccaacagaaagttacgagcatctgtgcccctgtccattatgtccagctttgttataacaccaattgttcgagaaccatcagggtcagcatttcgagcaatttgaagagcatcagaattcgataagtctgcatttgctggcgaaacagccaagatgatacatgtcttgtgcttgatatacgacaatatcatggtccttattctggcctcaatgtcagttggttggtcaccaactggcaccttagttatcccaggcaagtcaaccaacgtaatgtttagaacatttggtgagtagatcttcagtcgtatctgcttatctgacacacctttgttaccacccgcctctctgtctgtttcggcctggatctcgcggcggatttcgcggaagtcatagaagcggcggccggggaggtggaggaactcgccccactcatccgcctcggcgtcggcggggcggcggggctggtgcacgagctgcagcacgaggggtcgccgcgtgcatatgtcggagccccggggcaggaagtcgcggccgacgagcgcctcgaggacgctggacttgccgctgctctggctccccacgacggcgacctgcggcaggtcgatcgtggagctgctccccagctgcgagaagatgtcctgcagcttgttcacgatcgggatcaccgacgaccccaccgccgccgccgccgcggccgccgtcgccgtcgacggcggcgcggaggacgagtagatgccgtcctccat

SEQ ID NO: 37922 - DNA, 366 bp, Oryza sativa
  Clone ID: PAT_MRT4530_41605C.1
cgagagccttaagggaaagcaatcgctcaaagccgccgagcttcaagacggagacatagtgtgtgtccagcgcaagaaggacgctggttcacaaaacttcctggaaaagaggttaagcagtgacacccgttcaactgatgacacgtcaagaaagacggagaactttgaggacgcgaaggagtactatgaattcttggtcaacaggaaaacggtcaaattcaacgcacatcccacaaagtgtgacccgaacgagtacccaccgtttgagatggtcctcaactccgaggcgttcgcccaatttctctgcaagttggtcgtacgtcatcttagcctcgtgccgaattcggcacgagggagagaggagga

SEQ ID NO: 37923 - DNA, 897 bp, Oryza sativa
  Clone ID: PAT_MRT4530_41606C.1
atggagagcgcggggagcgggtccggccacgcggcgacgccggtgaggtacgtcgccctcccgccaccgcggggcgtccgcgacggcggcggctggaacgtcctcgtgccggagtccatggcctccgagtggacggtggcgcacgtccgcggggtggttcgggtggcgtcgagaggcggcggcgccccggaggtttccgtcgacatggccgcgctgcaggccgcgctgaacggccgccgccgcggcgacgacgaccccgacctccatctccgcccggagcggggcgggggccgggacgcgctgacgccggtgaggtacgtggccctcctgctaccacgaggcgtccgtgacggcggctggaacatcctcgtgccggaggccatggcctccgagtggacggtggtgcacgtccccgcggcagctggcgtggttcgggtggcgtcgagaggtggcggcgcaccggaggtgtccgttaacatggccgcgctgcaggccgcgctgaacggtccccgccgcggcgatgaccccgaccacctccatctccgctcgggccacagcggtgtgggaggaggtgttgcggagcggggcggcggtggcggcgccggcgggccgtgctacgtccctgtggtgttcgtcctcaacaccagcaaggaggccgagaaaaaggagcaccaagcacgcatgatcagtctgctcatgttgtcaacctttgctgtctacctcctctacgctatgcagcacatctccaaggatacgttcctcacagtggaattgcttcagtttgtgggccacattgttatgtgggctgtggcctcaagagttgctcgaagcacaaacagaagtgagcctcgtcttgtgccaaggtcttttattactgtgaccaagaagaacgcgtga

SEQ ID NO: 37924 - DNA, 295 bp, Oryza sativa
  Clone ID: PAT_MRT4530_41607C.1
atggtcgacgccgacggtatatctactccggcattgccgtgtctcaggcatccgatttgcagctgcagctgttcgcggcgacaccttggacgccaggatgcaggtccgcgcaccgacgacgcacgcacattgcttcttttgctcatgagcggcggcgagcgtaagctagctaccgtcggctccaccgtgaaggagctgcgcgcgctcggccccggcggcgacggctgcaacgcgctcgccggcgtgggggcggggagcacggccagtagcgcaaatggcggggaaaggccgaaac

SEQ ID NO: 37925 - DNA, 357 bp, Oryza sativa
  Clone ID: PAT_MRT4530_41608C.1
atgacgcacggtcagcccgccgccgagttccccgcctccggatccgtcgccacaaccttccccatcgccggatccgccgccgccgccctccacaccaccggatctgctgccgccgccctccccaccactggatccgccgccaccgagccccccgccgccgccgtcgtcgagcccgccgccgccgccgtcgtcgagcccaccgccgccaccgtcgcccgagccatctaccgccgccgtcgtcgagccccccaccgccgccgttgccgagcccgccgccgtctcccgaggaagagcgcgcgagcaaagcggcggtttcacgccgtcgctcgtcctaggtgggacgagttcgtccgctag

SEQ ID NO: 37926 - DNA, 1323 bp, Oryza sativa
  Clone ID: PAT_MRT4530_41609C.1
gctcgccatcgtcgtcgtcgtcgtcgtcgtctccggctccggcaagagagctagtagtgagtagtagaaagaagaagaggcaaattaatagtaatggaggggaaggaggaggatgtgaggctgggggcgaacaggtacacggagaggcagccgatcgggacggcggcgcagggggcggaggagaaggactaccgggagccgccggcggcgccggtgttcgaggtggaggagctgacgtcgtggtcgttctaccgggcggggatcgcggagttcgtggcgacgttcctgttcctgtacatcagcatcctgacggtgatgggggtgaacaagtcggcgtccaagtgcgccaccgtggggatccagggcatcgcgtggtcgttcggcggcatgatcttcgcgctcgtctactgcaccgccggcatctccggcgggcacatcaacccggcggtgacgttcgggctgttcctggcgcggaagctgtcgctgacgcgggcggtgttctacatggcgatgcagtgcctgggcgccatctgcggcgccggcgtggtgaaggggttccagcgggggttgtacatgggctccggcggcggcgccaacgccgtgaacccggggtacaccaagggggacgggctcggggcggagatcgtgggcaccttcgtcctcgtctacaccgtcttctccgccaccgacgccaagcgcaacgccagggactcccacgtccccatcctggcgccgctccccatcggcttcgccgtcttcctcgtccacctcgccaccatccccatcaccggcaccggcatcaaccccgcccgcagcctcggcgccgccatcgtctataaccgcgcccacgcatggcacgaccactggattttctgggttggtccgttcatcggagcggcactggcggccatctaccacgtggtggtgatcagagcaatccccttcaagagccgggactaattaattaccatgcatcatcatcttaattaagcgataattactctgaaataatcaaccgagttgatgctgcaagatgatggaggatcaagtctctacagtactacgtgtgttattaccgtctggtgatcgatgaagctagccgctgcataattataagcgcgtttatatatatctgatgttgctgtaattatatctatgtgtacgtagtatgtttggtgtgagaaatggtacttgtgtgtgcggaggcatgcatgttcttggttgcacgccttcagctatatatagctttgcatcaattccatctccaaatgtgaattttactagttactatttttaccaacaaaaaaaaaaaaaaaaaaaact

SEQ ID NO: 37927 - DNA, 342 bp, Oryza sativa
  Clone ID: PAT_MRT4530_4160C.1
atggtcgtcttcttcgcaaggaaccaaagccaagcaaaatctaaccaaagttttactctgcacttgtcatcatcatcacaggacaaccaaagtacttgcattacatgttgcagtcaagatttcctcgacgtgattatcccaaagacgcttgatttgcggccgtggatgacgggcaaagtgacgacgcggcgagttcagacttcaggcacgcgtattagtttctgccgaatcaacagcgacatcagagacgactccctcgccggtcatcgcagcaaaaatgctcatcagtggttcaccgaaaggcagcttcacatcgtcatggagcttcagactttcagtcga

SEQ ID NO: 37928 - DNA, 537 bp, Oryza sativa
  Clone ID: PAT_MRT4530_41610C.1
ttctatcaagctcaaggccgagtacaacaaggccattgttgactacaacaagggctagagcactgccaagaaggcacccgccaaggaggaagaggagtgactactagtacaagtttatcgaagcccttaacatcattcaaaattgtgaaatcgatattatgaattcacttgagattagaatattcttacttggttgagtttatattatttttttttgtatgttagtttttatttctttatttttctcttttactttacttattttatttattattttttcatctttatttttatctatttccctaattttcttctgttatttactattttttatttttttttcactcatctattatttatttttgtttctttttttttttttttttattcttttttttttttattttacatttttcttttatatatcttttatcatccactttctttttttttattcttttatatttattatttatctttattcttaattttctattatttttttatttttacaatctttttatttttatactatta

SEQ ID NO: 37929 - DNA, 178 bp, Oryza sativa
  Clone ID: PAT_MRT4530_41611C.1
ccaacgcacgcggttagcaccttttatgggattgtctaatgccatggctgccttctttcgggttgcttaacaaatggggaagcacgagatgctttctccgcaagcataccgttaccgtagcatctggcatgcagatgcagaagctgcgccgttactgaaagatgtaccagaagcagtg

SEQ ID NO: 37930 - DNA, 330 bp, Oryza sativa
  unsure (1)..(330): unsure at all n locations
  Clone ID: PAT_MRT4530_41612C.1
gaagagacctacctacctacctacctactctaggcgggagagatngtggggaagagcggggtggcggagnagggcgganggcggcggcggcggcggtgaggaggtgggtggaggccggcggcgggaggctngtgatggacggcgnagctggcgacggagctggaggccaacggcgccgacctgaacgacccgntctggagcgccaagtgcctnctctcctncncgcacctngtccgcaanatcagcccgnaatctngcgatcatctcncctgtattcttnctgctcnttacgattactnctctagtctagcattcngtactttttctttt

SEQ ID NO: 37931 - DNA, 744 bp, Oryza sativa
  Clone ID: PAT_MRT4530_41613C.1
atgccaaaccctggcctcaacggtggagatgggggttcggccgaaccatgggttggcccaaaccagcccatcttcggctggcgacttcctctattgctccactccgcagacttcgtcgggcagggaggacgcggcgcagcatcggcgtcgagaggaggcggcgccggcgtcgggcggggaggaggcggcgccggcgtcggtggggaggaggtggcgccagcgtcgggaggggtcggaggcggcgcggcgacagaggaggaaacagcagcagcagcagagcttcaccggccggcgggcttgacgtcgacgtcggcggcgaacggcggggattctgacgtcgcacccaaaaggagaaaagtgcaccaggctcttgcgcatccgacgatgttcgtcttgtcgccggagatggccgggatggatgccggaaacagcgcgagcggcgctttctggaacctttgtgatgatgatggcgcagtggttcggccagagacccaccggatggacgggaacggcatcgcgacgtcgggagcgacgatgagctcgacgcaggagaagacaagaaatggatcaaacatcttcgggttaaagattgagaagagtgttctgggttcctccgagaaagttcttgctttcctcggcccaccgttcggccacgcactgacctttgccaaggaggatccagaggaccccagctcgatcatcaagcccctaccagaggctgagaacgggctagatcggccctaa

SEQ ID NO: 37932 - DNA, 927 bp, Oryza sativa
  Clone ID: PAT_MRT4530_41614C.1
ttagggccgatctagcccgttctcagcctctggtaggggcttgatgatcgagctggggtcctctggatcctccttggcaaaggtcagtgcgtggccgaacggtgggccgaggaaagcaagaactttctcggaggaacccagaacactcttctcaatctttaacccgaagatgtttgatccatttcttgtcttctcctgcgtcgagctcatcgtcgctcccgacgtcgcgatgccgttcccgtccatccggtgggtctctggccgaaccactgcgccatcatcatcacaaaggttccagaaagcgccgctcgcgctgtttccggcatccatcccggccatctccggcgacaagacgaacatcgtcggatgcgcaagagcctggtgcacttttctccttttgggtgcgacgtcagaatccccgccgttcgccgccgacgtcgacgtcaagcccgccggccggtgaagctctgctgctgctgctgtttcctcctctgccgagcctatgacaggtggtccccactcgggacctattcctagaacctcgagggaccagtggtgatggagcgccgcctctcccttccagccggccggccgccgcactcccttcccgacgccgacgccgcctcctccccgctcgacgccagcgccgcctcctcccgacgccgccgcctcgcctcctcctacctgtcgccgcgccgcctccgacccctcccgacgctggcgccacctcctccccaccgacgccggcgccgcctcctccccgcccgacgccggcgccgcctcctctcgacgccgatgctgcgccgcgtcctccctgcccgacgaagtctgtggagtggagcaatagaggaagtcgccagccgaagatgggctggtttgggccagcccatggttcggtcgaactagggggttcggccgaacccccat

SEQ ID NO: 37933 - DNA, 979 bp, Oryza sativa
  Clone ID: PAT_MRT4530_41615C.1
ccggccgggacatctacaaagacaagtttgtatacaaagaaggcaggaatatgaagacaatcttgagctacttcgttttctttttagccatactacaaatttcccatcgtttggtagctggtcagaattatgaatttcaatcagggataaatcatggatttgtgaactcaagaaagaatctttacaagcatgctataccaagaattttgacggaactcggtgaattagcatcaagagaagattccactactgcggacaacaatgttgatctcaccccaaagcatcaaagcttgactgcaagcaaaatggagacaatccatgttagggcaaaggcacatataaaccccgacgaggagctcactaccgaggattatccccgtccgcgcccaaaccatcctagtatagcactatctaatgaagaattcactaccgaggactatcctcgtccccgtccaaaccaccctggtgtaacactgtccaatgaacaattcactaccgaggattatccccgccctcgtccgaaccatccatagtgtcgcaccataggcagtaaagtgtgtggttacatttgtaacaatactgaactgatgatatattcatcattgtaaaaatcaataaacatgttccttcagcatgatggcataaaaaaaaaaaaaaaagcggcctttgcaatggtaacttgttgtggcattgaataagacgattaaaattataatcttatttttttcccaacgatcggtattgaccaatcaatcttcctctgtcgaacacattcagagcgccgtcatggcctgctccgccgccggggtaaccgtcttcttcttgtcctcctcttgccacaggaatggcgtctcggcgttgccgtcgctgcagtagaggcacgggtgctgctcgaacccctgatcgctcagcaccgccctggccatgctcaccagctgccggttgctcaccggcgccgggtgcgacgccagcacggtct

SEQ ID NO: 37934 - DNA, 2463 bp, Oryza sativa
  Clone ID: PAT_MRT4530_41616C.1
atggaaagtcgggaatggatgtatcattggccgaggtttttgtctccatatagaaacaaagtgtctaaatttattggtattgccaaggcacatgctgaggagaacaatatgagcaagataatttgtccatgtgctgactgtaagaatgaaatagcctgggacttcggcgatgcttttaaagtgaaggagcacttagtaactcgtgaatttatggacaagtacgaaatatgggcacgtcatggcgaagaacaagtggacgggcctgaaaatgtagttccgacacaagttaaagacatggtgcatgacgatggttctgttgaggacaaaatcgacctaaaggaaatgttacgtcatgcagaactcgaggtgctgatggggtcagcaagaggtttaaataactttgaagctttacagaaggcagctaaggaagttttgtacgatgagtcaaagggctgtgacaatatggctgatttatggaaagagagattgaaagtgtgggacgagtacttaagggaatacttcacagtgaaggccatcatcttcgtgaccattaaagattatccagcaatgtttccagtttcaagtccaattaaaggtaaaacaggatgtgtgatctgcttgaatggaacgtactataggtatctcccggattccaacaagcttgtgtacatgcggcaccggcggttcctacgcataaatcactggtatcacaagatgaaggcggagttcgatggcactgaagagactgatcctgcagcaaaacctacatcgggggaaaaagtgtgtgcaatgacagagaaaattgtttgcgagtttggaaaagtgactaagaaaccattaaaggggacaaagcgcaagaaactcgagaagcaagatgatagttcgaagccagttgataaactccctccaccattcaagaagcattccatactctttaagtacctcccgtactggaaagatctagaggttcgacatgtcatagacgtcatgcatctagagaagaatgtgtttgacaacatagttggaacattgttggacatgccgaagaagacaaaagatggtctgcaattaaggatggatctagtcgagatgggaatcggggaagagttacaccctcaagaagtgccacagatggttgcgcttggcccattgtacctccgtcaaatgtggtcatacgagcattacatggctgctttgaagggttacgtccgaaatcgtgcacatccagagggatcaatggttgagggttatagtattgaagaggttgtcgagtgctgtatcgattacctcaaagatggatatgcaattggagtacctgtgccccgacatgagggcagattgactggcaggggaacgataggaaagaagagattcgtcacccatgatcacaaatcattccaagaaactcacttcagcgtgcttcatcagtttgctatcgttcagccttacatcgatcaacatatcgaactaatacaagctaacaataagggtcgcaccaccgagtggataatgaaagaacacaagcgtctcttcatagattggttgcgagacctagacttacctgagggacaaactaccgatgaaataactatgaagtggttggcttgtggtccatcaactacagcaattgatgattccggggaaaaacaatcatacttcgggtttattgaagaaatatgggaaatcgactatgggcacacaatgcaattccccatatttaagtgccagtgggtaaaatacccgaacggggtcaatgttgataagttcggtcttactgttgttgaccttgcgagtgtgggtcacaaggatgaccctggggcggacggaccgcttaggagccacgactccaagtccaaaaatgagaacaaggagaagttcatagtaaccatcatcagagggggtaaggaacgtgccaagctcagagatgatgacccccagaaggccgctgaactagccgggccaacatacttcgcaaccgatgattgcccgaaaaagtacgaacatgggaaagcactcttgccggaatgggcactgaacgaaggaccatgggagatgaaaaggttacataccttctacatggaggccagcaagaaaggcttgggcaatataacagctcgatcaccggcagattgtttcggcgaagaaggttacatgtggctagatttctcagatctccacgccatatatcgtcgggataagatggacgtcaattatgtcagtgtttggtgcatgatgcaatacatggatgctaggaagaaaaaagaacctattggcttcttggatccaacttggatctgccaaacacaacatacctgtcacaagcaaccacgaggaacggtcctttgtgggtattacacttgcgaattccttagagttaatgggaggtactggactaacgtagaggatttgtcaagattagaatgtcgaacaagctttgacgatacaggcataaaaaatgtctag

SEQ ID NO: 37935 - DNA, 1041 bp, Oryza sativa
  Clone ID: PAT_MRT4530_41617C.1
atggagcttcttcttgtcctgctgctcgccgtcacctgctctccggcgatggccgacgtcgtctcctacagtttcgccgccgtcggaggcggcagggcggcgtcgaacggccttgtggtggccaccaactcgtccatcctgtctcccgccacgttcctcttcgacgcccagctgttccccgtcttcaacgagtccgacggcttcctcctcctcgccgacacgctccagctctggcgcgccgccgccgccgggatgccgccggccctcgacgcgtcattcaacacgaccttcaccttcctctcctccgccgtcgccttcgtcgtcctcctcgacagcttcccgccgctggcgagccaccgcggcgtttcggcaccgaccgacggcggcgccatgacgacgaccaaccccaacgccaccagcagcctcgccaccgtcgaggtcggcacggtgaactcgtacggccggcgatcccccaacgtcggcctcaacgtcaccgtgtccgcgaaccgcacggcggcgccgcatggcctcaccgtgtggatcgagtacagcgccgtcgagcaccacctgtgggtgtacgtcgccgccgccggcgaggcaaggccggccaaatccgtcatcgacctgccgctcaacctccccggccggcggatcacacagagagcgttcgtcggcttcttcgccggcacggtcagggacgccgtcctcggcatccgtgactggaacctcacggtggacaggttcccgggcgacgggcggcggcgaggagaagacgttgatgaacaggtgaagaagggcacgccgccgtcgcggtggctggtggcgctgctcgccgtgctcggcgccgttgcggcggtggtgaccgtggcgtcggtggtggtgtgctacatggtgtcacggagacgggcgctggagacggagcgaattaggcaatacaccaataagccctccttggcagaagcggcggcgctgctttctgtccagaaggtggcgttagcggtggaggcgtcctcccatctttccgtcgccggttttgactag

SEQ ID NO: 37936 - DNA, 1668 bp, Oryza sativa
  Clone ID: PAT_MRT4530_41618C.1
atggccgatagtactaaagggactgaagagaagggtttagggaagggagagccatcccttgctgttgtggttgctccggaaccaacggtcccaccggaggatagttatgacagcgacgtagctgacgaagacgatgagtactcgtcgccaatcaatccttgtccaagcccaagcctgaagagaaggaaaaagggcgacggtgaagaaggcgacaaggactacattccccctaaagaaggggaaacggtgccatggcgatcaaaatggcagccaaagaaaaaagatctgtcgaaagacgatgaggtaccagctaacacaaccggctcaaagaaaagcgaacggccagcaaaggcgatgaaaaggaagggcgagagaagcgtgaatagaaaggatgaagggttccatgttgttagccatgtttcgccaaaaggagagccgctcgcccctaagacggcacgtgcgaaattcagttcacagtgtggcataatagtaagggaaaagatccccatcacggtcaaggactgggatcataagaaaggatttttgaagcctaagagggagaaagatgtgctaagtacggcgctgggtactcctgagcatgggggtagggttcgagaagtgacgtccaagatgagttggaaggaagggttcaaacatgacccccacaagaagcgtgaagcatacaaggataaacttagagacgaaggggctgcggattttgaaaggcaaatgatattgcacgttcccattggacgctccgggaaaactcttgaggccgctatagccattgctatccctgggagaacatataatgaagagttcatacccgatgcgtatgccaaagtgcagccgcaagtggtccacgaagggtttgagtcctacgacattgacttccctaatgcagatgtcaggacagaaatagaagaagtaccaggattggaatgggacggtacagagccagaaatatttgaagacccttctactgcgaaagaccccgaggtgcaagagaccacggtccctgagaaggccagtaccagttctaaggtgcctagagtgcttaggagccacgactccaagtccaaagatgagaacaaggagaagttcaaggtaaccgtcttcagagggggtaaggaacgtgccaaactcaaagatgatgacccccagaaggccgctgaactagctgggccaacatacttggcaactgatgatttcccggaaaagatgcaatacatgaatgctaagaagaaaaaagaacctatcggcttcttggatccaactcggatctgtcaaacacagcataccgtgaggctagcacaagggtcagatcagctgaagggcaagactccaaaagagatagctgaatacaagaagggcttgcacaacgagaaattgattactgtcgcacaatacattggacgagccttcttgcactttcaaaataagagagtcgtcatggccgcttataattttaatttaagtccgttgccaagattagaacatcgaacaagctttgacgatacaggcatcaaaaatgtccaacgtgatctgtgccacttcatccaccatgaatgctgtcatgtgaaaggagatttcttcgacccagagggtgccttagcgacaagtgatgaattcaagaatcttcgggagtggaacactgctatgacataa

SEQ ID NO: 37937 - DNA, 3924 bp, Oryza sativa
  Clone ID: PAT_MRT4530_41619C.1
atggctagccatttctacggcatgttccggcaagacgacccagcgccggcgccggcgtggtggttccagtcgctggccttcctcggcgccgcctacgtcgccggcgtcacgctgcgcctcctcgcctacgtcgcgatctgcctcggcgggcccaaggacctccgccggtacggcgcgtgggccgtcatcaccgggccgacgtccggcatcggctgcgccatggcgctggagctcgcgcgccgcggcctcaacctcgtgctcgtcggccgtgaccccgccaggctccgggagatctccggcacgatccgctcccgccacggccgggtgcagaccaaggccgtggtgttcgacctgtccctcgcctcgaccccggacggcgaccagccgctgcggcggctgcgggaggccgtggcggggctggacgtcggggtggtggtgaacaacgccagcgaggggaggcccggcgcggtgtacctccacgaggcggacgtggaggagtgggtgaggatggcgcgggtgaacgtgtcggcggtgacagaggtgacggcggcggtgctgcccgggatggtggagcggggcaggggcggcgccgtcgtcaacctcggctcagcggcgtcggaggccatcccgtccttccccctctacaccatgtacgcctccaccaaacggtacgtggctcagttctcccggagccttcacgtcgagtatgcgaacaaagggatccatgtgcaatgccagacgccgttcttcgtggagacgacgatgttggcgaagttggaggaggaggtggggcttagcgtgtcgccgttgaaggtgagcacggacacctacgcgcgcgcggcggtggcgtggatcggacgcggcgggccgctctgcacgccgggtggactgctgcaccagctgatgtggtgcatcaccgccgccgtgccggagtccgtcctcgactggatcgtcctgcgcttcaccacctggaacagaggacgagatatggaaagtcgggaatggatgtatcattggccgaggtttttgtctccatatagaaacgaagtgtctaaatttattggtattaccaaggcacacgctgagaagaacaatatgaggaagataatttgtccatgtgctgactttctgacacaagttgaagacatggtgcatgacgatggttctgttgaggacaaaatcgacctagaggaaatgttacgtcatgcagaacccgaggtgctgatggggtcggctaaagggttaaataactttgaagctttacaaaaggcagcaaaggaagttttgtacgatgagtcgaagggttgtgacagtgagttcacaacactccggtcagttcttgaacttatgaggttaaaagtgagacatggatggtctgataccagtttcgacagtctgttagaacttctgcagaaaatgctcccgaggcctaactcactaccatcgagcacatatcaagcaaagaaactcatatgccccctttcacttggtgtggaaaagattcatgcgtgcgtaaatcactgcatactgtacaggaaagagtacgcttctttagatgaatgtccaacatgcagtgcaagccggtacaagtcgaatagcaatactggcctagaaccctctgaagcaactgagggacgacagagaaaaatcccgcagcttgtgatgtggtaccttcctgtcaaagaccgcattaaacagatatactcaaacccgcgagatggaccccgtcagcctggtattgatattgacgtatttcttgaaccattgttggaagatatggctgatttatggaaagagggattgaaagtgtgggacgagtacttaagggaatacttcacagtgaaggccatcatcttcgtgaccattaacgattatccagcaatgttttcagtttcaggtcaaattaaaggtaaaacaggatgtgtgatctgcttgaatggaacgtactataggtatctcccgggttccaacaagcttgtgtacatgtggcaccggcggttcctacgcataaatcacaagtaccgcaagatgaaggcggagttcgatggtactgaagagactgatcctgcaccaaaacctacatcgggagaaaaggtgtgtgcaataacagagaaaattgtttgcgagtttggaaaaatgactaagaaaccatcaaaggggacaaagcgcaagaaacccgagaagaatacaaaacaaggggatagtaagaagcaagatgatagttcgaagccagatgataaactccctcccccattcaagaagcattccatattttttaagtacctcccgtactggaaagatctgaaggttcggcatgccatagacgtcatgcatctagagaagaatgtgtttgacaacatagttggaacattgttggacatgccgaaaaagactaaagatggtctgcaatcaaggatagacctagtcaagatgggaatcagggaagagttacaccctcaagaaggagaaaagaatggcgaagtatatcttccaccagcctgtttcacactgacacctgaggagaagaagtcattttgcaactcactccgtgatgtcagagtgcccataggtttctcatcaaacatcagtcgactagtttcaatgaaaaatttgtcggtatctggttataattcacacgactgccatgtcttgctcatcgtgtttcttgcaattgcaataagggccataaaaccggagcttttaaaggttgctatcacaaggttgtgctactttttcaacgcagtgtcacagaaggtcattagtctcgaagagttaggaaatctacgtacattcgcacatgagacacaataccaacttgagatgtgtttctctccgtcattttttgatatgatggagcacctcattgttcacatagtgccgcagatggttgcgcttggcccattgtacctccatcaaatgtggtcatacgagcgttacatggcggttctaaagggttacgtccgaaatcgtgcacatccagagggatcaatggttgagggttatagtactgaagaggttgtcgagtgttgtatcgattacctcaaagatggatatgcaattggagtacctgtgccccaacacgagggcaggttgagtggcaggggaacgataggaaagaagagattcgtcacccatgatcacaaatcattccaagaagctcacttcagcgtgcttcatcagtttgctatcgttgagccgtacatcaatcaacatatcgaactaatacaagctaacaataagggtcgcaccaccgagtggataatgaaagaacacaagcgtctcttcatagattggttgcgagacctagacttacctgagggacaaactaccgatgaaataactatgaagcggttggcttgtgatccatcaactacagtaaattcttggcagggatatgacattaatggatactcgtttagcacaagagcccaagataataagacctgtacgcaaaacagcggtgtccgtgttttcgcaattgatgaagccggggaaaaacaatcatacttcgggtttattgaagaaatatgggaaatcgactatgggcacacaatgcaaatccctatatttaagtgccagtgggtaaaatacccgaacggggtcaatgttgataagttcggtcttactgttgttgacctggcgagtgtgggtcacaaggatgacccttgggtactcgccaatcgcgtggaacaagtgtttaatgtgaaggacccttcaaatttgaagaaagatatagtgctaccagggaaacaaaagatattgggagtggatggggttgaagatgtcgaagattacaaccaatacgatagtatgccactttatagtcagtttgtacagaagattaagaatgtcgagacatctactcaaaagaccgtgaagccttacatacgcacggacggtgtgggcaaaaatgttaaagggtaa

SEQ ID NO: 37938 - DNA, 360 bp, Oryza sativa
  Clone ID: PAT_MRT4530_4161C.1
atgtccaccagtggctgccgttggagatccttagggacatcagcatttttcgacaaacgtgcagctgaggggcacaacctcgccatcgtcgaggacctcgccgcacgtctcaccattgtccttcttgctcccacccctctctgagccaaggcatacgataaccgggcgatccaccaatgtggccatggggatgtcagggttggccagcgtgaagcggccacctcgtccatgtcaagagcgtcagcaatacgaggaggaggcagccatgatgagaattggcgtccgtggacggtgaattcgaacaccgttctgcctcaagcatgcggcaagctcgccctccctcgagaatgggtttactga

SEQ ID NO: 37939 - DNA, 621 bp, Oryza sativa
  unsure (1)..(621): unsure at all n locations
  Clone ID: PAT_MRT4530_41620C.1
atgtgnacggttgtcgagtgctgtatcgattacctcaaagatggatatgcaattggagtacctgtgccccgacacgagggcagattgagtggcaagggaacgataggaaagaagagattcatcacccatgatcacaaatcattccaagaagctcacttcagcgtccttcatcagtttgctatcgttgagccttacatcgaacaacatatcgaactaatacgagctaacaataaggtaaattcttggcagggatatgacattaatggatactcgtttagtacaagagcccgagataataaaacatgtacacaaaatagcggtgtccgtgtggagtgggtaaaatacccgaacggggtcaatgttgataagttcggccttactgttgttgacctagcgagtgtgggttacaaggatgactcttgggtactcgccaatcgcgtggcacaagtgttttatgtgaaagacccttcaaattttaagaaagatatagtgctacccgggaaacaaaagatattgggagtggatggggttgaagatgtcgaagattacaatcaatatgatagtatgccactttatagtcagtttgtacagaagattaagaatgttgagacatctacttag

SEQ ID NO: 37940 - DNA, 1312 bp, Oryza sativa
  Clone ID: PAT_MRT4530_41621C.1
ccacgcgtccggaggcaaatgatgctgatgagaagagcaaagagagcagcaccccatctcgcatacgcaagctgttgcattctttcagcttcaatgacaaaatgcagcagctgacctgtggaagtccagcaaaaaagaagtcaacagtcattagactatcatacaagagaacatcatgtgatgactatgaagatgacagcgaactgggcgaatcagagaaatatgtggtccgccccaagggagggacaacaattctgtataggggagaaaagcccacatcaggatgttggtcacggattgatccatccctcttcaagctcaggagtgaaaccttcctcaaagacaagaagaaatgtgctgctccaaactatgctgcttattatcctataggtgtggacttgtttgccagccacaagaaggttcaacacattgctcagcacattgagcttccacaagtcaaaccacatgacaagctcccttcacttttaattgttaacatccagatgcccacctatcctgctgctatgttcctcggcgacagtaatggagaaggattgagccttgtcttgtactcaaaaatctcagagtacttcgacaaggaggtttcagagcatttcaaggagtccattatgagatttattgagaatgaaagtgagaaggttaaagggttcgcatcagaatcaacaatcctttatagagaccggttaaagatcatggctggactggttaacccagaggatcttcaattgagttccacagagaggaagcttgtccaagcatataatgagaagccagtcctctcacgaccccaacataatttctttgagggagagaactattttgaggtagaccttgatatacaccgattcagctatattgcaaggaagggattggaatcattccgagaacgcctgaataatggaatccttgacctgggtttgacaattcaggcccagaagcaagatgaactccctgagcaggtcctctgctgcgttaggctgaacaagattgatttcattaaccatgggcaaattccaactatcgtcacattggatgacaagtgacacattcgattgtagcagttgcatgtgtaagctgttggaaggctagaggcctagacccttttgagaacacgaaaagaaagacgcacaaagacaaaaatatgaatcgatgacttatgtacccaacctattcatttctgacaaaaaaaaattcactatgttacctgcttctaagcaggaaattttcatgtagttataataatgaatacaaaagtcagaaatgatatagaattgcttgtcttttattatct

SEQ ID NO: 37941 - DNA, 918 bp, Oryza sativa
  Clone ID: PAT_MRT4530_41622C.1
atggcttgcgcgtgtggttgggtcactgtgttcggctgcccggcactgaacggtgatgtttggtgtgccgccatggatgggtcgaacgaaggttgggtccatgtcatggcgacctggcttgaagctgtgcctgcaaggccgaagccccctccgccattgcttatgacatttgacctggtggtgaagggtgtacttgggcagcgaccgggcgaacctgtggttgcacacgaggggtcggcctgccgaatactggagaattggggccgaagcgaccttggcttgccgggctacttcgtaggcctgctgctgctcttgcatctggcgaagcatggcgccaccagttggcttgtcgaaagaatctccgtcctggtctggagcgcccttgccgccgcagctgccttcgccgcatcaaccgtgttcggcactagcccatccgaagcaggaggagccgaaggtggcggttgcggtgcgggtgccgaggccgatggtgccgcacctacttcgacgatgggcgccgaaggctctgctccctctccggtggcaatctcccctcctgcctcactctcctttcgcttagcaactttctccttcgcgaccttcttcggtggcattcgctctcagtggtttcgctcggaggtccccacggtcggcgccagctgttgtcgaagcgacaactgcatacgtcgaaggacgtggggaatttacatggttgccctcatgagaagggtacctgtatgggcatctggactcgatatggcgaagtcatcctccttcggcatgcacccttcgccatttagtcttcgcccaggatgcatttggacccgcgggacaccagcgtggctcttcacccttcgccgtctttgctccatagtcttcgccagggacttcgccccgatgaacttgacgcctcgagcctga

SEQ ID NO: 37942 - DNA, 507 bp, Oryza sativa
  Clone ID: PAT_MRT4530_41623C.1
atggagtccaccattgacaatatcctgctatacaggggcgtagacagggggtggtcctggtgggctcgggactaccctgattttggcccaggatatccccacccccaaaagcccacaaaccttggttcttattcaagcccagaaaaacaagctcacaaaccttggttcccattcaagcccagaaaaacaagcccacaagagagaaggaaaaaagcgctaggtttggccttctgggagtcaaggcatctgacgaccacgacgccgtctctactcgtcctcgtcgcctctgctacgcgcttgcgccgccgcttcctcgccaccgccgctgccgccgccacttccctagctcgatctacggaggccgaatggcgaagcgctagaggcaccagtccccacgccgcgctgcctgggtgcaggctgcttacgccgctcgccggggctcctcacatggcgccgccaccggccgccggtgccaggagctgggagcccaggaccctggcggcctag

SEQ ID NO: 37943 - DNA, 3036 bp, Oryza sativa
  Clone ID: PAT_MRT4530_41624C.1
atggaaagtcgggaatggatgtatcattggccgaggtttttgtctccatatagaaacgaagtggctaaatttattggtattgccaaggttcacgctgagaagaacaatatgaggaagataatttgtccatgtgctgactgtaagaatgaaatagcctgggactttgacgatgcttttaaagtgaatgagcacttagtaactcgtggatttatggacaagtacgaaatatggacacttcatggcgaagaacaagtggacgggcctgaaaatgtagttccgacacaagttgaagacatggtgcataacgatggttctgttgaggacaaaatcgacctagaggaaatgttacgtcatgcagaactcgaggtgctgatggggttggctagagggctaaataactttgaagctttacagaaggcagcaaaggaagttttgtacgatgagtcgaagggctgtgacagtgagttcacaacactccggtcagttcttgaacttatgaagttaaaggtgagacatggatggtctgataccagtttcgacagtctgttagaacttctgcagaaaatgctaccgaggcctaactcactaccatccagcacatatcaagcaaagaaactcatatgcccccttttacttggtgtggaaaagattcatgcgtgcgtaaatcactgcatactgtacaggaaagagtacgcttctttggatgaatgtccaacatgcggtgcaagccggtacaagtcaaatagcaatactggcctagaaccctctgaagcaattgagggacgacagagaaaaatcccgcagcttgtaatgtggtaccttcctgtcaaagaccgcattaaacaaatatactcaaacccgcgagatgcggaactaatgcgctggcatgaagaagggcgagcatttaaaggttgctatcacaaggttgtgctactttttcaacgcagtgtcatagaagggcagattgagggcaggggaacgataggaaagaagagattcgtcacccatgatcacaaatcattccaagaagctcacttcagcgtgcttcatcagtttgctatcgtcgagccgtacatcgatcaacatatcgaactaatacgagctaacaataagggtcgctccaccgagtggataatgaaagaacacaagcgtctcttcatagattggttgcgagacctagacttacctgagggagaaactaccgatgaaataactatgaagcggttggcttgtggtccatcaactacagtaaattcttggcagggatatgacattaatggatattcgtttagcacaagagcccgagataataagacctgtatgcaaaacagcagtgtccgtgtggagacaattgatgaagccggggaaaaacaatcatacttcgggtttattgaagaaatatgggaaatcgactatgggcacacaatgcaattccccatatttaagtgccagtgggtaaaatacccgaacggggtcaatgttgataagttcggtcttacttttgttgaccttgcgagtatgggtcacaaggatgacccttgggtactcgccaatcgcgtggcacaagtgttttatgtgaaagacccttcaaatttgaagaaagatatagtgctaccagggaaacaaaagatattgggagtggatggagttgaagatgtcgaagattacaaccaatacgatagatatgtgaatttgtcaaattttttagataacatgttggaggatggtgtatccgtacttggggatgcggtcgatcttgtaattctctggcacaagaatgacatatcctttggattgggcactgacgctggggaaaaacctgtgttgcctaaaccggggttgggaaaacctccgaggcctcctaagaggaaggtgactgataaggcggatgatctagagatgcaaaaggaaaatccagtgctggaagtgccaccggatattgcattgccggaggcagccatggagattgcaccgccggagacagccatggagatttcagtgccggatgtgcccatggagattacagtggcagaaccagaggtggaatttgtggcatcggtcgggtcagacaaagaagaagtaccaggattggaatgggacggtacagagccagagatatttgaagacccttctcctgcgaaagaccccgaggtgccacgagtgcttaggagccacgactccaagtccaaagatgcgagcaaggagaagttcatgctaaccgtcttcagagggggtaaggaacgtgccaagctcagagatgacgacccccagaaggcttctgaactagccgggccaacatacttcgcaaccgatgattgcccggaaaagtacgaacatgggaaagcactcttgccggaatgggcactgaaagaagcaccatgggagatgagaaggttacataacttctacatggaggccagcaagaaaggcttgggcaatataacagctcgatcaccggcagattgtttcggcgaagaaggttacgtatggctagatttctcatatctctacgccatatatcgtcgggataagatggatgtcaactacgtcggtgtttggtgcatgatgcaatacatggatgctaagaagaaaaaagaacccatcgacttcttggatccaactcggatctgccaaacacagcataccgtgacgctagcaccagggtcagaccagctgaagggtaagaatccaaaagagatagcagaatacaagaagggcttgcacaaggagaaattgattactgtcgcacagtacattggacgagccttcttgcactttcaaaataagagagtcgtcatggccgcttatcattttaaggttaatggacgatacaggactaacgcggaggatttgccaagattagaatgtcgaacaagttttgacgatacaggtatcacaaatgtgcagcgtgatctgtgccacttcatccaccacgagtgttgtcatgtcaaaagagatttcttcgacccagagggtgtcctagcggcaagtgacgaattcaaggatcttcgggagtggaacactgctatgccataa

SEQ ID NO: 37944 - DNA, 999 bp, Oryza sativa
  Clone ID: PAT_MRT4530_41625C.1
atgacggcggcggcgccatcgtcgcctttggatttgcgtgcggcgatgggtgcgagctcctcccgcaaggcggacacggcgcgtcgagatatggaaagtcgggaatggatgtatcattggccgaggtttttgtctccatatagaaacgaagtgtctaaatttattggtattgccaaggcacacactgagaagaacaatatgaggaagataatttgtccatgtgctgactgtaagaatgaaatagcctgggacttcgacgatgcttttaaagtgaaggagcacatagtaactcttggatttatggacaagtacgaaatatgcacacgtcatggcgaagaacaagtggaggggcctgaaaatgtagttccgacacaagttgaagacatggtgcatgacgatggttctgttgaggacaaaatcgatctagaggaaatgttacgtcatgcagaacccagggtgctgatggggtcggctagaggtttaaataactttgaagctttacaaaaggcagcaaaggaagttttgtacgatgagtcgaagagctgtgacataaattcttggcaagtatatgacattaatggatactcgtttagtacaagagcccgagataataagacctgtacgcaaaacagcggtgtccgtgtggaggcaattgatgaagccggggaaaaacaatcatacttcgagtttattgaagaaatatgggaaatcgactatgggcacacaatgcaattctccatatttaagtgccagtgggtaaaatacccgaacggggtcaatgttgataagttcggtcttactgttgttgacctggcgtgtgtgggtcacaaggatgacccttgggtactcgccaattgtgtggcacaagtgttttgtgtgaaagacccatcaaatttgaagaaagatataatgctacccgggaaacaaaagatgttgggagtggatagggttgaagatgtcgaagattacaatcaatacgatagtatgcccactttatag

SEQ ID NO: 37945 - DNA, 830 bp, Oryza sativa
  Clone ID: PAT_MRT4530_41626C.1
ctgacgataattttcgtgtttgcctgcattctttcgactattctaattatcacctgttctcatgtgaccatggctactatagatacaaccgtagttaacatcaagatcaagttgacaaagttctggaatccaattcggctacctgctacactgctgacttcaagcggccgccaaatttgcatacgagctccgttttgggtccatgagtacttgatggaaagccctccaaatcctctttccaatggatccagtcttgtccccagattccatctcagtcgacggcaatcgtagaaacaaggtgccgcatcggttagatcgccggtttgctcgttacagaatccccaacttatcatttgaactcgattcctatttgcaattcagaatgcttttatcttggtcttgcttgtttcttcgatttgcttgcaagaataaggttcatctgcaccggcaagatcaacaacccacagagaggtgtatcgatcactaaggcgcaacacaacaacgtttaataccggtgtagtggggtcgttaatgtttcttccaaatcgtaattattattaacttaaccaaagaaccggctaaccaccaccttgaattgcttcaagtgaacctcagggtttatcaggtggtatcagagcttttgttgcttgtgtctagtccgtttagagttttgagtttctagtcacgttttgtaccactgccgtcgccgtcgtcatgtgcttgttgtcgtcgagacctacgaaaacggaatcgtctttctgccagggttctatttttctagttttcagaagtttttgctggtcggttttggagatgataagttgcatcta

SEQ ID NO: 37946 - DNA, 525 bp, Oryza sativa
  Clone ID: PAT_MRT4530_41627C.1
atggaggccagatgcaatacatggatactaagaagaaaaaagaaacctatcggcttcttagatccaactcggatctgccaaacacaacataccgtgaggctagcaccagggtctgaccagctgaagggcaagactgcaaaagagataggtgaatacaagaagggcttgcacaaggagaagttgattactatcgcacagtacattggacgagccttcttgcactttcaaaataagagagtcgtcatgtgtcacaagcaaccgcaaggaacggtcctttgtgggtattacgcttgcgaattccttagagttaatgggaggtacaggactaacgcaaaggatatgccaagattagaacgtcgaacaagcgttgaagatacaggcatcagaaatgttcagcgtgatctgtgcgatttcatccaccatgagtgctaccatgtgaaaggagatttcatcgacccagagggtgccctagccacaagtgacgaattcaaggatctttgggagtggaacagtgctatgccataa

SEQ ID NO: 37947 - DNA, 295 bp, Oryza sativa
  Clone ID: PAT_MRT4530_41628C.1
actaagggaacacagctggtagctcggggccgccccttttttttttttttttttgcgagcaacacagttaaaagggtcttggtggcatcatctacattttgcccaactacatggtagagactagagagagatagtattaacaaggagataaagcttgcaagctctgcgcagtgaatggcaaggcgctaccagcaaaaagtctacgacgctacataaaccagttaactgtcagcagcccaagtttttctgctactttgtacataaaccatggatgatcagaggaagatcgggttgg

SEQ ID NO: 37948 - DNA, 465 bp, Oryza sativa
  Clone ID: PAT_MRT4530_41629C.1
atgacgagcttcggtcgtggacgacgaaggaaggaccgacgacgaggttcggccgtggacgacgaaccggccgacgaagccgttcggccgaggacgtcttcgctcgtggacgatgaaaggccgataatgaagccgctcatggacgactgcgagagagggagagagatggcggcggcggctgtggagcggccggcagcggtggagaggtcggcggcgcggtggaggggccggcggggtagcggtcagtggcagcggagcggtggagcggccctcgtgtcggggcacagcactcgacaacctcttcagtactataaccctcaaccattgatccctctggatgtgcacgatttcggacgtaacccttcaaaaccgtcatgtaacgctcgtatgaccacatttgatggaggtgtcagtgtgaaacaggctggtggaagatatactttgccattcttctctccttcttga

SEQ ID NO: 37949 - DNA, 261 bp, Oryza sativa
  Clone ID: PAT_MRT4530_4162C.1
atgggcttggggagtggcggtggcctcgggctaggcggatccaccacccgcgtctacgggactggtggatccgctgttgggaggccgaggacggcggaagcaatggcttcaagtagtcgcaacgaccatgctagcggtgggcttcatgcgacagtggtgaccatggaagaggggattcgttgcttacggccatgggagcgtcgaatccgtcggcggtgcagttatgacacctacccaatcgtaatctttacagacaactaa

SEQ ID NO: 37950 - DNA, 294 bp, Oryza sativa
  Clone ID: PAT_MRT4530_41630C.1
gcacgaggggcaaactgctcataataccctaatttctatatcttggggtattgtcaccaccagcagcacccctctatgagcatctcatagagtggtgcaagtgaggaaagccccccctcaaatgtgaggcttcttctctcttgtctcagcacattatattgttgtggaggcagtggtatgtgtttcttgctttctggttttcttctcagcggggttcttccttgagctgctggctctgatgtgcttttgaagggcctagctaatgaagaggcatggtagaaatcaaaggaggtg

SEQ ID NO: 37951 - DNA, 228 bp, Oryza sativa
  Clone ID: PAT_MRT4530_41631C.1
tttgttgggtattcacagggggtgtattttcaaaaaataatagtgtggtattatcttgtttacataaaacagttgataaattatcattaataaaggagcgataagagatgcacatacgcaaactaccttggctaacctaaaatgacaccataaaaatgggcaggacaccatggatctgtagagtaatcatgatcacagttaactcttggcatatatgatggccagtat

SEQ ID NO: 37952 - DNA, 270 bp, Oryza sativa
  Clone ID: PAT_MRT4530_41632C.1
ccaactaaataagaaaacccttgtcccctaaaaaaataaagggaggggagagagctaaaataaatagcaaacaaaattgggtacaaaaaaataattatgggaagcggaaaaggggaaaaataaaggaaaaaaagctggctaatagatcaatcgaaacccggccaagagggagggggttagctataaaaaagggagaaaacgttagaggactcaatcgaacatgacctagaaagccccttccaagggggggaaggaaaaaaaaaaaacaaa

SEQ ID NO: 37953 - DNA, 540 bp, Oryza sativa
  unsure (1)..(540): unsure at all n locations
  Clone ID: PAT_MRT4530_41633C.1
tatcagcttatgaatattggagcatcggatctagcaggtggaggtggggtggcggaggaggaggcgactggcggtcgggggagaggcgccggatctgtgtcccccaaacgtgtcgaggccatcggtcgttaggcgggggaggtggctgcggccggcggtcaggacgcggaggaggaagtggatccggcggctggcggtcggaaggcgggggaggcagcgccggccggcggtcgggagacagaggaggaagtggctggcggtggggggagagcccgcggtggccggatccgcgcctcgtaagccagatccggtggccggcggtcgaaaggcggccgggtatgcagtgccggccggcggtcgggaggcggtcggggtaggcagtgccggccggcggtcgggaggcggaggaggaagcgggggtggcggtgtgggggggggagggagccaaggggggcgcgcagttgcgggacggggggggtaggnggtggaggaggtaggggaaggggggggaggggggccgaacccctctaatcgccgttg

SEQ ID NO: 37954 - DNA, 1008 bp, Oryza sativa
  Clone ID: PAT_MRT4530_41634C.1
ctcctccaacccctccccaccactcatttccccacacttatcttctcaactctctctctccctccctccactggattctcagctccccatcccctcccctcccttcccctctctccctccaccggcggcggcggcgccgcttcctcctccgcctcccgaccgccggccggcactgcctaccccgaccgcctcccgaccgccggccggcactgcatacccggccgcctttcgaccgccggccaccggatctggcttacgaggcgcggatccggccaccgcgggctctccccccaccgccagccacttcctcctctgtctcccgaccgccggccggcgctgcctcccccgccttccgaccgccagccgccggatctggcctatagggcgcagatctggccaccgcggcttctccctccacccccggccgcttcctcctacgcctcccgatcgcaggccggcgccgcctcccccccgccttgcggccgccggccgccggatctggcctacagggcgcgaatttggccaccgcggcctctgccccaaccgccggccacttcctcctccgcgtcctgaccgccggccgcagccacctcccccgccggtcgcccgttgcccgcgccacgggtggccgtcaccgatccggcgcctctcccccgaccgccagtcgcctcctcctccgccaccccacctccacctgctagatccgacggcagcctcctccaccgcaccaccaaccgttggatccggcggcctctaccaccgaccgccggtgtcgtccaccgtctccttcacccgctagtccgccaccatttccaactcttgtaggttgagcaaattttcgttgccaaatttcagattgggttatactcatggttgcttgtgtggatttgtagtttattactaaatgttgtctggatttgtgatatatattacttgtgtggatgtgcttcatgtgtcaacatatctatcaataaaatgcaaagttattgtgtcaaaaaaaaaaaaaaa

SEQ ID NO: 37955 - DNA, 296 bp, Oryza sativa
  Clone ID: PAT_MRT4530_41635C.1
actcggatcatgttgaacgaggttcaactgacaaactagcatgatgttggaaaaggactaactgagattatcaccaccctctggcactgcacaatagttggatatcaacaccggatctcgctgtaaaacagatacatctgctatcatagagcacgtgtattactagcactgagtttctattataacacgacaattactagcactgagtttgtatctaaagattactattatccaccatcgccattgactaaagatacaccatgattaccatgctatcgaacatattaaatcacatg

SEQ ID NO: 37956 - DNA, 501 bp, Oryza sativa
  Clone ID: PAT_MRT4530_41636C.1
atgggcagcggccttcgtttctctggtaccccaggaggcaacctggtggcacctttgaccacaggtttggaggatggaattaggcacaacgtgatgcatatgacttcagtggagcaattttatcaggattgcagctatcaagttgctttcttgtgtgcttttgatgaagtcgcagacttttatcggtcccagcttatcacaagtgaaactcgacgtggcatagttgttgccacggcattggaggttgataaagcttcaaattgcctatccaccatagctgcaatgacaatgatgtttttgcacaatcgtgactaccagcggtatgctttgttggaagaagtgagaaactccttgttgaaagaaccaaccctgcatgacgccattaagattgttgtgacctataggaagcaagagctactgcaattgaaagaacaaaacaacgatccagcaaagccagaagtggtgatagttgaagatgatgaagtggtgtataaactttag

SEQ ID NO: 37957 - DNA, 429 bp, Oryza sativa
  Clone ID: PAT_MRT4530_41637C.1
atgtcaacttggatagctgacgaggacgctgccctcctcttgtctgagtccatccggttaaacccatgcggctgcaccaccggcgccacgggcaccgggtacatgtccgtgacctctccggcgaaccccagcaatgccgcaggtgcaccggcgacgagcagcggctccgtgtcagcgacgcccctctgctcggtgtcgtgtcgccgctcatctgtgctaggacagctgctcctcgaagattacatgactggtcatgataatgatgaatttgatgatgaatcaatttcaaacacagaaacaaccaaattgtatggccatgaagaagttgtgacctggtttgctcggccattcaagggaaaaaatattgttgaaagtgaccatagtcctatacctagtttgcttgatcctattgtcacactttttgcttga

SEQ ID NO: 37958 - DNA, 123 bp, Oryza sativa
  unsure (1)..(123): unsure at all n locations
  Clone ID: PAT_MRT4530_41638C.1
tgtgaaccatggtgcatgtgaaccatggtgcatgtgaaccactgatnnntttgacttcagctatgntggaaccattgtatgagggatatcggaaccacatgctatcaattatgctacatgctg

SEQ ID NO: 37959 - DNA, 764 bp, Oryza sativa
  Clone ID: PAT_MRT4530_41639C.1
gaggatactgaattcactaaaagtcactcacctcatcagatctgcacagaattcagttaccatgaagctgggtgccttccttttcgtcctgctggttttcatcaacctctgcaccggcatgccgagaaatatggcgaaggatggatatcacaaaacggatttgggactgaaggtgatgcgtaatttgatgtctggaacagatggaagaactggacctcctagcaatgatcaccagtgcccacttggaacctaccctaactgccaaggagtttctcagagcaatcaacgaacagagcaagatgttggaggaaattgatcaaatttactacacaggtgatgcatgaacatatgtatgagaggactattatttgtattttcttgcaatgtagacgagacttggatcgagcacgtatgtatagtacgtgtaacagtaatataaaattagtatgtcaaagctccaaatgttataattatgtcgttgcttccttctacagtagaaatcaataagatgtactgcagttcatcaacacgagtaaatctctactgtgtggcttgccaccttgtaaaatatcgtccatgttcatgtatatgttatgaaactattatctcctaccagagataaatatgagctcataccaaatatatggaaacgtatcctaataggactcttcctattatgggtatatatactgagatagagggtttgagaggttggttgatgtatccacatatgagaaagcaataaagctgtgatgcctctctct

SEQ ID NO: 37960 - DNA, 388 bp, Oryza sativa
  Clone ID: PAT_MRT4530_4163C.1
gtctcaagagtcaagccggccttgccggcaacggcaagcagcatcgcgccgtacgcccccctcccctcactttccccaacctccctctcgcctccctccccgtcggcgaccaccaccaccatggccgcctctcctccgctcgcgctcctcaccctcaccctctccctcgccctcgccctcgcctccgccggcctcgtcctggacgacggctacaccgtcaccaccgccgccgacctcaaccacccggtctccgccgcgccccacccctacgcgctcctccctcgcccgcgcgccggggacctcgtcctgctcgactccgcggcctccgcgctctacaccctcgccctcccgctctccgggggcgccgccgcgcggaagcctcgcggcg

SEQ ID NO: 37961 - DNA, 289 bp, Oryza sativa
  unsure (1)..(289): unsure at all n locations
  Clone ID: PAT_MRT4530_41640C.1
gttgccatgaccgactcgaaatacgctgtggcactccgattggcatctgatttggactcgtcccaacccttcccaatttccccctcctcgcctatataagggagccactacggtggcagatcccacgaagaagagaggaatagaggcttgacaacaccacgcccacgaagaagagaggaatagaggtttgacaacaccacgncgactatgggaggccgtgtccctctgccttgcatcgccctgaagcatggcgccgactcagacaagccggcgtgaccaacagcaacgc

SEQ ID NO: 37962 - DNA, 565 bp, Oryza sativa
  Clone ID: PAT_MRT4530_41641C.1
agaagtctgatctcatcattgttgatactagcgggcgccacaagcaagaggcagaaggtggaggagagcgcggatgggaacgggtgcaagcattgcgcctgcaagaagtcgagatgcttgaagctctattgcccatgctttgctggtggaggttattgttctgaaaagtgtggatgccaaccatgcttcaacaaggccttatatgcagaaacagttcagaccactcgcaaggtgcttctttcacggcagaaacggatgtcactgaaaattaatcgaagatctgaggcaaatgcggaagctgtggaagatgctcatcattcttcttcttcaactccgcctaggcgaggttgcaattgcaagaaatcaagttgcctaaagaaatactgtgattgctaccaggatgggactggttgctctttgttttgccgatgtgaggactgcaggaatcctttcgggaaaaatgaacctcctttcatgcttgtaattgaaaactcccttaaaaatggagtttgtatcatatagcatagaagttagggtataaagtagcaaattgaaatatgcaagc

SEQ ID NO: 37963 - DNA, 369 bp, Oryza sativa
  Clone ID: PAT_MRT4530_41642C.1
ccactaatgctctgatttatttccacataattactaaaattctcctacgcttatatggacagctatcaactttattcagtgacaaatatattatttataattgttcagataacaatacatactcattaaattgttatatctataaaatggaatatcctatagtaattaagatgacttctccttttctatatttagtgctcttgaatttttataccatctttaaaaaaaagcaaaaaagcaaacaaactcctctttcataattgaaatagtcctctgaggtctttttagcccctacctggatactttccaaaacacttaggatactttccaccgtcctaagtcaaatgcaagtcatcatttccaggtagg

SEQ ID NO: 37964 - DNA, 1477 bp, Oryza sativa
  Clone ID: PAT_MRT4530_41643C.1
cacagatgtacaccctgtaggtgcataactcatttattattataaccggttaccaaagttcgcatctgctgctagctctctacaaagaaaagatgacggaaatttgggatacaactcagtatacaagaagagcctaagatcctgcacattttcaaccgaccagcaggacatgcatagcctaaatggattgatgatccaatggtgtctccaatctcagcctccaaaacaacactaaggtgacaaatggcatgccctaagtcaggttctggatcttgcgtttcagccacagggcccggacgtcaccgttaagcgagatgaatatttcccggttccccgcctggaggaacacatcgggggcaaccgatttctccacctgagatagctcggccatgccgttgaggatctggacgcatctcgatatgctgtagctgtcctctggcttggccaactgccagtcgtgattcgagttcttgtactcccctgagtcgtcgatcacccggtcgttgctctgcctcttggagcaatgccatgagcggggctgccactgcgatatcgcctgcgggaacatgtgtgtatctctgttcgtggctctgatatgcgggggagtttgctggaaggaggactcttttgagattggtgactgcaggcgaggtgaacgttccacgataaagtcttgttcatcctcactgtggtccaggtctgcgccagtgtataaaaagcgcttactttcttctgccattatgccttcatttttcccgaaaggattcctgcagtcctcacatcggcaaaacaaagagcaaccagtcccatcctggtagcaatcacagtatttctttaggcaacttgatttcttgcaattgcaacctcgcctaggcggagttgaagaagaagaatgatgagcatcttctgtagcaccagctttttcagttaagaaaacaaccacagcttccgcatttgcctcagatcttcgattaattttcagtgacatccgtttctgccgtgaaagaagcaccttgcgagtggtctgaactgtttctgcatataaggccttgttgaagcatggttggcatccacacttttcagaacaataacctccaccagcaaagcatgggcaatagagcttcaagcatctcgacttcttgcagggggatcctctagagtcgaccccatccgcgctctcctccaccttctgccgacttgggggtgggagtgagcgccagctggttcatgctacagggctccgcctctgccaccaccacggccaccggctgcgggggcaggggctccacggcgcccgccgccggtggtagcggcgggggcggagggggcgggaccggcacctgcaccggcggcggcggtggcgccgccgccaccggagacggcggcttgacggagatcggggtggcctccatggcgagggagggcgaagaaggggagagacaagagaaggagcctcgtgccgaattcctgcagcccg

SEQ ID NO: 37965 - DNA, 567 bp, Oryza sativa
  Clone ID: PAT_MRT4530_41644C.1
atgcccgagctcccacaccgcctccgctgcctgctcctttggctccggagcccaccttcctcctcctctgccggtgccttctcgtcggccccctcccgaggctgcccgctccacgccgcgctgtcccagcgctgtgcgcccgcggtcgcctccctcgccctctactaccgcatccgcgaggcctcgccgcccaccccgttcaccttctccctcctcctcgccgccctcgcgtcgtcgtctttcccgccccttccccatccacaggctttgcgcgcctcgcccacgagcatgcattcaagtgcgatgcgctcgcgcaccccacctgatggagccatggagatcgccgaagtctgtgatgactgtgcttgtgcgcgtgcaatggaagttcaccagcaagaggaatatgtagtggcggggaggaggagaccgtgtcggcgacggagagggaaagggaaggcgtgcgcaggaacgggaccctgtcgttaccaactccctcctcaagctctaccgctcgccggagagggggatgaagtcaggaacggaaatgaggaaggagggaggggatga

SEQ ID NO: 37966 - DNA, 304 bp, Oryza sativa
  Clone ID: PAT_MRT4530_41645C.1
tgacggaatttgatcttcggtatgatctaccgaaggcgatcaaggggcagactatagtcgattttattgttgatcatcgtgatgattcaatcggctcggctgagtatgaagcggttctcaaagggttgcaattactcaaggaagttgaagccgatgctgttgagattatgggtgattccttgctgcatgtatctcgagaacagaatgttgaagctaatgatttggcccaaggggcatcgggatataagccgatgatgaaggatgtcaaagtagaagttgccacattaacagccgatgattggag

SEQ ID NO: 37967 - DNA, 1259 bp, Oryza sativa
  Clone ID: PAT_MRT4530_41646C.1
atggccgccgccagcgtcaccttcgtcagcacgctttttcgcttcagagagaaactttatcgtcaggagaataaccggatactactgttaacaggatcgtcgatagcatgggccgcgtgccttggacgatacacggcatgctacaaagtttgcagtcctgatcttgcaacatatgtggtgtacggttggctacgcacgcgcatcatgccatataacaggcacgttgtttccgatatcactgacacgatcttcatggacatggacttcatcgctgactggatccagatccagatatgcataatagggattcatggctttcaaagcttatctcctacgcttcagaaatggatcagtcagaacatcaccgaccggcttgccttcgtcgccgccgactggtgtctccgcctacacggctggcctattatgccaccgttgttgggcgtctacgtcttcaccgaccggcttgccttcgccgctgccgactggtgtttctgcctgcacggctggcctattatgccgccgttgttgggcgtctacgtcttcaccgaccggctgccttcatctgctgccgactggtgtctccgcctgcacggctggcctattatgccgccgttgttgggcatctacgtcttcaccgaccggctgccttcgtctgccaccgactggtgtctccgcctgcacggctggcctattatgctgccgttgttgagcgtctacgtcttcaacgaccggcttgccttcgtcgctgccgactggtgtctccgcctgcacggccggcctattatgccgccgttgttgggcatctacgtcttcaccgaccggccgcctcgtctgctgtcgactggtgtctccgcctgcacggctagcctattatgccgccgttgttgggcgtctacgtcttcaccgaccggccgcctcgtccgccgccgactggtgtttacccctgcacggcgggcctattatgctgccgttgttgggtgtctacgtcttcaccgaccggccgcctcgtccgccgccgactggtgtttccgcctgcacggttggcctattatgccgccgttgttgggcgtctacgtcttcaccgaccggccgcctcgtccaccgtcgactgatgtttccgcctgcacagctggcttgttatgacgccaactgatgctatcttctttacggctggctacgtcgccgtcaccgctaataggcgtcatcatcttcaacgcaagctgtctacgtctactgccgactagtttcttcacttccat

SEQ ID NO: 37968 - DNA, 1737 bp, Oryza sativa
  Clone ID: PAT_MRT4530_41647C.1
atggctggtgtattcattgccattgatggacgactttgttcccacattggccgcctcggccatcaccaagggaaagaccagaaagctaagatccagatccagatatgcataatagggattcatggctttcaaagcttatctcctaggcttcaggaatggatcagtcagaacatcaccgaccggcttgccttcgtcgccgccgactggtgtctccgcctacaaggctggcctattatgccgccattgttgggcgtctacgtctttaccgaccggcttgcctcctccgccgccgactggtgtctccgcctgcacggctggcctattatgccaccgttgttgggcatctacgtcttcaccgaccggcttgcctccgctgccgccgactggtgtttccgcctgcacggcaagcctattatgccgccgttgttaggcgtctacgtcttcaccaaccggccacctcgtccgccgtcgactggcttgcctctgccgccgccgactggtgtctccgcctgcacggctggcctattatgccgccgttgttgggcgtctacgtcttcaccgacaggcttgcctctgccgccgccgactggtgtctccgcctgcatggctagcctattatgccgccatttttgggcgtctacgtcttcaccaaccggccacctcgtccgccgtcgactggtgtctccgcctgcacggctggcctattatgccaccgttgttgggcatctacgtcttcaccaaccggattgcctctgccaccgccgctggtgtctccgcctgcacggatggcctattatgccgccgttgttgggcgtctacgtcttcaccaccggcttgcctccgccgccgccgactggtgtctccgcctgcacggctgccctattatgccgccgttgttgggcgtctaggtcttcaccaccggcttgcctccgccgccgccgctggtgtctccgcctgcacggctgccctattatgccgtcgttgttgggcgtctacgtcttcaccaccggcttgcctccgccgccgctgctgctgtctccgcctgcacggctgccctattatgccgccgttgttgggcgtctatgtcttcaccaccggcttgcctccgccgccgccgcttgtgtctccgcctacacggctgccctattatgctgccgttgttgggcgtctacgtcttcaccaccggctttcctccgccgccgccggttggtgtctccgcctgcacggctagcctattatgccgctgttgttgggcgtctacgtcttcaccgaccggtttgcctcctccgtcgccgactggtgtctccgcctgcacggctggcctattatgccaccattgttgggcatctacgtctttaccgaccggcgtgcctccgctgccgccgactggtgtctccacctgcacggctggcctattatgccgccgttgttcgacgtctacgtcttcaccgaccggccacctcgtccaccgtggactggtgtctctgcctacacggctggtctattatgccatcgttgttggacgtctatatcatcatcgaccggttgcctcgtatgactccaactggtgctatcgttttcacggctggccacgtcgccgccgccactaataggcatcgtcatcttcaacagcagacgttccacttcagtaactcttattatttcaccggcaattttggtttctccacgccgctacaatctactccaaatctctcaattctcaagtttgaaatttaa

SEQ ID NO: 37969 - DNA, 130 bp, Oryza sativa
  Clone ID: PAT_MRT4530_41648C.1
gtccgattcccggtcgacccaccgtcggttatctaattcagtataatgcttaacctgtatcttctttgctgagtcaaggattacatgttaattgcagtgtaactaatgtggatgtcaatcggatggatgg

SEQ ID NO: 37970 - DNA, 150 bp, Oryza sativa
  unsure (1)..(150): unsure at all n locations
  Clone ID: PAT_MRT4530_4164C.1
tccggnattcccggtcgacccacgcgtccgcaactcgtcacgcaatggcgtacaggagagcctgctgcggcgcctctgcatctgatcgaggcgggggagacactgattgtcgccaatactacaccgtcttttgaggacagaattgacgcg

SEQ ID NO: 37971 - DNA, 443 bp, Oryza sativa
  Clone ID: PAT_MRT4530_41650C.1
gtgtttgattcttattctatgatgaacaattggcatatgaaattattggttttgatatttggagattattggcgaagtagttttggagatgattggatttgtaggtgatggacaggtactgctgaatgtttggtccggtcaaaccggctgggtaaggccggtcagaccagtggtatgcggccaagagaagtaataaagttgtcatctattttgagagttctttgatttgtatttgctcgggttcgacagtccaactgacgagtcaccgacggtcagaccgacgggttcgcaccggtcagaccggcggcggtgataagaggaagaggcaatttcggcaaggttagaatgggcaatctatactggtcagaccggcggcataggcacagccagaccagcagatctatttcggttagaccgattgacatcgattcaagggtatattt

SEQ ID NO: 37972 - DNA, 2283 bp, Oryza sativa
  Clone ID: PAT_MRT4530_41652C.1
cccacgcgtccgcccacggtccagcgagagagccgtctccctcttatactcaaccgcttctcccctcacctccccccgtgatctgaccgccggcgacgaccccgtcgctccacccgccgcccccccccgcgccggccaccatgacgtagcgtcacgaccgcgacttcgacgactccgctgacggagaaggagagcgagggcctgatgggttctggacctgtggggatcgctggtggagggggtggtaatgtcatgtatgaacttgttcgagttgttgatgatatcgctattggggaagttattggggaaactgctggtctgagggtgatccacgttcatgagagaacacgtgggttgatggcgattgagttggtgttgagtactctagagcttcattcagttgaagcttcacctagtttccatggatatatcttttatctcgggaaatgcgttctataaactattgctctacagttcctgcatgtgtacaaactacgtggtggtatattaaccccgcaagactacgatctgttgtgataatcacgggtggagatctatatgctattgtcaatgaaaatactttgatgaaacacaaggttgctcttccacctggcgctatggggaaaataagttacatcgccccagctggtcaatatagcctgcaggatacagtgctagaattggaatttcagggtatcaacatggcctgtccggtcaccaaggcctgtttcatcaaagcttgctgctgacacgcctcttctaacaggacagcgtgtacttgatgcactatttccctcagttcttggaggaacttgtgctattcctggagcatttggttgtggaaaaactgtcattagtcaggcactttcaaagtactccaattctgaagctgtggtttatgtgggctgcggggaaagaggaaacgagatggctgaggtccttatggacttcccacaattgacaatgacattgcctgatggacgtgaagagtctgtcatgaaaagaactacacttgttgctaacacatccaacatgcctgttgctgctcgtgaagcctccatttatacaggaattacaattgctgaatacttccgtgacatgggctataatgtcagtatgatggctgattctacttctcggtgggctgaagctttgcgtgagatttcaggacgtctggctgaaatgcctgcggatagtggttaccctgcatatttggctgcacgtttggcatccttttacgaacgtgctggtaaggtgaaatgtctcggcagtccagatcggacaggcagtgtcacaattgttggtgctgtctctccacctggaggtgatttttcagatcctgttacctctgcaactcttagtattgtgcaggtcttttggggattggataagaagctggctcaaagaaagcatttcccatctgtcaattggctcatctcttactcaaaatactcaaaggctctggaatccttctatgagaagtttgatcaagatttcattgatattagaacaaaagctcgtgaagtgttacagagagaggacgatctaaatgaaattgtccagcttgttggtaaagatgcactggcagaatctgataagattacattggaaacagccaagctactaagggaagattacttggcacagaatgcatttaccccatatgacaagttctgtccattctacaagtctgtttggatgatgcgcaacattattcatttcaatacattagcaaatcaggctgtggagcgtgcagctaatgctgatggacaaaaaataacatacagtgtcataaagcatcgtatgggtgatctattttatcgcctagtatctcaaaagtttgaggaccctgcagagggtgaagatgtcctagtcgcaaaattccagaaattgtatgatgacctcacaaccggattccgcaacctagaagatgaagctaggtgaagtgctgtaaattgaggatcacattcgtgtaaacaataaaatatcaccagatattcgaagcgagttggggcaatttattttgcttcgcgtgaggttgtagatgtgaattacgtttcagaatcatcatattttccttctgcatcgacactgctgctgctttttgtagcttcctgtttgacctccggtgctcgatgaaggcattctttttggtgtacaattatttatattgtaagatacctgtgcacatgttgatagttgaataagcacgatgaccatctacttgaacatcatatatttttctcccatcaaaaacttacttcctgtctagttccctcgtgc

SEQ ID NO: 37973 - DNA, 442 bp, Oryza sativa
  Clone ID: PAT_MRT4530_41653C.1
cgatttggtgaagtcagtttcttgtgtggactaccaatgtccccagagtacagaaaccaattatcaaaggtgttcaaatggagagaccgaatcaaatcagcctgtgagtcaaaatgaattagaagatcaccatcaggttccaattacagccagcagttcaacaaataacagtactgatctggcaacagaacaacagaaattgtcttgctcaggagatgaagatacaaaggattcttccaatagtattgcttgtgaagcaattattgatgttaatacagtgccagttacttgctctgtttcctcagtatatgagataggaaagggcatcagagtaatcaacctcaatgaagctgacaaccttgtggatgtagatataaatagtagtgaggtgaactctggtacaatagatcttatctcgcacaccacagctactctacacaaa

SEQ ID NO: 37974 - DNA, 423 bp, Oryza sativa
  Clone ID: PAT_MRT4530_41654C.1
cggacgcgtgggttttttttttttatgaaaagataatttcattactaagttttagcccgatatacattaatacatatacatataaactcgtagttaacaagggtgatcgaaggaactatcttcaggcaaggcaaccccataaactaagaagaaaataattttaatggactcaagacatgaacaatacccactgctatcccaaggagatttatgatctgtagaatttgtttgagtaattcacttaaaacaggctggagcgagaaggttatgcaccaatcgtgtacatccatacctcatcaatactatcattgtcctcttcatcattatccatgtgctttcgcttgcgtggataatcaccttgaagctccccgactagcgtggactccgatcaatcgaggtcgcgaaaagggacggtaaccccat

SEQ ID NO: 37975 - DNA, 471 bp, Oryza sativa
  Clone ID: PAT_MRT4530_41655C.1
tcatcctcccgatctccccttctctctcccttttttgttcatgagccccagttcgccatgccccatgccgccgtcatcgagcagccagctctccagcatcgagaacgccggcgcgggcttggcgccgccagtggccatcttgctgatctccgtcgagccctctggcgtctgggcagtcgccgccgccatagccaatccggcctccacctgctgcaaatgtcttaaggggaagatggcgacccccttctccgagcgacggtcggcgaccacagcggcaccacgccgcccctctcctccttcctgcctccgctcatgaatgtagccaatccccttggttgagctcggagaagatagaatcagcgccgccactctccctcccgttgccgccactccggacgccgcctgctgttgccggcccctcaggcttggtgtagtagggaaacggtgtagttctatggtatgctcgtccat

SEQ ID NO: 37976 - DNA, 342 bp, Oryza sativa
  Clone ID: PAT_MRT4530_41656C.1
cttttgctcgctcaaccacccgtcggccggcgatgctccggccgtctacgccgacgcggcgcctcctccagagcgtcggcggtgggagcaaccccaaccggatccctggcatcccgcccgccgatcccccctccggcggcgtcagctccgatgtcgtcgtcatcctcgccgccctcctctgcgccctcatctgcgtcgtcggcctcgccgccgtcgcccgctgcgcccgtaaccgccgcaacagcggcggagccggcgccggcgccggctccgactccccgtcgcacagaccggcccacgcggggcacttccgcggaggaaggagcggaagtggcggcgtaa

SEQ ID NO: 37977 - DNA, 450 bp, Oryza sativa
  unsure (1)..(450): unsure at all n locations
  Clone ID: PAT_MRT4530_41657C.1
gggatccccaaggncgagtccattgttcgccaacccgtttcatgcacgaaaaagtacgccgtcagcgacaccccggaggcgccgctggtggtggccacccccatgaaggtcacctccttcagcatntccagcaagcactagcatctcgcctttntgctacgacatttggcgggtttgtcgtccgtcccatatgttgtcttgtaacactcactacagatgaaccgtgtgccctttggtttgcctttaacctctcttcttttcttttcttttttacctttgtttttttacattatataagtacgatgatgatcatcatcaattcagcatcatcgtctatgggttgtgcttttgtttttcaagtacgatgataatcatcatcgtcatgagttgtgcccaggtttctatgtactccatatattgtagtattgacgaaaaaaaaaaaaaaaaaaa

SEQ ID NO: 37978 - DNA, 319 bp, Oryza sativa
  Clone ID: PAT_MRT4530_41658C.1
gggatagaatttccaaaacatgggaggcattcattttttcttctgaaagaggagtaacatctttccttctttcaccatgacatacgcttaagcaattacagataacaaatcctcctcctgctctaggagaaatattcaaacacaatacccttatgaggcctcaccattaggaaagtagcgtgcatgggcataaatggcagtggggggtaggttaagagtcacaatgctgggcagcgaggaaacaaaacaccatattgggacagagcaaaagccttccgatgggagcttttagggagaagggtttctcccattgaggggc

SEQ ID NO: 37979 - DNA, 387 bp, Oryza sativa
  Clone ID: PAT_MRT4530_41659C.1
atggggggccagattggtataaagaatattctcaatggatcattaagcaagatcattactgttgctctagaaaaccccaatccttctcaatccaatatgctgtcggaaaatcttgccatggctaagggcatgtttggcatagctccagctcctgctccatccctcctagatctggagctcaaccaaacagtttcagctccaccaaaactgggagtggagctagggtatcctctagacttccgctctacaagttacatctctagagctatgggtttgtttggaaagttagactacttgcaggaggttgatgctatccctggtcgtgttctgttgcaggcatattttgatggtgttgatttggtccaaggaagaattgttcttaaatag

SEQ ID NO: 37980 - DNA, 2760 bp, Oryza sativa
  Clone ID: PAT_MRT4530_4165C.1
atgggcaatattgaacaacttaatggaagtaattatgcttcatggaaggagaagctggaaattactctagctctgttggatattgattacgccctccataataatcctttgattgagcctagaccggaaaatgagaattatgagacccttaaaaaggaatatgatgaagtaaaggcaaaatgggatatttcaaaccgtaaattccttatgattatcaagagctccattattgacgcaataagaggagcagtcccagagactcagacagccagagaatatcttgctaaagttgaggaacagtttaaaggctcttctaaagtttatgccaccactcttattaaaagattggtcaatgaaaaatatgattttactggaaatctgagggaacatgttatgaagaaatgtcacgtggcctttaagcttaaatcaatggaaatgaaaatctccgaaggtttacttgtccatttcattatgtcatctctgccccaggaattttctccgtttacgatcgattataatgcaatgaagatcaagtggggcattgatgaattaatagccatgtgtgtgcaagaagaggaaaggcttaaggcagaaagagttgatcatgcgaatctatttaaacactccgagaagaaaagatgtataattatgcatgataataaagaggttggtctcgccgatgggcaggaacaactttatcaaatctccgtgtgcgatgccacctataatgttgactcctccttaaatgcaaatgtcagtaccaaacgaaaacataacgataatgagacttcttcgaaattatggcactatcgtttgggccatatttcgagggggagaattgagcgtctcattaaagaaaacatcctctatcctttggacttctcggatgcagacattgatcactgcattgattgcatcaaaggaaaatattcaaagcaaatcaagaaaggtgcaaatcgaagtatgggagttttggaaatcatccacacagacatatgtggtccatttaatgaaaatggcattaaggcccagtactcagcaccgagcgaaccccagcaaaatggagtagctgaaaggcgtaatcgcactcttatggatatgtttacaaagtttattgagacaagacacgatgtgttcttggaaaatgacataatcaaggggagtatgacacccagagaagttgttctggaagagaaactgaattacgttccaatgcctctaattgaagaacccgttttctcaacacatactcgtgttacaccttcaatagaaagaaataatgatgcaacatctgctgaagctcctgcaactacttctagtagtatatcaaatgatgagaataatgaggatactcagcagccccaagttgtgatagatgagcaaaataacgaacccgtcagaagatcacaacgagttagaaagtcagcaattccaagtgactatgttacttacatgaataaagaggtgaatgaacctatgagtgaagaggtgaatgagcctatattagacattgatcccatctcatttaaagaagcaatgaagagtgaacattcgtctgaatggttaaatgctatgaaagacgaaatgaagtccatgagtactaataaagtctgggacttaatagaaattcccgaaggagccaaaacagttggctgcaaatgggtctataagactaaacgtgaccctaagggaaatatcgaaagaattattatggcactagttgcccattatgatttggaattataccaaatggatgttaagacggcattcctgaacggtgatttatatgaagatgtatacatggcacaaccagaaggttttgttactaaaggaaaagaacatatgggatgtcatctaaacaaatcaatttatggactaaagcaagcatcaaggcagtggtatctaaagtttgaccaaatcataagacaatttggttttaaagagaataaaaaggataattgtatatacgctaactttaaggagacctcgcctgctcctataatgaagggtgataagtatgaaaaattccaatgtcctaagaatgagtatgaagctgcacagatgaagtcaataccatatgcttcagctgttggaagcataatgtatgcacaagtgtgcactcgccctgacttagcatttgttaccgggatgcttggcagatatcaatctaatccaggtctagagcactggaaattagctaagaagaccttacgttatctacaaggcactaaagacctcatgctcacatatagaaagtctaaaaaccttgaagttgttggttgttcggactctgatcttgcagggtgtgttgatgataagaaatccacgtcaggttacattttcacccttgcaaggggagctatatcatggaaaagctccgaacaaagagttactgcatcgtcgacaatgcaggctgagtatgtggcatgttatgaagctactggacaggcaatatggctgaagaattttatcctgggattgagagtggtcgacagtatatcaaaaccactcaaattatactgtgataacaaaccagcagtatactatgcgagtagcaacaaatcaagtgcttctgccaagtacattgatatcaagtaccatgttgtgaaagaaatgattcaggatcagacaataagcgttgaatatataaacactaagttgatgttagcggatccactcacaaaaggcctaacacccgttgtatttaaagagcatgttgccggcatgggtttggtagaaaagcctttgatcctggaataa

SEQ ID NO: 37981 - DNA, 204 bp, Oryza sativa
  Clone ID: PAT_MRT4530_41660C.1
ggaaaccacctcgttacttttctcgaattaggacatgctgacactggtcgcatggattacaggctgcaagcgtgaaccaccctataaggccagactcgcatgccaggacctaagacatcactggtcatgctttctgagccatggctagccacgcgttgaagtatcgccacagatcgcatgcaccttgcatagctccagcatctg

SEQ ID NO: 37982 - DNA, 535 bp, Oryza sativa
  Clone ID: PAT_MRT4530_41661C.1
ggggaaggctgaacgcttgcgtaactggtatggaataaaggggtcgacctatgcttttgtggacgcttgggaaaaaaataatttattttttttttttttgttaaaatattaaaaaaaaaatattttttttttaaatttttaaaattttttttttttttaatttttttttttttttttttaaaaaaaaaaaaaatgggggggattttttaaagaatcaaattttttttggcgggattgcaaggggaaagttttttttttttttaaaaaaaataaaataaagtggcgggagtttaaaaaattttgatttggaaaaaccttaattttttcaaattaaaatgttttaaaaaaaatacctttttggaaatttgggttaaaactaaaggggccaaaaagaatggctttttaaaaaattttggcactttaaatgggaaatgttaacacccttaaaaagggtatttaaacgtggtttttttgatggttaaaccaagggggaagggttattttttaatgggcttaaaggggttttttttttttt

SEQ ID NO: 37983 - DNA, 522 bp, Oryza sativa
  Clone ID: PAT_MRT4530_41662C.1
atggagcgaatccttgagaagtatgacagacatgagttattatctgaaggaaataatgtgattgaagagttccctgagctggagggaagcatgagctatgaccacatcaagctgaggggcaggattgaagctctaaaaaagagccaaaggaatcttatggggcaggaacttgactcgctgacactgcaagatatccagcagcttgagaaccagatagacacttctctgaataacataagatcaagaaaggtgacgtatccatcgacagcgagacgacatggtaacttcttcaatcttaaaatatgtcggctcagtctttcggaggaaaagttgctgatggagaaaaacactattctggagaagctgcggcgattccggcgagccggaaaccgtgacggcgccacttggctggaccagcagcaacaatggcttgccatggtggatgctccagtcatcatcgaacggcaagagctagaagatgttcagatgaaatggtccctgcagccattgcatggttgctga

SEQ ID NO: 37984 - DNA, 3384 bp, Oryza sativa
  Clone ID: PAT_MRT4530_41663C.1
atgtggtccaaactgagaaggaaacggccatgtgagctctacggcccagaacgggttgtcgtctccccgtccggcgggggcgcggggcgccgccagtctcaggagcccgccggccgccgcaggagagggagagcacccaccgagaccgagtcgacgctagtgcctactgccgccattctcaggaacccgccgcctgcgcctggttccctgcaaccgcatcttccgcccgccaccaccaccaacaacgaacgacggctgcactcaaggtccggtggatctgccggcctggagcttatgaatgcaaaggtgcttccatttttgttccaatttccaatggaagctacagtgccagtgctgctgctagtgacagtgctgtctttgatcttgccctccggcattggcgccgccgccgccggcgacgagcggtcggcgcttctcgccttgaaggcgggcttcgtcgacacggtgagcgcgctcgccgactggaccgacggcggcaaggcgtcgccgcattgcaagtggaccggcgtcgggtgcaacgccgccggcctcgtcgatcggctcgagctctccggcaagaacctgagcggcaaggtcgccgacgacgtgttccggctgccggcgctcgcggtgctcaacatctccaacaacgccttcgccaccacgctgcccaagtccctgccgtcgctgcccagtctcaaggtgttcgacgtgagccagaactccttcgagggcggcttccccgccggcctcggcggctgcgctgacctcgtcgccgtcaacgcctccggcaacaacttcgccggtcccctccccgaggacctcgccaatgccacgtccctggagaccatcgacatgcgtgggagcttcttcggcggcgccatccccgcggcttaccggagcctcaccaagctcaagttcttgggactctccggcaacaacatcaccggcaagatcccgccggagatcggcgagatggagtccctcgagagcctcatcattgggtacaatgagctcgagggtggcatcccgccggagctcggtaacctcgccaatctccagtacctcgacctcgccgtcggcaacctcgacgggcccatcccgccggagctagggaagcttccggcgctcacctccctctacctctacaagaacaacctcgagggcaagataccaccggagctcggcaacatctcgacgctggtcttcctcgacctctccgacaacgcgttcaccggcgcgatacccgacgaggtggcgcagctgagccacctccggctgctcaacctcatgtgcaaccacctcgacggcgtcgtgccggcggccatcggagacatgccgaagctggagtgggtggacgtgtcgtcgaacggattcaccggcggcatcccggccgggatctgcgacggcaaggcgctcatcaagctgatcatgttcaacaacggcttcaccggcggcatcccggccgggctcgcgtcgtgcgcgtcgctggtgcgggtgcgcgtgcacggcaaccggctcaacggcacgatccccgtcgggttcgggaagctgccgctgctgcagcggctcgagctcgccggcaacgacctatccggcgagatccccggcgacctcgcgtcgtcggcgtcgctgtcgttcatcgacgtgtcgcgcaaccacctccagtactccatcccctcgagcctcttcaccatcccgaccttgcagagcttcctcgcgtcggacaacatgatctccggcgagctccccgaccagttccaggactgcccggcgctcgccgcgctggacctgtccaacaaccggctcgccggcgcgatcccgtccagcctggcctcgtgccagaggctggtcaagctcaacctgcggcggaacaagctcgccggcgagatacctcgctcgctcgccaacatgccggcgctcgccattcttgatctatcgagcaacgttctcaccggcggcataccggagaatttcgggagctcgccggcgctcgagacgctcaacctggcgtacaacaacctaaccgggcccgtgccgggcaacggcgtgctgcgctcgatcaaccccgacgagctggccggcaatgccgggctgtgcggcggcgtgctcccgccgtgctccggcagccgttccaccgccgccgggccgcgctctcgcggcagcgcccggctcaggcacatcgcggtggggtggctggtcggcatggtcgccgtcgtggccgcgttcgcggcgctgttcggcgggcactacgcgtaccggcggtggtacgtggacggcgcgggttgctgcgacgacgagaacctcggcggcgagtcgggggcgtggccgtggcgactgacggcgttccagcggctggggttcacgtgcgccgaggtgctcgcgtgcgtgaaggaggcgaacgtggtgggcatgggcgccaccggcgtcgtctacaaggccgagctcccccgcgcgcgcgccgtgatcgccgtgaagaagctatggcgaccagccgccgccgccgaggccgccgccgccgcgccggagctgacggcggaggtgctgaaggaggtgggcctcctcggccggctccggcaccggaacatcgtgcgcctcctcggctacatgcacaacgaggccgacgccatgatgctgtacgagttcatgcccaatggcagcctatgggaggcgctgcacgggccgccggagcggcgcacgctggtggactgggtgtcgcgctacgacgtggccgccggcgtggcgcaggggctcgcctacctccaccacgactgccaccctccggtgatccaccgcgacatcaagtccaacaacatcctcctcgacgccaacatggaggcgcgcatcgccgacttcgggctggcgcgtgcgctggggcgcgccggcgagtcggtgtcggtggtggccgggtcgtacgggtacatcgcgccggagtacgggtacacgatgaaggtggaccagaagagcgacacgtacagctacggcgtggtgctgatggagctcatcaccgggaggagggcggtggaggcggcgttcggcgaggggcaggacatcgtcggctgggtgcgcaacaagatccggagcaacacggtggaggaccacctcgacggccagctcgtcggcgccggctgcccgcacgtcagggaggagatgctgctggtgctccgcatcgccgtgctctgcaccgccaggttgccgcgcgacaggccgtccatgcgcgacgtcatcaccatgctcggcgaggccaagccgcgccgcaagagcggcagctccaccggcagcgccagcgccaaagcccccactccggcgccgccggcggtggcggcggtggtggacaaggacaagccggtgttcaccacgacgccggactccgactacgcttag

SEQ ID NO: 37985 - DNA, 223 bp, Oryza sativa
  unsure (1)..(223): unsure at all n locations
  Clone ID: PAT_MRT4530_41664C.1
ggcgcaggtggcgtcacganctgaaccggcgactgctgtggcacggtgggaggaggcacggtggtgtttcancagcagcggttgcaatggcggtnactgcggtcacgnaggcatggcggtctcggacggctagccgagggcgtggcatacggctgcatctggtcggcgcggcatcgtttngaggaggggtcggagacggcttnngcgcagagtngcgcacgat

SEQ ID NO: 37986 - DNA, 330 bp, Oryza sativa
  Clone ID: PAT_MRT4530_41665C.1
atgtggtccaaactgagaaggaaacggccatgtgagctctacggcccagaacgggttgtcgtctccccgtccggcgggggcgcggggcgccgccagtctcaggagcccgccggccgccgcaggagagggagagcacccaccgagaccgagtcgacgctagtgcctactgccgccattctcaggaacccgccgcctgcgcctggttccctgcaaccgcatcttccgcccgccaccaccaccaacaacgaacgacggctgcactcaaggtgttcgatcgtgggtttgccccggagtggccagaagcggcggcatcatcttgatgcacactga

SEQ ID NO: 37987 - DNA, 3123 bp, Oryza sativa
  Clone ID: PAT_MRT4530_41666C.1
atggaagctacagtgccagtgctgctgctagtgacagtgctgtctttgatcttgccctccggcattggcgccgccgccgccggcgacgagcggtcggcgcttctcgccttgaaggcgggcttcgtcgacacggtgagcgcgctcgccgactggaccgacggcggcaaggcgtcgccgcattgcaagtggaccggcgtcgggtgcaacgccgccggcctcgtcgatcggctcgagctctccggcaagaacctgagcggcaaggtcgccgacgacgtgttccggctgccggcgctcgcggtgctcaacatctccaacaacgccttcgccaccacgctgcccaagtccctgccgtcgctgcccagtctcaaggtgttcgacgtgagccagaactccttcgagggcggcttccccgccggcctcggcggctgcgctgacctcgtcgccgtcaacgcctccggcaacaacttcgccggtcccctccccgaggacctcgccaatgccacgtccctggagaccatcgacatgcgtgggagcttcttcggcggcgccatccccgcggcttaccggagcctcaccaagctcaagttcttgggactctccggcaacaacatcaccggcaagatcccgccggagatcggcgagatggagtccctcgagagcctcatcattgggtacaatgagctcgagggtggcatcccgccggagctcggtaacctcgccaatctccagtacctcgacctcgccgtcggcaacctcgacgggcccatcccgccggagctagggaagcttccggcgctcacctccctctacctctacaagaacaacctcgagggcaagataccaccggagctcggcaacatctcgacgctggtcttcctcgacctctccgacaacgcgttcaccggcgcgatacccgacgaggtggcgcagctgagccacctccggctgctcaacctcatgtgcaaccacctcgacggcgtcgtgccggcggccatcggagacatgccgaagctggaggtgctcgagctgtggaacaactcgttgacggggtcgctcccggcgtcgctcggccggagctcgccgctgcagtgggtggacgtgtcgtcgaacggattcaccggcggcatcccggccgggatctgcgacggcaaggcgctcatcaagctgatcatgttcaacaacggcttcaccggcggcatcccggccgggctcgcgtcgtgcgcgtcgctggtgcgggtgcgcgtgcacggcaaccggctcaacggcacgatccccgtcgggttcgggaagctgccgctgctgcagcggctcgagctcgccggcaacgacctatccggcgagatccccggcgacctcgcgtcgtcggcgtcgctgtcgttcatcgacgtgtcgcgcaaccacctccagtactccatcccctcgagcctcttcaccatcccgaccttgcagagcttcctcgcgtcggacaacatgatctccggcgagctccccgaccagttccaggactgcccggcgctcgccgcgctggacctgtccaacaaccggctcgccggcgcgatcccgtccagcctggcctcgtgccagaggctggtcaagctcaacctgcggcggaacaagctcgccggcgagatacctcgctcgctcgccaacatgccggcgctcgccattcttgatctatcgagcaacgttctcaccggcggcataccggagaatttcgggagctcgccggcgctcgagacgctcaacctggcgtacaacaacctaaccgggcccgtgccgggcaacggcgtgctgcgctcgatcaaccccgacgagctggccggcaatgccgggctgtgcggcggcgtgctcccgccgtgctccggcagccgttccaccgccgccgggccgcgctctcgcggcagcgcccggctcaggcacatcgcggtggggtggctggtcggcatggtcgccgtcgtggccgcgttcgcggcgctgttcggcgggcactacgcgtaccggcggtggtacgtggacggcgcgggttgctgcgacgacgagaacctcggcggcgagtcgggggcgtggccgtggcgactgacggcgttccagcggctggggttcacgtgcgccgaggtgctcgcgtgcgtgaaggaggcgaacgtggtgggcatgggcgccaccggcgtcgtctacaaggccgagctcccccgcgcgcgcgccgtgatcgccgtgaagaagctatggcgaccagccgccgccgccgaggccgccgccgccgcgccggagctgacggcggaggtgctgaaggaggtgggcctcctcggccggctccggcaccggaacatcgtgcgcctcctcggctacatgcacaacgaggccgacgccatgatgctgtacgagttcatgcccaatggcagcctatgggaggcgctgcacgggccgccggagcggcgcacgctggtggactgggtgtcgcgctacgacgtggccgccggcgtggcgcaggggctcgcctacctccaccacgactgccaccctccggtgatccaccgcgacatcaagtccaacaacatcctcctcgacgccaacatggaggcgcgcatcgccgacttcgggctggcgcgtgcgctggggcgcgccggcgagtcggtgtcggtggtggccgggtcgtacgggtacatcgcgccggagtacgggtacacgatgaaggtggaccagaagagcgacacgtacagctacggcgtggtgctgatggagctcatcaccgggaggagggcggtggaggcggcgttcggcgaggggcaggacatcgtcggctgggtgcgcaacaagatccggagcaacacggtggaggaccacctcgacggccagctcgtcggcgccggctgcccgcacgtcagggaggagatgctgctggtgctccgcatcgccgtgctctgcaccgccaggttgccgcgcgacaggccgtccatgcgcgacgtcatcaccatgctcggcgaggccaagccgcgccgcaagagcggcagctccaccggcagcgccagcgccaaagcccccactccggcgccgccggcggtggcggcggtggtggacaaggacaagccggtgttcaccacgacgccggactccgactacgcttag

SEQ ID NO: 37988 - DNA, 1122 bp, Oryza sativa
  Clone ID: PAT_MRT4530_41667C.1
atgggagtcgtcaagtcgccagcagttgtgttcttgatggagtcggatcaattaatggaagcttatctagaagagttcgagttcgaggagaatgcggcatggcaaccatatcctgaatggttcaatagagttccacttccgcaccgatacaagattccagatttctccatgttttcagggcaagatgatgtatctacaaaggaacatatcagccgatttttagcacaataccgatcccctttctccatcgctcttccgctccactgcatcggcgacagcatcccgcacggccgcacggccgcatggcccgcaccctcggccacctccagccacgccctcctctccacagcctcctcccgtcctctgcgctttcctccctctccacacctcccctttcctcccctccccacccaccacgatgcccaccagcggctgggcagaggggtggcgcaggcagcggggcgacgcaagcgaccaggcgagcggtcgggaggaggatgtgcaggcgacgcaagggacaagcgcaggtggccgacggcggaagcggcgcgggcgcaggtggccgatgccgggagcggcacgggctcagttggccgacggtggtcggacagtgaagcctggggttgggccgtccccaagcccacgtggctctcctcgacaggggtcgagcctggggcgcagtggcggcagtcccctcacagcatggggtcgggccgcccccaagcccacatggctccctccgagggggagcattggtgtgatgagcgtcgcaccgccaatgcaggggaaggcgcagcctcctcaggagagccgcgcaaccctaggcagggggctaggcccccaatatccccaccgagtaagtctggtggccaagcctttatggcaagtcttcggaatgtccgatggcccccaaagttgcggcctagcctcaccaagaagtacgatggcggcgccaacccctccgagcccctccaaatctgcatgacgatcatagaggcggcggggggtgacgaccaggtcacggcaaacttcttccccatggtcctcaagggccaagcgcgggtttcgctcgtgaaccttccgcccgcctcggtccactcctgggaggaatcttgcaggtag

SEQ ID NO: 37989 - DNA, 243 bp, Oryza sativa
  Clone ID: PAT_MRT4530_41668C.1
atggcggcggacaacggtggcttgccagaggagagcaggctccagcccatggaaacgattcccacgccgaccgtcattaacgagaacaatgaagtggagttcatcgcggccgacatggccggctttgtgccaaggatcaagatcagcgcccgccagcggtggcgaactctggcgaccaccatggttgtggacctgatgggctgctacgccccgcgccgcagcgacaaccagcttgccatctag

SEQ ID NO: 37990 - DNA, 1356 bp, Oryza sativa
  Clone ID: PAT_MRT4530_41669C.1
atggctggaggcaacaaaaaagtgaagaaagctatggaaactattgccaccaacatcaatgatctcccaaatgaagtactacagtacattctatctttcttatcaacacgtgaagttgtgcaaacatgtgtgctctctcaaaggtggtgcaacatctggaagtttgtccctactgtgcatgtaaccaacgaaactattcaacattgtcagaagttactggatcatgtcatcatgcaaagaggtgatgtttctatcgatacttgtcatctggaattcgttaaatactttcgtcgtgagaatcgtaaggcaaataagtggatctttcatgccctatcagtatgtaaggttaaggagcttagagtttatattcagtttcaagatttcttcctgacgattaccaatcaggctatcatatctggttacctaagaaagttggaacttgattctgtaaagttagaagctaattctcttgatttcacaagctgtccattattagaggaactacaaatgggttattgcattatttatgcaaggaagatcgtgtccaaatcattgaagcgtctaaaaatggaaactatgttttttgagacagaagatgatgatggttggccttgccgcttacacatttctgtcccaaacattgtatcgttgaccctacttggttttgatggttggactccactgtttgaaagcatgccatatttggcatttgcaattgtcacatttaacgatgaatgttatgatacttgtcagtattctagcttttgggactgtggtattgaagattgtgagggttgttatgccattggtgatcacttaaatggttctgtatttcttcaccacttatcacatactactcacatggagttgacaaatgactgcagaatgaatatgaatgactctatttcaaccatatttgatagagatttgaaatggtgcccgctctttagaaacttaaagacactgctattgaacgagtggtttttggaaaatggattacggggagtacttcgcattctacaacattcacctgctttggagaagatcactcttaaactctatatggaacctaaaaagattgtggaaaatgaagaaagctatggtacaatggaacaaccatttgtgatgaaccatctcaagaaaatcagtgtcaaatgtcaaaaggaagtgatgtgggttaaaaagatcataatgaccttaactcaatttggcatacctcaccagagaatttgtgtcaaagagattccaagatcatccataataagtgaaatgacatatttgcaaacggaacataatttgcgaatgaaaccttataaatgtgttcttagcgatctaaaagcaaaggctgaaagataa

SEQ ID NO: 37991 - DNA, 3560 bp, Oryza sativa
  Clone ID: PAT_MRT4530_4166C.1
atgggaacccctggagatcaagcatcttatgcctcacaaattgccggaataattggcaatattgaacaacttaatggaagtaattatgctccatggaaggagaagcttgaaattactttagctctgttggatattgattatgccctccataatgatcctctggttgagccaagaccggaaaatgagaattatgataccctaaaaaggagatatgatgaagtaaaggcaaaatgggatatttcaaaccgtaaatgccttatgattatcaagagctccattattgacgcaataagaggagcagtcccacatacttagatagccagagaatatcttgctaaagttgaagaagaatttaaaggctcttctaaggtttatgccaccactcttattaaaagattggtcaatgaaagatatgattttactggaaatctgagggaacatattatgaagaaatgtcacatggcttctaagctaaaatcaatggaaatggaaatctctgaaggttttcttgtccatttcattatgtcatctctgccccaggagttttctccatttacgatcaattataatgcaatgaagatcaagtggggcattgatgaattaatagccatgtgtgtacaagaagaggaaaggcttaaggcagcaagagttgaccatgcaaatctatttaaacactccgagaagaaaaagtataagaaatttaagaaggagtatttgaagcctaagcctattcaatttaaagaaatagggcaatctttgaatcaatccgagcagaataaatctggaggaaatctctatacagaagaaaagggaaaagaaaaggatgggtgctacttttgtggaaagagtggacaccgccaaaaggactgtattgggtttatgagatggctcagtaagaaagggattcgctatgaggaggaccctaagaagaggggaaagaagaattagagttgctaatggagttgaaactgaagttaaggccattggagacttcactctcacacttcatactggcttcaaacttcagctgtatgacattctttatgtaccctctatgaaaaggaacttagttttagtttcacgtttagataacggtggttactattgtacttttggaaacaatagatgtataattatgcatgataataaagaggttggtctcgccgatgggaacaactttatcaaatctttatgtgcgatgccacctataatgttcactcctcaaatgcaaatgtcagtaccaaacgaaaatataacgataatgagacttcttcgaaattatggcactatcgtttaggccatatttcgagggggagaattgagcatctcattaaagaaaatatcctctatcctttggacttctcagatgcagatgttgatcactgcattgattgcatcaaaggaaaatattccaagcaaatcaagaaaggtgcaaatcgaagtatgggagttttgaaaatcatccacacagacatctgtggtccatttaatgaaaagtcagtggatggatttgtttcattcataacattcaccgacgactactctcgttatggatatatctatccaatcaaagaaagatctgaggcattagacaagtttaaaattttcaaagcagaagttgagaatcaacatgatcgaaagataaaaatttttacaaagttcattgagacaagacacgttgtgttcttggaaaatgacataatcaaggggagtatgacacccagagaagttgttctggaagagaaacggaattatgttccaatgcatataattgaagaacccgttttctcaacacatactcatgttgcaccttcaatagaaagaaataatgatgcaacacctactgaagctcctgcaactacttctagtagtgtatcaaatgatgagaataatgaggatgctcagcagccccagattgtgatagatgagcaaaataacgaacccgtcagaagatcacaacgagttagaaagtcagcgattccaagtgactatgtcacttacatgaatgaagaggtgaatgaacttatgagtgaagaggtgaatgagcctatactagataatgatcccatctcatttaaagaagcaatgaagagtgaacattcgtctgaatggctaaaagctatgaaagacgaaatgaaatccatgagtactaataaggtctgggacttagtagaaattcccgaaggagccaaaacagttggctgcaaatgggtctataagactaaacgtgaccccaagagaaatatcgaaaggttcaaagcaaggcttgtagcaaaaggatttacgcaaagagaagggattgattataacgaaacattttctccagtctctactaaggattcattcagaattattatggcactagttgcctattatgatttggaattgcaccaaatggatgttaagacggcattcctgaacggtgatttgtataaagatgtatacatggcacaaccagaaggttttgttatgaaagaaaaagaacatatgggatgtcatctaaagaaatcgatttatggactaaagcaagaatcaaggcagtggtatctaaagtttgaccatatcataagacaatttggttttaaggagaataaaaaggatgactgtatatacgctaagtttaaggagaaattcctggtctctaagtttgaaatgaaagatctcggtgaagccacttatgtgttgggtatagagatttaccgagacagatcgaatggtgttttggggctatcctagaaagcatatatagaaaaggtactgaaaaagtataatatgcataattgtttagcctcgcctgctcctataatgaagggtgataagtatggaaaattccaatgtcctaagaatgagtatgaagctgcgcagatgaaatcaataccatatgcttcagctgtcggaagcataatgtatgcacaagtgtgcactcgccctgatttagcatttgttaccgagatgcttggcagatatcaatctaatccaggtctagaacactggaaattagctaagaagaccttgtgttatctacaaggcactaaagacctcatgctcacatatagaaagtctgaaaaccttgaagttgtcggttatttggactctgatcttgcagggtgtgttgatgataagaaatccacgtcaggttatattttcacccttgcagggggagctatatcgtggaaaagctccaaacaaagagttactgcatcgtcgacaatgcaggctgagtatgtggcatgttatgaagctactagacaggcaatatggctgaagaactttatcctgggattgagagtggtcgacagtatatcaaaaccactcaaattatactgtgataacaaaccagcagtatactatgcgagtagcaacaaataagtgcttctgccaagtacattgatatcaagtaccatgtcgtgaaagaaatgatccaggatcagacaataagcgttgagtatatgaacactaagttgatgttagcggatccacttacaaaaggcctaccacccgttgtatttaaagaacatgttgccagcatgggtttggtagaaaagcctttgatcctggaa

SEQ ID NO: 37992 - DNA, 416 bp, Oryza sativa
  Clone ID: PAT_MRT4530_41670C.1
cacggcggcacggcacggcggcagggcggcacggcgcggcggcgccgtcgcacccccctttgccggcgcgcgcactcacccgagagtgagtgcgccgccgtcgagcggctgtgcagcggcgcccggcaagccggcggcgcggcgccgccccctcttttctctcccgcgtcggcgtgaggacgaccggtggtggcatgactcccgcgcgcgtcggcggcggccggcggcggcggtaggtgagtcttttcttttcgacccgtgcggatcgtgtgctgttctttcttttgctcttttccggggatcaattcccctcttctttttatttggatttctatccccgaaccgatctaagccctagggttggtctgataccattgttagagttctctgttggatcacctaaaaaaaaaaaaaaa

SEQ ID NO: 37993 - DNA, 232 bp, Oryza sativa
  Clone ID: PAT_MRT4530_41671C.1
tcgtcttattcaacgaccgagacagtgacagcagcacttggtcactccgacaagagaggcatggacattggcgcgcgtgacgccgtgaacgtgagcccttgttctagacgagcaccttacccacaagctgataccgacactgttctgagggaccacaccgacagagagctgttttttttttgacagaaggcaccactagctctgatagaaagcttgacgggcaaggagtagc

SEQ ID NO: 37994 - DNA, 396 bp, Oryza sativa
  Clone ID: PAT_MRT4530_41672C.1
atgtcgtgctggctcgctacatgtgtctcgagctcgcagcttgtcaagatactaaatatacataatgtgatcgtcccattaggcaggccccatgcgtcagtaggtcaaggggccggccttggggccggcctactgtggaccgagtccacggaggttgccgggtgcaccgtggaccaggagcacagggtggtccacgagcatggacaccctagattggcccggaccaatcaaacaactaggagcgaggcggctcaccggccgatcctaccaactgtggcggcacacggcctggtggtcatagccagcgaccactgggcgcagcggcaatgcgggaagtggaggaggaggcaaggagaggaaggggaaaatgctcaccgagcacacacggcggaagag

SEQ ID NO: 37995 - DNA, 212 bp, Oryza sativa
  unsure (1)..(212): unsure at all n locations
  Clone ID: PAT_MRT4530_41673C.1
tgcttattacattgagtgcagctcaaacacacggcagagtgtcaaaggggtgtgggagtgcggctatcaangtantaatccaccctccaactaancatatggaaaagaanaaaaagaaatcacgagcggggtgctctatnatgaacatttttcccgtgaaagaaaatatcatgcttcaaatcctgattgatcgagatgtcccttacatgatg

SEQ ID NO: 37996 - DNA, 261 bp, Oryza sativa
  Clone ID: PAT_MRT4530_41674C.1
atgaagtacactggcagaggggttagagagcacattttgaagatgagtggcatcgcttcaaagctcaaaaagatggacttggttctccgtgatgagttccttgttcaccttaaaattgcctccttgccttcagtttttgagcagccagcagagagcggcagcggcctgcgcgtggcgagcggcagcggcagcccacatggtgggaggtggcagcttggcgcgggagcaagcagcggcgaagaaagtttatttagttgttga

SEQ ID NO: 37997 - DNA, 1172 bp, Oryza sativa
  Clone ID: PAT_MRT4530_41675C.1
cccacgcgtccgtaccgttctaccctctatctctggctcttcgcgtgctcaaccgctaattccctcccctctcctctctccctccgatcattcgcggcggcggcggcggcgaccggcgaccggcggccatgcgggtggcacccaaggtcctcgtcctcgtccgcgacgccgccggctacggcgccgccctcgccgacgcgctccgcccaacgccggggctcacgagggaatccacgcccctggagctccccctcgccaagtacggcctcgacggggagaaggcctccggcgagctcgtgaacttctccgattctagtggcgatccgcaggtgtccttttttgtcctaccagactataagcctcctgttgcagcatgtgctatgaatgagattttagcattggtttcttcggaagctccatccactcagccaaccctcattgtcccatttatgacaagatcgccaaactattatcatggagcaaaaacaggacagttagctacactccatggtgctgaaataggagcaacaactgagtttactcagatgttagttgacggaactactaaacttcctcaatctttacaagtgcgaagtgagccaatactctgtttgctggaaatggtacgtgtgttgaatataccgacagttattctttttgcatccggtgggcagcaccaaggaaaaagctctacagatgtggaccttgaggtgctgcagtgtgtaggtgatcacttggctaagcacatcaacttggaattcagcaaagaaaccgttcttcagagggggatcgaaaaatcacccgtctttcaggaaccatggcgcgaactgtaccagtgacagaattctggcatgccagcaccctctgaatttagttttgtaggccttacatgttggactagtacggtgtaccggaatgctggatttattctgtcaaagggtgtgtaatatgacgctctgtttgcttctgtttacttccatcttgatcaactgcttctcattccttgctgccactctagagcaaagctcctataaaattatagaagaaaccgctggactggtcaatctggtcttctggcaatcctaattttcccaagggttggttgtttgacttgagcgtgtaatgactggaattagtactacagaagtttgtcatcacttgtttggttaaaa

SEQ ID NO: 37998 - DNA, 228 bp, Oryza sativa
  Clone ID: PAT_MRT4530_41676C.1
atgtccattgaaaaaccttatgttgttgcggaaatgttgggcatcagaatcattgcttgtccagagcctcatgagttcaggaggttccagcatatgagtgctttgtggtatgttgctatacacaagctcatcgagaacgctagagccctcagggaaccccaaggatttgtaactgctgggaaccccaaggatttggaactgctggtgcaaaatactcactacaggtaa

SEQ ID NO: 37999 - DNA, 787 bp, Oryza sativa
  unsure (1)..(787): unsure at all n locations
  Clone ID: PAT_MRT4530_41677C.1
ggatccccgggctgcaggcttggcatagctgctactcccatggtctcctcgtccttgcccttgatgctcgatcgatcaccagccggaggtgatttttctcttctgcttgatctctacctctgacatgcatctgaagaccggagagcatctgcatctgcctatatcatccggtcatggatatggatagatgaccggcctgttcatgtctgaagaaaaatcaaaggtttggtttgggtcggcttgagagcgtgcctggctccctgtatgccactcatgtagcccaatccatggtgtgtttggatgctgtgggtggcgtgcaaggagccaagcatgcgtgccatgatctctctttctgccttaattcagtttcagacatgtgtagttggatttgtttcctctaggtgttcatgttaattacatatttcatgttgattttgcccgtttggatatgtgtttgtctgcttggtttcgaattgttttagcaggggggcagaactaatcaaggatactgcaaatcgttggaattaatttcttgttcaatcttgatccagataactatgagagcttttaatcacaacgagaaaagggaacaaaaaatgtgggattcgatnctaaggagaaacttagcatcacagagaggaaaaatggtgagaaaacccacgcacgagaggggactcgaactcagacacaccttaaggttttacctncttatacccgacatatatcttttcataaaagaaagtgagagtacccaactaaccttaatatgttggaatataatagaaac

SEQ ID NO: 38000 - DNA, 741 bp, Oryza sativa
  Clone ID: PAT_MRT4530_41678C.1
atatgatggggttctcatgcttagtattttggaatctatgatgtagacccaaatctttgggaggtctaggaattctgaatttggaaaaatttgcaagggccttgagattacgctggctttggtttgaatggaaagatgaaagtaagccctggtttaacatggaaaccccatgtgatgagattgacaaaaaattatttagggcaagcacaaaaatttccctgggaaatggaaagaagtgttgtttttggcaagataattggctatcaggatgcgcacccaaagacatagcaccggcaattttcagattagcaaaaagaaaagctaattgtatacattttgagatggagggtaatcactggattacttcgctaaggccaatcaccacaataagcgaaatcaatgaattggttcacctcggcagtctattgcaagagattaatctgcaagccaatacctcggaaatggactcagaatggaatttatacagcaaaaagcgcctatgaagcacagttccaaggtaccattatcagcacaaatttccaacccctttggatagctgaagcagagccaaagcagcgttttcttggctggctaatcttacaccagaaaattctcacagcagataatcttctaatccggcattgaccatgtgactggatttgcagtctttgcactgatgcttttgaagacacaaatcatttagcaaaagagtgcagcttcacaatttcagtttggaaccag

SEQ ID NO: 38001 - DNA, 475 bp, Oryza sativa
  Clone ID: PAT_MRT4530_41679C.1
aaatacatatatgctaaaatgttggaaaataaataacatgggttctattattattttcatcaaaaaaacaacacatatttgtgaccgagctatggataaacagaatggcacgttttcttactttgcaatacccacccacacaatcctgccttttcattgcaaatcgaacaacaagaaagatggcagcgttgatatgtgaaagatggcagcgttgatatgtcgaacaagatcaatcaaggatgctatctttcctggacacttaaaagctcccaagaaaagtactgagtaaagcatctgtctccagcattacaagcacttcttttggctgtatgttcatgtccaaggaagcttttctggacatctgccggaaatctgtgctctagtactagcctgcagtatgcgggaagcactttggcagcatcagcttgcaagaataaccaagatgcaattacagtgcttcagtctcagtacatgc

SEQ ID NO: 38002 - DNA, 3297 bp, Oryza sativa
  Clone ID: PAT_MRT4530_4167C.1
atgggaacccctggagatcaagcatcttatgcctcacaaattgccagaataatgggcaatattgaacaacttaatggaagtaattatgcttcatggaaggagaagctggaaattactctagctctgttggatattgattatgccctccataatgatcctccggttgagccgagaccggaaaatgagaattatgagaccctaaaagggagatatgatgaagtaaaggcaaaatggtatatttcaaaccgtaaatgccttatgattatcaaaagctccattattgacgcaataagaggagcagtcccagatactcagacagccagagaatatcttgctaaagttgaagaacaatttaaaggctcttctaaggtttatgccaccactcttattaaaagattggtcaatgaaagatatgattttactggaaatctgagggaacatattatgaagaaatgtcacatggcttctaagcttaaatcaatggaaatggaaatctctgaaggttttcttgtccatttcattatgtcatctctgcctcaggagttttctccatttacgatcaattataatgcaatgaagatcaagtggggcattgatgaattaatagccatgtgtgtacaagaagaggaaaggcttaaggcagaaagagttgaccatgcaaatctatttaaacactccgagaagaaaaggtataagaaatttaagaaggagtatttgaagcctaagcctattcaatttaaagaaaaagggcaatcttcgaatcaatcccagcagaataaatctggaggaaatccctatacagaagaaaagggaaaagaaaaggatgggtgctacttttgtggaaagagtggacaccgccaaaaggactgtattgggtttatgagatggctcagtaagaaagatgttgatcactgcattgattgcatcaaaggaaaatattccaagcaaatcaagaaaggtgcaaatcgaagtatgggagttttggaaatcatccacacagacatctgtggtccatttaatgaaaagtcagtggatggatttgattcattcataacattcaccgacgactactctcgttatggatatatctatccaatcaaagaaatatctgaggcattagacaaatttaaaattttcaaagcagaagttgagaatcaacatgatcgaaagatcaaaattgtaaggtctgaccgtggtggtgaatactatggtagacatactacttatggtcaaattcctggaccttttgcgaggttcttacatgaaagtggcattaaggcccagtactcagcaccgggcgaaccccagcaaaatggagtagctgaaaggcgtaatcgcactcttatggatatgggttgtcctgctgaagcacgagttttcaatccaaatatgggaaaattagacctcaaaacaatcagttgtcattttattggttatcctgataagtcaaaggcatatagattctactgcccaaatcagtttacaaagttcattgagacaagacacgctgtgttcttggaaaatgacataatcaaggggagtatgacacctagagaagttgttctggaagagaaacggaattatgttccaatgcctataattaaagaacccgttttctcaacacatactcatgttgcaccttcaatagaaagaaataatgatgcaacacctgctgaagctcctgcaactacttctagtagtgtatcaaatgatgagaataatgaggatgctcagcagccccagattgtgatagatgagcaaaataatgaacccgtcagaaaatcacaacgagttagaaagtcagcgattccaagtgactatgtcacttgcatgaatgaagatgtgaatgaacctatgagtgaagaggtgaatgagcctatactagataatgatcccatctcatttaaagaagcaatgaagagtgaacattcgtctgaatggctaaaagctatgaaagacgaaatgaaatccatgagtactaataaagtctgggacttagtagaaattcccgaagcagccaaaacagttggctgcaaatgggtctataagactaaacgtgaccccaagggaaatatcgaaaggttcaaagcaaggcttgtagcaaaaggatttacgcaaagagaagggattgattataatgaaacattttctccagtgtctactaaggattcattcagaattattatggcactagttgctcattatgatttggaattacaccaaatggatgttaagacggcattcctgaacggtgatctgtatgaagatgtatatatggcacaaccagaaggttttgttatgaaaggaaaagaagatatgggatgtcatctaaagaaatcgatttatggactaaagcaagcatcaaggcagtggtatctaaagtttgaccaaatcataagacaatttggttttaaagagaataaaaaggatgactgtatatacactaagtttaaggagagtaagtttatctttctaatattatatgttgatgacatactcttagccagtaatgacaaaaatatgctactggaaacaaagaaatttctggcctctaagtttgaaatgaaagatctcggtgaagccacttatgtgttgggtatagagatttatcgagacagatcaaatggtgttttggggttatctcagaaagcatatatagaaaaggtactgaagaaatataatatgcataattgttcagcctcgcctgctcctataatgaagtgtgataagtatgaaaaattccaatgtcctaagaatgaatatgaagctgcgcagatgaaatcaataccatatgcttcagctatcggaagcataatgtatgcacaagtgtgcgctcgccctgatttagcatttgttaccgggatgcttggcagatatcaatctaatccagggggagctgtatcgtggaaaagctccaaacaaagagttactgcatcgtcgacaatgcaggctgagtatgtggcatgttatgaagctactggacatgcaatatggctgaaaaactttatcccgggattgagagtggtcgacagtatatcaaaaccactcaaattatactgtgataacaaaccagcagtatactattcgagtagcaacaaatcaagtgcttctgccaagtacattgatatcaagtaccatgttgtgaaagaaatgatccaagatcagacaataagcgttgagtatatgaacactaagttgatgttagcggatccacttacaaaaggcctaccacccgctgtatttaaagaacatgttgccggcatgggtttggtagaaaagccttcgatcctggaataa

SEQ ID NO: 38003 - DNA, 646 bp, Oryza sativa
  Clone ID: PAT_MRT4530_41680C.1
cgcccggccccgggtccggacgcgtggtgcggacgcgtgggctagtcaggacccttcttccttgaactttgtggcatgaattacttgtggcctgggtgattaaccccgactgattgcttcatgagatcgtgtgtagccaagtcgttgcagccatttcaacctcccagaactggcagttcatctatcagttctggtgtaggatggttggttatgttggctgaagtttggaattgatcttatcctcaaaatgacactgaagccatccagaggtgtaagctagtatgctttagtggcgccacgggatactttaacttcagttttgtagattatttgcacgagaaggatatatcgacatgaattcatcagaattaagttattagtgttttcctgatatgaacaagggagtaagggactgtggtaataagttagctgggggatatacggtttttttattgggtattcacttagccttggatgtaagggactagaaagtaaacttgttttgtttcagttctgtttgaatcaatggcagcggtataaccttctgcaacgttctcacctgagttttccagtgctcataaaaaaattcttgtgctcagtcagcacacaggtgtaactactgtttctaatcaaaaaaaaaaaaaaa

SEQ ID NO: 38004 - DNA, 441 bp, Oryza sativa
  Clone ID: PAT_MRT4530_41681C.1
atggaggtgcttcacaccgcgccgctcgtggtttatgtccagggagggacatgtgcgcaagaagcgattggtgatccaattggtgggtcggacacttcgagcgggtggctcggactttccgcagaggaccacgggattgcaacaacaagcaatcgggcaaactaccaaagcaaggcgagatctgacctgttggatttcgtgggcggaggtggtctgcggtgtcgggctccggcggcgctgcacggcttcggcgagcagcaggtgcaggcggcggaagctcggcggtgccggctcttggaggaggcggcggacaccggcggcagaggaggcgtcctctcctgcgtcggggcagcgtcgtccatcaccgggggtcttcagaggcgtcgacagcaggacctgcaggcatgcactcgaggacgggcgttggcggcgggaacctag

SEQ ID NO: 38005 - DNA, 309 bp, Oryza sativa
  Clone ID: PAT_MRT4530_41682C.1
ttttcttcttctctccacacttccacagtcgacgacaccctccatctccgtcccttccacttcccccacggcggcgtcgctccctgtacccctcagccacggcgccctctccccagccgacggcgcccttcccctggtagcggcgccctacccttggaggccagtgcctccgccgctgcgccctgccccccggccggcggcgtytttcacccggcgagcagcggtgcgcaacgggccggggagcggcggccgcgaccaacttcttggtgtcggcggctctttyctyccgcgagcggcaacgtgcgtcgg

SEQ ID NO: 38006 - DNA, 451 bp, Oryza sativa
  Clone ID: PAT_MRT4530_41683C.1
gccggccgggaaaaaaaaaaaaaaaaaaaaaaaaaaaaaaaaaaaaaaaaaaaaaaaaaaaaaaaaaaaaaaaaaaaaaaaaaatcacagagaccttctgactcacagggtcttgttggaaaaaaatctaaagggttttccttccttttcttccctgcttgtagtggccctgtgtgaattgacctcttgggaagctattgccccccaccctttccctctcccagatttttgtgcgcctgtgctgaattctccagtgggaggaaatggctttgtgtgcgaaaaccccatgaactccttcgcggacgccttcttctaggggcccatgttctctaagcctatagacgcacccaatgtggctggggccaatgtgtctttggtcaatggcttgaagattcttgggctctcaacccctggcatctccatagcacccttggtgtttgcccccttgtgt

SEQ ID NO: 38007 - DNA, 117 bp, Oryza sativa
  Clone ID: PAT_MRT4530_41684C.1
attgtgcacaaagcaagaaactcaagtagctacctcctctcctaatctatatacgctcatcagcttatagtgcaactccagataccgacctagcagcttgctatctagagtatatat

SEQ ID NO: 38008 - DNA, 716 bp, Oryza sativa
  Clone ID: PAT_MRT4530_41685C.1
tttttttttttttttttttagaaaaaacactactacaagaacacaagaacagatgaacagatttttatcaacaagaacacaagaaaataccgacactttccctaaaaaaacaaaaaaaatgccgacacaggaaggggagggtgccgccgtcgccgtcgggccgccgctggctcccctcccgctggatccggcgaggggagggcgccgccgccgctgggacgccgtccgccgggtcgccaccgcctctcctcccatcccctcccctcacgctggatccgggatgcccggccgccgccccttccctcccgctggatccggcggaggggagggcaccgcccctgcccaccgcctccctacccgccggaagggccggcgccgcagcctgccaccgcccgccaccgtcgagccctcccgtggcattatggcaagggagaggaggtgaggggcggagaggcgccgacgcacgttgccgctcgcgggaggagagagccgccgacaccgaggagttggtcgcgggccgccgctccccggcccgttgcgcaccgctgctcgccgggggaagggcgccgtcggctggggagagggcgccgtggctgaggggtacagggagcgacgccgccgtggggggagtgggagggacggagatggagggtgtcgtcgactgtggaagtgtggagagaagaagaaaaagagggaaaggaaagaaggcgcaatga

SEQ ID NO: 38009 - DNA, 219 bp, Oryza sativa
  unsure (1)..(219): unsure at all n locations
  Clone ID: PAT_MRT4530_41686C.1
atgggcaagctccatgtgtttatggcgaggttcggcagtggcaactgcgtgtggaggagcggcgcgccgccggacagcaacggctgcagcgcacggagtgaggaaggaganggcccgtcggcggccagagccgtcgccctcccgtcgccgcagccgctccatccttgccctcccgccgccgccaaccgccggacctcgcctgcgcgccgtcattattga

SEQ ID NO: 38010 - DNA, 503 bp, Oryza sativa
  Clone ID: PAT_MRT4530_41687C.1
ttttttttttttttttgaaatccacacattgatccatgcataaaaggtactagtacaacaagttaaagttcccacaccagtacaccacatggacaatgcaaagctcgaatgatcaccgaatgtaccaaacagaaatacaagaaaagcttaaacgcgcactgcagtcatacagtcaggtatgcattgtacttggagaaaggtaacaggagctgctaaaacaaaagataaatttattaaccgagcggtgatatggcattggcactggcactgcgaacctcacttgaacctggtcaggtcgagagtgacctcagcctcggacggcatcaggaactgcctggaggccatctggatgacgtcgacgtcgtcagggtcgccgctgccactgccgctgcttgggccagcttcactgtagtagccacctgcgttggcatggttgctggattggcaaccgaaatccaggctaaccgggtgggttcccgggaacgggtggtacaggctcaggc

SEQ ID NO: 38011 - DNA, 647 bp, Oryza sativa
  Clone ID: PAT_MRT4530_41688C.1
gcacgaggcctaccaccggcgccgaccaccctcgtcccctcccctacctcgccgccgccggagctcaccgccggcaaagccggccggcgagctaggaaggcggcggcggggctttctccgcagtggtgccccctctcaggcgtgggggaggtggagtttttttgccggcggcggagagtggcggcggcgaggaatcccggccaggcggcggtagatccggcaccgccgttgccggatctggacggtgcgccgacggtggtgtcgtggggcggcgcgaagcggaggtggcgcggctggcggtggccgctgcagcgtctagcggcgtgcgagcggcggggtcgtcacgcaagtcgactcgcgagcgcggtcacgcgcggcggcgcgtgcgccggagtatgggcggtggtttgccggcgtctgcgtggcggcgtggcgccagtacgcaccggtggtcggccttccgtggttggtgagtctggtctccgaccaccctcccgtcgccggcatctgcggaggccgcccctgcaaccacccattccttctcccttgctgtcttcctcctttttctcttcctctctgttcctccggccatcgccggcagctgctcaggccccccctccactcaccgcacatcccttcctcccttc

SEQ ID NO: 38012 - DNA, 3290 bp, Oryza sativa
  Clone ID: PAT_MRT4530_41689C.1
ttttttttttttttttttggtaccaggaaaaaaaaaaagagtgatttcactcgttcactcatcaacttgatgtttggaacttggaagggagaaaaataaggaattccattttcaccaaccaaacagtatcatctaccatggatatttgtcagtttcaccatgggatgatgagtgaaaaaaaaacaaacacatatcatgcttattttgacataagctctggctggctggctggctggccatcctaaactgcagtgttacatacaccaagaaggattataactgacagcaaaaatctacaggaactatatggttgaaatgaaatgaagaaatcaggactatttatacaatcaaatctaacaggctggaaaaatcgttactgctaggaactttacagtgctaccaatcttggtgtcgaattgcggtgaaaactttccgctagggtaatctttcttgcttggtcagtagtgcactattggtttgataagggccaaaagtgcaaagaggaaaacccagtcatcgaaaaagttcagggaaggaccacatgataaacttggcgtagatgtcagtctccaggaactctatgtgcgctgctctgccaatcatggtgtttaggttccgtccttgcgcggactgatcaaagttcacatcacagcgcatgaagatccgggtttcagatgtgggtgcgcgcatctgatctaagcaattgttgagcatttctgtaaagacttggcccttccttgagttatctgatgatgcagccgggcagagctcgattcttgctgaatgatatggtacataaccatcctgtggtgaagatagaagtataatatttttgaagttctccagtgtcttcaacttacaaagtttataaaagaatgtattctgggggtcttgatcatcactgaaagtgagttgatggatgcactgtgctcccttgagcttttttagaagccagaggccagagttgaataaagagtttgagctgtaccagtagcccaagtgtgggcctgatattgacatgtacgtgtacaggttcttcaagtatggttgtaatgcgggttctgcaagtgcagttctgatgataacgttcccaatggaatggccaacaaaactaagcttcaattctttgcagcctccgtactttgcaagcttatcaactttctttttcaggaatgcaacaacttccccagcaagcctaccacccatttctttaaaatccccagatgttttatcttcgttagcctcagacattaagcactcagctccaggatccaacagaagccattgatttcgtacaagacgtaaatccagatggtgtccctgaaacccatgcacaaaaatgacagctcgcaatatccgtccttttttaccagcactgcttttcagtgccaaagaatctccttgtagtttaggtagtacaatcgtatccttttgttctgaagaatttgttgccaaatccttgctagagccatgttgcggaacaaccatgacatgttgttctataagaacaacaggaacacgtgaaggatctgcatatatttgcatatcttgaacggacagcgtgttgatcttcatttgtgctatacttttcctgtgcagttcagcccgtgaggcagaattttgtacaggatcatcatggaacttccttgagccagaaactctcagaagggaatgacggtgagatgactcatcgtccgtactacgtaaatagcggtgtgggatctcaatttttgagtgaacagtccatattgaccattctgatttccggtcaagagcccaaatatcacgcaagtagtccaatatcttggttttatttatcctatgaaatttcaagaaagcattccatagaagtgaaagttggctgctcacagttagaaacaattctaacaactcttccttaggaagtgtatatagcatagcatcgttggcaccatcaaccgcactgttgggtttctccagaaagtcatgtaaaatgccagccaagtgcccaacacccttggtagttgccgggaaaactttatttgaattaggtagacctgattttgcaggctgaactgcctcatatttaccaagacttaagtcagcaacatctaaatcttctactgttttaccaatagcatcactgattttctttagttcttcgagtagcatttccctagaggttaataatgccttcacaatgtgatgcgatgttggtcctaaaccttggtctggtatcttcaatgatgatttagttgcaccagctttgaggtacacgatatgtaaagtcagatcaacaagcacggagtggaatgcgtcaaagtgaactggacaatatgagtgtgaaccaaggagtgctcgacgtgggactctaaattcatgaacagcagccgaagaagtggcactagaagcttgaatatcagacccattctccagcgttggggcatatatcagctcaaatttcaatataacagatgaagctgctgggccctcttcttcactgttgaatatgttaaaagacaccataactgatagataaatgtcttgtctagcatatttgattcgaaatggctgcgtgtagaagctgttatcggcatcatctattttccaaatgcccaatgcatcgtccgcaccaacatcagaagcttcatattgcacgacccttgcaggtgaagctggcgtcttggaaccaccttcctcccacgttgcactaatcttcatttggtaccacccttgctggaacagatcgaggttgtggaagcggtggatgtaaatggccacctcgtgcaccgtctccatcacgtccggcgaacggaaggggagcccgctctttccctccgctccggcggcggcggcggcggaggcgttggcgttgtgcacccgcctcaaagccggcgagaccctcctgaccgccccgcgcgggctgtcctcgacgccgccgccgacgaggcacctcatgcggccgaacatggcgcgacgtccccgcgccgcctcgcccgccccgattcgcgcatccctgcctcgatcccctctcgcctctcgcctcttcctccaactctagtctctagaatctccaaaccccctactccagacgacggcggcgacggcggcggcggcggctagatgccaacgcgtagacccttcgcttcagcggcggaggagtggcccccactcctcagtggggttggcaaaattcgcagatcgggaggcgacggctgcggctgcggctgcggcggcggccagtggaagcccaagccagaggcggcaggagcaggccacgcggaggctgtcacgtggggcccagctcaccg

SEQ ID NO: 38013 - DNA, 315 bp, Oryza sativa
  Clone ID: PAT_MRT4530_4168C.1
atggactccagaaccactgcgatcaaagcgagcgcggagttgaaaatcctggagttccgttccttccacagctgccaggagactaggagtaccaaggagtcgaagccgctgcggagcccagaaattgggtttgcttccattggagctgtcactgtccaccatcttgaatattttgcaaatgacaaattggcaaatcctataactggacttgtggggaagaaggcaatgattcttgcccccttttgccaccagaggaggagacttctttctcaatttcagctaaagttggtggttgattatattcccccagcttga

SEQ ID NO: 38014 - DNA, 1978 bp, Oryza sativa
  Clone ID: PAT_MRT4530_41690C.1
cggtcctgctctggatcccgcgggccgacgcgtgcgcccgcgggcacagcggcggcgccggcggccgggccgtggcggggggccggcggcatgtcgtcggtgtacgtgctggagccgccgacgaagggcaaggtggtagtgcagacgacggccggcccgctcgacatcgagctgtggccgaaggaggcccccaaggcggtgcgcaacttcgtgcagctctgcctcgagggctactacgacggcacgctcttccaccgcgtcatcaagtccttcctcgtccagggcggcgaccccaccggctccggcaccgggggtgagagcatatatggggccccatttgcagatgagttccatacgcgcttgaggtttaaccacaggggtttagtggcgtgtgccaatgccggcacgcctcactcgaatgggcagtcaattctttatcagccttgaccgttgtgattggctcgataagaagaataccatctttgggaaggtcactggcgattctattttcaaccttctagccttgggctgatatcgagactgataaggtatgatcgacctgtgtagtccgcacgaaaatttctttcagtttaggtactctggaaccctattttgatgaatattgttccaaggcaaacttaatgaaagactgagcctactgccaagggtgatatcgaggggaaatcaaagaagaaagccgttaagcaacttaatgtgctttcatttggagatgaagtagaagaggaggagaatgaggcagcatcctctgtgaaggacaaaataaaaagtattcacgatgtgttggatgatcctcggtttcttaaaggagaggcaccggatgagcaactgaccaaggagcaagaggacaaaaaaaaggagactgttcaatctgtcagggaggctttagtatcaaaaaaatctgacttcagagagctagagcatgattcagaaacagatgattatcctgacgatgaaaacgaggaggattttgataacagaatgcgctctcaaattctaagaaaacgcagggagcttggggacatccgctctagtgaaacctccaaaaaaacagataaagcacaccgtaaagacaaggagttaccagttcacaggagtgacgatgacaatgatgacgacaatgaagaccaccagctaaccaagtctagaaaattttctatgaagaaaaaaggcattggctcagaagccagtgctgaaaggatgtccaaaggcgatgctaatttgcagctattgaatccagctgagcaagagaagcatttgcaaaaacagaaaaggcgccgtcttcaaggccgtgaagatgagacgttagcgaagctacagaagttcaaggcatcgtttctcagtaagaaccctgcaactggtaacacagaaaagaagactgatgaagaggattacacagggtggcacagcaaccggctgacttttgaacctgattcttctaaggatggaatgacgaggaaagatgatccagatgactatgtagtggttgatcctctccttgagaaaggaaaacaaaaattcaacaagatgcaagcaaagcttaagcggagagaacgtgaatgggcaggcagatctctgacctgaccgcataagctgcttgagaggtgcaccgtgcaaaagattacctcatatcataacagtgccactactgcagttttgatggtgttgtaactgtacactgcgtttcgctatgttgtggttcatggtagagggaccacctgtagactagtgcttttaacattaacatttgtatcattgtcaatcaaactgtaaataacaattgttttaaacttagaggttcataatgcccttattaagttgcagtggtctttttttttattggaatttcttttgtggtatcatgtgctacaggacagattatttatataaccgcataaattgatccgactcttatcttggaacaaaaaaaaaaaaaaaaaaaaaaaaaaaaaaaaaaaaa

SEQ ID NO: 38015 - DNA, 1946 bp, Oryza sativa
  Clone ID: PAT_MRT4530_41691C.1
atgcagtcgcttgccctcacctccccctcccttccggcgccggcgaccgcatccggccgccgccgccgccgcctggagcgcatccgcgccaccgcggtgtccgacgagccgaagctgaacaagtacagcgcgcgcatcacggagcccaagtcgcagggggcgtcgcaagcggtgctctacggcgtggggctcaccgacgccgacctccgcaagccgcaggtgggcgtctcctccgtctggtacgagggcaacacctgcaacatgcaccttctccgcctcgccgaggccgtcagggacggcgtccgcgaggccggcatggtggccttccgcttcaacaccgtcggggtcagcgacgccatctccatgggcacccggggcatgtgctacagcctccagtcgcgcgacctcatcgccgacagcatcgagaccgtcatgggcgcgcagcactacgacgccaacatctccattcctggatgcgacaagaacatgccaggaacaataatggcaatggggcggctgaaccgaccaagtatcatgatatatggtggaactattaagcctggtcattttcagggtaattcttatgacatagtatctgctttccagtgctatggagaatttgttaccggatcaatcagtgatgagcaaagaaagaatgtgctccgcaactcatgcccaggagcaggtgcgtgtggtggtatgtacaccgcaaatacaatggcatccgccatcgagaccatgggtatgagccttccgtacagttcttcaacccctgctgaagacccactaaagctagaggaatgccgtcttgctgggaagtatcttttagaattgttaaagatggatttgaagcctaaagacattatcactgagaaatctttgcggaacgcaatggtcattgtcatggcacttggtgggtctactaatgctgttttgcatttaattgctatcgctaggtctgtaggtctgcaattaactcttgatgattttcagaaggtcagtgaccaagttcctttccttgcggaccttaagcctagtggcaaatatgtcatggaggatctgcataagattggtggaacacctgcagtaattcattatcttctggagcaaggtcttcttgatggtgattgtatgaccgtcactgggaaaactctagcggaaaatgctaaaatcttccctcctctgtccgaaggacagcaaataataaggcccctggacaacccaatcaaatcaactggtcatatacaaatactttatggcaatcttgcaccagaaggttctgtagcaaaaattactggcaaagaggggatgtttttctcaggccctgcactagtgtttgagggtgaagaatctatgattacagctatatcagaaaacccagcgaatttcaaggggaaggtagtagtgatacgaggagaaggaccgaaaggtggaccagggatgcctgaaatgctgactccaactagtgcaataatgggtgctggtcttgggaaggagtgtgccctgctgaccgatggcagattttctggaggatcacatggatttgttgtaggccacatttgtcctgaagcacaggagggaggtccaattggtcttgttcaaaacggtgacaaaattaccattgatgttgtgaagagagtaattgatgttgaactgactgaagctgagctggaagaaagacggaggaaatggacgccgccgccacacaaggctgcccgtggagcgctttggaagtacacgaagctcgtgtcccctgcatcaagaggatgcgtcaccgatgagtagatcctgctgctgctgctcgagtaataaaaaataaaaaataaaaaagaggaggaataggaggaggtttttgaggaacagtttgcatgtaacagtagttcatggtggtgattggtgaaggctgaccgtgatggtagttccctccaataaaatggcagtttcct

SEQ ID NO: 38016 - DNA, 150 bp, Oryza sativa
  Clone ID: PAT_MRT4530_41692C.1
atgggtacttacttcgacgtattcgagattggaatcgtcggaatcgtctgcggatcgccagaaagcttgaagggtgtcgccggagaactcaaaggagaatattggggaaagttcgacattggaatcgaggcggattcggtaaagagatag

SEQ ID NO: 38017 - DNA, 289 bp, Oryza sativa
  unsure (1)..(289): unsure at all n locations
  Clone ID: PAT_MRT4530_41693C.1
gaattttgataccgccatcactagaaatgaatctggatggcacggtctatatagcagccataggggtagttctgcaactgtatgctacatggaaatatggccatccacatcatgcaggctaagttgagtcatcatcatgttgggagtgagatcgagaaaccatgcattgcaattgagggtatgagtgtgggttgctatgttgtctatgttcacatgcagaaggagcaagtaggtcccactacaaccgcagctagatgttaangggatatagttggttctacatccctaa

SEQ ID NO: 38018 - DNA, 1578 bp, Oryza sativa
  Clone ID: PAT_MRT4530_41694C.1
atggcgaagccaccgccggcgcctcaccgcgccaaccgcgcgccgccgggcctctgcgccctgccggccatctcctacaactcccaccggggcctcgtcctgggcctcaccttcgtcgcctacgcgctctaccacgcctcccgcaagccgcccagcatcgtcaagcgcgcgctatccgaggcgtggccgcccttccacgacccggcgctcctcggcgagaccgacgtcgcgttcctcgccttctactccctcggcatgttcgtcgcgggccacctcggcgaccgcctcgacctccgcctcttcctcgccgtcggcatgatcgggagcggcaccgccgtcgcgctcttcggcgtcgggtacttcctctccctccactccctcgccttctacctcgccgcccaggtgatcgccggattgctccagtccaccggctggccctccgtcgtcgccatcgtcggcaactggttccgtgggcggaggcgcggcctcatcatggggatatggaacgcgcacacctccatcgggaacatcagcggctccctcatcgccgccgccgtgctccgctacgggtgggggtggtcgttcatcgtgccgggcctgctcatcgcgttcggtggcgttctcgtgttcttcttcctcgcgccttacccggaggaccttggcttctctccgacgacgctgcccaaggcagtgagtgaggcgagcaccgacgaggaggacagcagcagcagcgcgagcgccgccggtggcgccgggaaggaggagaggagggacgccgtggggatgtggaaggcgttcgcgattcctggcgtcatcaccttcgcgctctgcctcttcttcgcgaagctggtcgcctacacgttcttgtactggcttcctttctacctgagccagacggctattggaggcaaggaaatgtcagtcacgtctgctgggtatctctcagctttgtttgatgtaggtggaatcattggtggaattcttgctgggttcatatctgatcatctcaatgcaagggccaccacggcagcaatcttcatgtacttggctattccatctctttacgccttccatgcatatggcagtacttcagaagtggcaaacattggcttgatgatgatcagtggcttgtttgttaatggaccttatgctctcataacaactgcagtttctgccgatctgggaacccacaaatctcttaagggggattcccgtgcgttggccaccgtcacatcaattatagatggaacaggatcgcttggtgctgccttaggtccattcattacaggttttatttcaaaacgtggatgggattcagttttcacaatgcttatattttgtgcattagctgccggcgtcttattgtcacgtattgtgaagtctgaaattgttcatatcattcagaatcggagaaatcacacacttgacatgcataacagaactgcaggtgaggacttaaaacacactaatgttgcatctttctccattttggatatgtcaaacaatggtctgctaatgttttccttcctgttcctcatagattctggtgctcaaccacttttagaaggagacacttga

SEQ ID NO: 38019 - DNA, 677 bp, Oryza sativa
  Clone ID: PAT_MRT4530_41695C.1
tggagccgtgcaccgacgatttctgcgaggaggacggcggcggcggcggcatagagcggcttcgggcgaggccgcgggcgcggcgggcggcggcgtggtcggcgaggatgcgcttgacgtcggcgaggatccggagctgctccagcagcgcgtcgccgcgcgccagcagctccgcctcctgccccgtgtagaacgcgttcaccttctccagctcctcgtccgccctctccatgaactccctctcatgcttgtccgtggatcgcacgagctcccctctgtccgggcactcctcatcctctgaggcagaaggctgttgtccagcggagaagcgggcggcgatggcgcgaacggggtcaagaatggagaacccatagccaccggcttccttctctgccccccccggcgggagaaggtggtcgcctgcggctgcggcgttggcggcggcgaaggagtcgtcgcggcgggtgaccttgatcctcttgatgagcttcttgagccgcttgtagtcgacgaacgcagacttccactccggtatgatgctcgcctcgtactccctcgagaacttcaccatcttcttcttcttcttcttcctcgttgcagcagcagcagcaacagctgatcgatcgatcgatcgaacaattaactgaaacgtacgtacgttcacatgtgtggaatcc

SEQ ID NO: 38020 - DNA, 2264 bp, Oryza sativa
  Clone ID: PAT_MRT4530_41697C.1
atggctgatcagcttcggcggcgatgggcggcggcggacgacggtgtcctgtacgaggtcgcccgccgcatcccgtgcgagatcgatcgccgccacatgggtcgcgtatgcaactcctggcgcgtggcgctcgtgaagctcaaggccccggcgccgccgcctccgctcccgtggctcgccctccctgagtccgacgatgggctgcccgccaccgtctcctgcgtcctcagcggctgccgcacccacgccttctccgtccttcaaggagcacgcggcgcgcgctacttcggttcgtacgatggcggatggctcttcctcgccgtcggcggccaagctcaatgccaagccctcctcaacctcaagatcaacggctttcagaccctcgacctccccaacctggcgcccgtcaactcagtgtacccgaatgaagtgaatccgaaccgtgaccgtgagatggccatcgtcgccgccaccctctcgtgccagccaactgaacaaggatgcatcgtcgccggcatcatcgaatcatctcccaacctcgtcgccgttggccatgtcacccggagcattgcgttctggcggatgggcgatcaggtggtcttacctgttttgtgggcactggaggaggacaacccattgatgcggctggaagaagtggaggacctcctatgccaccatggagccttccatttcctcacccgagcggaagacgtccttgcgtgcgaagaaccaccggtcttctacagagattccgtgagtctggtcccggcaaacatgttcttcctgccgcgcgtccacgacgagaacgagactgttcttgctcgctacctcgtggggtccggcaagaagctgctcatggtggtcaggctagctagtggccggggtcagcgcacgacgtcggcgttccgggtgttccagaagaaaaagttcaacaccggcgaagaagacgagccgtcccagaatcgctctgctcattttgagtactactggagcgagctggacctggacgagctcgatggccggatgctgttcgtcggactaggctgctccagatcctacaaggcgggtgatggcaggtaccccgacatggaggagggcgtctacttcttggatgatccgagcatccaccagatgatcatcggtgatgcacccaaaccgccgtacctctgcagtgacaacggtaaatggtcgagagcaccaactgatccccagggccaggtcgagcgctgcttcccggagcgaggcccatcgatccactcgcctccgcctgtcagcgagcttgtagaggaaccagggcaagcgccgcgcctgggctcgggaggcacgaagccacaagccgaagtctcacgttggaggagtcggagctccgcgccgttgcctcgtccggtccccccgtgccgtggtcgtcgtcgcctcgccagatccaccacagccgccgtggtcatcgtcggatccagcgagcccgccgccgccaagctcgccacgccgtcggcgagctcatctgcgccgtcgtggggggaagaagacggcgacgtcgagggacagccaccgcgttgtggccgccaccgcccgatccggcgagcccgccgccgccaagctcgccacggatccggcaagctcgtccgctgccaagctcgccacgccgtcggcgagatcgtccgcgccgtcgtgggggaggaggacggcgacatcgagccatccgccctcaccgctgctccccgccgccgccagatccggcgagtccacgtccggatccggcgagcccgccgctgccaagctcgccacgctgtaggcgagcttgtccgccgccaagctcgccacgccgtcggcgagatcgtccgcgccgttgtaggggaggaggacggcggcgtcgagccatccgccctcaccgctgctccccgccgccgccagatccgccgctgccgccaccgctactccccgccttcgctagatccgccgtcgccagagctcgggcggcaccgatctgccgccggaggcagagagaaaagagagggcgacgaggggaggggagaggagaagagaaccgagcaacgctgtcgcgacttccttgccatacttgcgctgaagcctggaatggatctgaccgggactgacataccaactccaggagttagcacgccggctccggctagggacgagagccaggaagctctcatcattccgacgggacggggcgaggcgtgtgacaggccgggtgaagaagccgaggaggagccggttgacctgctccgggagctgctcct

SEQ ID NO: 38021 - DNA, 1131 bp, Oryza sativa
  Clone ID: PAT_MRT4530_41698C.1
gcgttcgccccgcgtccgcccagcgtccgggcacgcgggcggcttttctctgcttccttcgatcccatccatgtccaggttgatggccgccatgctgctcggtggcgcccgcgtcgccggtaacaccaccaccgccgtgatggcgcttcatcatccgaggccgtcgtacttcctccctccccggccgcggctggcggcggcgagctggagccgcctccgcctgcagaccgcgccgagatcatcccaggcgtacgacaactcgccggcggacgaccgaagggacgtcggggacaggtacagggacgccgcggaggaggcgaaggaggccaccggcgacgccaaggagcgggtgaaagggatggccggggaggccaagggcagggcggcggacattgccggcagggccaaggacgagaccaaggacacggcgtcgcgcgcggccgacgcggcgtcgcgggcgacggaccgggcgaagcacgaggccgccgacaaggcggcggacgtgaaggaccgcgccaaggacgcggcggacatggcgcagggcacggcgagggcggtgagggacaagacggcggagacggcggagggcgccatggacagggccggcgaggccaaggacaggacagtggaagggacgaagcacgccggcgagaaggtggcggagatgaccaaggaaggggcgagcaaggtggtggagacggcgcaggccatcggcgagaaggcgaagcaggcggcgcagggcgcgtggggccgccacccaaggagcgcggcgcagggcgtcaaggacaccggtcgccggcggcgaccgtcgacgccgacgcccgcgatgaaggagcaggacaggatcgcgcaggaggagaagaagaggcaggcccagggagaagggcgctggcttgccttaggctaaaactgcatacttgttgccatgcttatttgtactaaaagctttttttttagctgaattttagtcggttcagttcttttggttgaataatgttggcaaacttgagcctcctaatgtctgtaagactgtaactgtaatggaaaggaacttattgaagttattagcacaaagccttagagatccagctacgtacgcgtgcatgcaacgtcatagctcttcataggcac

SEQ ID NO: 38022 - DNA, 397 bp, Oryza sativa
  Clone ID: PAT_MRT4530_41699C.1
attcccgctcgaccacgcgtccgacactatgtatattaatgaagacagttcactagtatgtcgctatctttactcgatgcgggtcttgttgtggaatggacgcgatatctctgcctacgatggtcggtgcttgttgggtgcactgagctgctgtgcctgcggttaccttgccgtcggcgtgcgcgcggggggggggggacgtgctctggtggtggggtgtggcacgttggtttctttctttggcggggagctttgccgagtgggccctcccgtccctcggcgatgcacctcatggggtggacgaccctcctaggctctgcattccgcttattgctgatgttctggccgaggtttgcgtcctggactgtgtgctctgcctgatgctggtgggacttgc

SEQ ID NO: 38023 - DNA, 3765 bp, Oryza sativa
  Clone ID: PAT_MRT4530_4169C.1
atgggcaatattgaacaacttaatggaagtaattatgcttcatggaaggagaagctggaaattactctagctctattggatattgattatgccctccataatgatcctccggttgagcctagaccggaaaatgagaattatgagacattaaaaaggatatatgatgaagtaaaggcaaaatgggatatttcaaaccgtaaatgccttatgattatcaagagctccattattgacgcaataagaggagcagtcccagatactcagacagccagagaatatcttgctaaagttgaggaacaatttaaaggctcttctaaggtttatgccaccactcttattaaaagattggtcaatgaaagatacgattttactgaaaatctgagggaacatattatgaagaaatgtcacatggtttctaagcttaaatcaatggaaatggaaatctctgaaggttttcttgtccatttcattatgtcatctctgcctcaggagttttctccatttacgatcaattataatgcaatgaagatcaagtggggcattgatgaattaatagccatgtgtgtacaagaagaagaaaggcttaaggcagaaagagttgaccatgcaaatttatttaagcactccgagaagaaaaagtataagaaatttaagaaggagtatttgaagcctaagcctattcaatttaaagaaaaagggcaatcttcgaatcaatcccagcagaataaatctggaggaaatccctatacagaagaaaagggaaaagaaaaggatgggtgctacttttgtggaaagagtggacaccgccaaaaggactgtattggatttatgagatggctcagtaagaaaggtactgatgttatttcttttgttgatgaatccctaaatattgattatgccaccaattcttggtggattgactcaggagcgacaattcatgttgcaaattccttgcagggattcgctatgaggaggaccctaagaagagggcaaagaagaattagagttgctaatggagttgaaactgaagttgaggccattggagacttcactctcacacttcatactggcttcaaacttcagctgcatgatgttctttattatcgtttgggccatatttcaagggggggaattgagcgtctcattaaagaaaacatcctttatcctttggacttctcagatgcagatgttgatcactgcattgattgcatcaaaggaaaatattccaagcaaatcaagaaaggtgcaaatcgaagtatgggagttttggaaatcatccacacagacatctgtggtccatttaatgaaaagtctgaccgtggtggtgaatactatggtagacatactacttatggtcaaattcctggaccttttgcgaggttcttacaggaaaatggcattaaggcccagtactcagcaccaggcgaaccccagcaaaatggagtagctgaaaggcgtaatcgcactcttatggatatggtacgaagtatgttaagtcactccactctgccggtaaagttatggatggaagctcttaaaacagctacacacattcttaacagggttcctagtaaatcagtccctaagacaccttttgaattatggactgggaagaaaccaaccctaaattattttcatgtgtggggttgtcctgctgaagcacgagttttcaatccaaatatgggaaaattagacatcaaaataatcagttgtcattttatcggttatcctgataagtcaaaggcatatagattctactgcccaaatcagtttacaaagttcattgagacaagacacgctgtgttcttggaaaatgacataatcaaggggagtatgacacccagagaagttgttctggaagagaaacgaaattatattccaatgcctataattgaagaacccgttttctcaacacatactcatgttgcaccttcaatagaaagaaataatgatgcaacacctgctgaaactcctgcaactacttctagtagtgtatcaaatgatgagaataatgaggatgctcagcagccccagattgtgatagatgagcaaaataacgaacccgtcagaagatcacaacgagttagaaagtcagcgattccaagtgactatgtcacttacataaatgaagaggtgaataaacctatgggtgaagaggtgaatgagcctatactagataatgatcccatctcatttaaagaagcaatgaagagtaaacattcgtctgaatggctaaaagctatgaaagatgaaatgaaatccatgagtactaataaagtctgggacttagtagaaattcccgaaggagccaaaacagttggctgcaaatgggtctataagactaaacgtgaccccaagggaaatatcgaaaggttcaaagcaaggcttgtagcaaaaggatttacgcaaagagaagggattgattataatgaaacattttctccagtatctactaaggattcattcagaattattatggcactagttgctcattatgatttggaactacaccaaatggatgttaagacggcattcctgaacggtgatttgtatgaagatgtatacatggcacaaccagaaggttttgttatgaaaggaaaagaacatatgggatgtcatctaaagaaatcgatttatggactaaagcaagcatcaaggcagtggtatctaaagtttgaccaaatcataagacaatttggttttaaagaaaataaaaaggatgactgtatatacactaagtttaaggagagtaagttcatcttcctaatattatatgtcgatgacatactcttagccagtaatgataaaaatatgctactggaaacaaagaaatttctggcctctaagtttgaaatgaaagatctcggtgaagccaattatgtgttgggtatagagatttaccgaggcagatcaaatggtgttttggggctatctcagaaagcatatatagaaaaggtactgaaaaagtataatatgcataattgttcagcctcgcctgctcctataatgaagggtgataagtatggaaaattccaatgtcctaagaatgagtatgaagctgcgcagatgaagtcaatatcatatgcttcagctgtcggaagcataatgtatgcacaagtgtgcactcgccctgatttagcttttgttaccgggatgcttggcagatatcaatctaatccaggtctagaacactggaaattagctaagaagaccttgcgttatcttcaaggcactaaagacctcatgctcacatatagaaagtctgaaaaccttgaagttgttggttattcggactccgatcttgcagggtgtgttgatgataagaaatccacgtcaggttatatattcacccttgcaaggggagctatatcgtggaaaagctccaaacaaagagttactacatcgtcgacaatgcaggctgagtatgtggcatgttatgaagctactggacaggcaatatggctgaaaaactttatcccgggattaagagtggtcgacagcatatcaaaaccactcaaattatactgcgataacaaaccagcagtatactatgcgagtagcaacaaatcaagtgcttctgccaaatacattgatatcaagtaccatgttgtgaaagaaatgatccaggatcagacaataagcattgagtatatgaacactaagttgatgttagcggatccacttacaaaaggcctaccacctgttgtatttaaagaacatgttgccggcataggtttggtagaaaagccttcgatcctggaataa

SEQ ID NO: 38024 - DNA, 290 bp, Oryza sativa
  Clone ID: PAT_MRT4530_416C.1
agccgccaggaaatattaaaaggaaaacggggaacaatacctaaagggtttaaaaaatggaaaacaaccgggcaacatgggttttgggaaaaaacccccccaaaataacccccttttataaaaaaaaaaggttctttggttccccccttcttccgctgggaaaaagggcaaaaagggccaaatttttagtttttcccgccccccggttaccggaacaaccaaaaggtcaacaaaacttgcagccttaaatttttttggcgggggggggcaccccaaaaaaacggggggaa

SEQ ID NO: 38025 - DNA, 435 bp, Oryza sativa
  Clone ID: PAT_MRT4530_41700C.1
atgcgtccatccgtgtggaccgcccgtccgttgccgccgctgcagggccgggggcccctagattttgggagcctcgggcggccgcacggcctgacccccctagggccggccctgtgccgccgccgcctccgtttcgactgctgcctccctatcctcttccccatcgacggttgtcctcccacaggatcatggagagttggaggcatcaaatctggccatcgaatacagccaccgtgggtgttcgtcacgaacaaccccaccacccaacagagaggagagggaggaggaaacgatgcaacgatgctactggtgaggcaggtcgtcgacggctccgtctccgcacggaggctacccttccaagccaccttgcatgccgccatggcagcgtcaacccctacctgctccttgccaccccgtcacttcctgccgcaatga

SEQ ID NO: 38026 - DNA, 584 bp, Oryza sativa
  unsure (1)..(584): unsure at all n locations
  Clone ID: PAT_MRT4530_41701C.1
cgcggagcgaccgaggcggagcggggatgacgagcgaggcaaagcgccgacgaagagaagaggcgccgaagacgagggggggggagggggggagtgccaaaacgagcaggcgaagcaaggcgggcagcggaggcgagaggcagaacagcgtgagatatgcccggcacgaagagcgggggcggggagagagggggaaaggaaaaaagaaaangaacgggagggggcgcgacgccgagaagcggcggagccgtaggaaagagcgaggcgagagagaagagaaggggggcggggggggaaacacgcagccggtcaaacggggtccggggacacggaaaggggaagacgcacggtgtacacgaactggaggcgggaggaagcgagagggggtaacggaaaggacgcgccagcgcgagggaggaagcgacgagagagggagaaaagggacgcggagcgagagcaggcaagagacggggcatcggagggagggaaatgacacccagacaggtatgaagggcggggggcgttcgagcgttcagcggatacgctcaggattccgttatcgcgcaaccaggcgaagaggatag

SEQ ID NO: 38027 - DNA, 1204 bp, Oryza sativa
  Clone ID: PAT_MRT4530_41702C.1
tttttttttttttttttttttttttttttttttttttcttgtggttccccgggctgctggacaatatcgaaatctgattgtaaaatattattattcagacggtaaaacacttaaaaatcaactagggaattcctgagccattcaattaatctgcaatatacaatagaaaacttcctgacttaaatacagttcactagaaggaagctttatacacggtcggaggtttcttcaaacaattagatcgactactaaccaataaaccaacagaaagaaaaaaaaacagaaaatagggaaaagaaacttgagacagatatcacacaccggctaaaagcaagaaaaagaactattattaacaatacggaaatgtttgatttctccactgcaatatgtgatcatctctggaactttatggcttcagatgaagtgctgaaccaaaaactactcattgcaaagcctcaaaagcaacgagactgtcttctggcattccattggagggggaaattctcagatttcaagtatcgtcgacttgagaatggaagacaaagcttggaaatgtagttgtgatgtccttgagatattggagtgtcatgtttttcagtaaagaaggatgtcaggcagacaatttttgtgtttgtggcaacttagtaagattgctcaacactgctataaatatatcatatttcttatcaatgatgctctctatgacttcatccgaaagattcattcccgactcagcaagtgttgcaacaaccatttgcttaacctcttgtctttcaatgaacccttgttgcttgaggtcatatagagtcaattttctcgtcgagaggtgcatttggatgaaatactgagagcgcacgggcaaattcttcgaatcctgcaagacagggaaagaaatgcactcgttgttagcagaaagcaaattatgtggcaacatcattctacggtcagcaaataaactctccttcttgttggtcttgaacagcgccaactgaaactcctccttgttgatcagtccgtcatcgatcaccgcgctgctgatcttcttgaacagctcatacaacgcctcaacctcgctcacactaaagacggtctccctggcgaggatttcgggatcctcgagccccttgggctgcttgaggtcgaggtcgcagcacttgagtagcacgccgcagagctgcttcaccccctccagacactgcaacat

SEQ ID NO: 38028 - DNA, 171 bp, Oryza sativa
  Clone ID: PAT_MRT4530_41703C.1
atgcatccacgtgcaaacgtggtatacccgccgtcatcagtctcctaccgctgccatgccggccttcctactgtcaccgcatcaacctcccgcgttgtcagtcaggccggcctacctgccgtcgcccgcagtgacctcttggcgccacccgtgtcggcatctcatagctga

SEQ ID NO: 38029 - DNA, 1722 bp, Oryza sativa
  Clone ID: PAT_MRT4530_41704C.1
atgtggcgggctctcgcggcggcggcggcggcggtggcggtggcggtggtcgtggcggcgcggccggcggcggcgactgacccctacgcgttcttcgactgggacgtcggctacgtcaccgcggcgccgctcggcgtcaagcagcaggcaaaactcgcctcaattattctcctcggtgtgataggcatcaacggcaagttcccgggaccaaccgtgaacatcagcaccaactggaacgtcgtcgtcaacgtgctcaacgacctcgacgagcccctcctcatcacctggaatgggatccagcaccggaagaactgctggcaggacggggtgctgggcacaaactgccccatcccgtcgggctggaactggacgtacgagttccaggtgaaggaccagatcggcagcttcttctacttcccttccaccggcctccagcgcgccgccggcggctacggcggcgtcgtcgtcaacaaccgcgacgtcatcgccgtccccttcggccgccccgacggcgacatcaccatcttcatcggcgactggtacaacaagaaccacacggatctgaggaagatgctggacagtggcaaggacctcgggatgccggacggcgtgctgattaacggcaagggcccgtacaggtacaacgacagccttgtcccggccggcatcgagtacgagaccatcaatgtggatccgggcaagacgtacaggatccgagtgcacaacgtggggacgtcgacgagcctcaacttcaggatccaggggcacaacatggtgctggtggagacggagggctcctacacgacgcagcagaactacaccaacctggacgtccacgtcggccagtcctactccttcctcgtcaccaccgaccagaacgcgagctccgactactacgtcgtcgccagcgcgcgcatggaccagttcgacaagtccttctccatgaaccaagctcgctccgtcaggtggaacctgagtgccggagcggcgaggccgaacccacagggatcgttcaggtactcgtcgatcaacgtgacgcaggcgtacctgctgcggagcacggcgccggtgacgatcaacgggcggcgccgcgcgacgctgaacgggctgtccttcacaccgccagagacgccgctgcggctcgccgacgcgtacggcgtcaggggcgtctactcgctcgacttcccggagcggccgctgcgcggcgccccccggatgggccgctccatcatcaacggcacctaccgcggcttcatggagctcatcttccagaacaacgacaccaggatgcagagctaccacatggacggctatgccttcttcgtcgtcgggatggactacggcgaatggacggaggatagtaggggtacttacaacaagggtgacggcgtcgcccgcagcactgtgcaggtgtacccgggagcgtgggcggcggtgctggtgtccctggacaacgtgggcgtctggaacgtgaggtcggagaacctggactcatggtacctgggccaggaggtctacgtcagggtcgtcaaccctgaggacaccggcaacaagaccgagatggccatccccgacaacgccctcttctgcggccagcttcacaagcagcagacccctcaccacaagatggggacgtcggcggcggcggccgccgtcgtggggagccgggtggcggcggcagcaatgctgctcctcgccggagcagtcatgatctcgccgtag

SEQ ID NO: 38030 - DNA, 282 bp, Oryza sativa
  Clone ID: PAT_MRT4530_41705C.1
atggcgggcggaggtgacggcgacgtcgatggtggggacggcgacatggtgtgcatggctggtgtggacccggagtggtcacatagcatggcacatgcgctggcactggacacacgcacgtggctaagaggggatgttcctggcttggggttgaccgacgaggacgtcgatctcttaaggggccaccggacgctgactgtggatggagcggtgtcgatcggcgttgggcgagaggaggaggacgaccctgtcgcgggcccacaggtcggctgcagcaagtag

SEQ ID NO: 38031 - DNA, 2118 bp, Oryza sativa
  Clone ID: PAT_MRT4530_41706C.1
tcggcccccaccaccatcaccacctccaccaccttcgcgcccctgtacatcaccacccccgtctcgcgctggctcatcatcatcttcttcttcttctcgcccagggagagacactgtgtcagtcactgagtcacactcacagtgccactgatccgccatgagctagctcaagctgagctgcaggaggagtgcagataagagaatccgccttgctttcctcgccgcgcgcattctcgtcgtttcccaaggaagcttcctttcttttcttcttctccggtcagtcgcaatgtggcgggctctcgcggcggcggcggcggcggtggcggtggcggtggtcgtggcggcgcggccggcggcggcgactgacccctacgcgttcttcgactgggacgtcggctacgtcaccgcggcgccgctcggcgtcaagcagcaggtgataggcatcaacggcaagttcccaggaccaaccgtgaacatcagcaccaactggaacgtcgtcgtcaacgtgctcaacgacctcgacgagcccctcctcatcacctggaatgggatccagcaccggaagaactgctggcaggacggggtgctgggcacaaactgccccatcccgtcgggctggaactggacgtacgacgtacaggtacaacgacagccttgtcccggccggcatcgagtacgagaccatcaatgtggatccgggcaagacgtacaggatccgagtgcacaacgtggggacgtcgacgagcctcaacttcaggatccaggggcacaacatggtgctggtggagacggagggctcctacacgacgcagcagaactacaccaacctggacgtccacgtcggccagtcctactccttcctcgtcaccaccgaccagaacgcgagctccgactactacgtcgtcgccagcgcgcgcatggtgaacgacaccgtgtggcgccgcgtcgccggcgtcgccgtcctccgctactccaattcccgggcctccggctccccgaccctccccaggaccagttcgacaagtccttctccatgaaccaagctcgctccgtcaggtggaacctgagtgccggagcggcgaggccgaacccacagggatcgttcaggtactcgtcgatcaacgtgacgcaggcgtacctgctgcggagcacggcgccggtgacgatcaacgggcggcgccgcgcgacgctgaacgggctgtccttcacaccgccagagacgccgctgcggctcgccgacgcgtacggcgtcaggggcgtctactcgctcgacttcccggagcggccgctgcgcggcgccccccggatgggccgctccatcatcaacggcacctaccgcggcttcatggagctcatcttccagaacaacgacaccaggatgcagagctaccacatggacggctatgccttcttcgtcgtcgggatggactacggcgaatggacggaggatagtaggggtacttacaataagggtgacggtgtcgcccgcagcactgtgcaggtgtacccgggagcgtgggcggcggtgctggtgtccctggacaacgtgggcgtctggaacgtgaggtcggagaacctggactcatggtacctgggccaggaggtctacgtcagggtcgtcaaccctgaggacaccggcaacaagaccgagatggccatccccgacaacgccctcttctgcggccagcttcacaagtaccagaagcagcagacccctcaccacaagatggggacgtcggcggcggcggccgccgtcgtggggagccgggtggcggcggcagcaatgctgctcctcgccggagcagtcatgatctcgccgtagagtggcgacgtgtttcttctgcaaggaggtgactccgtcgtgtaggattgtttaggatcagggttcaggatcgtagcctgttttctctgttgatatgagtttgtcagtgtgccgcttgattgtgctgcccattgttcgttttcttttcatttttctttttacctcattttgggttcttttagggtgggtagagattgcttcttgattcgattcgttcgtgcatttgcatttgttcaccaggatcaactctggttactccaattctttttggtagtgtaactctgtttgatcgtctg

SEQ ID NO: 38032 - DNA, 553 bp, Oryza sativa
  Clone ID: PAT_MRT4530_41707C.1
gaatgggatccagcaccggaagaactgctggcaggacggggtgctgggcacaaactgccccatcccgtcgggctggaactggacgtacgagttccaggatctgaggaagatgctggacagtggcaaggacctcgggatgccggacggcgtgctgattaacggcaagggcccgtacaggtacaacgacagccttgtcccggccggcatcgagtacgagaccatcaatgtggatccgggcaagacgtacaggatccgagtgcacaacgtggggacgtcgacgagcctcaacttcaggatccaggggcacaacatggtgctggtggagacggagggctcctacacgacgcagcagaactacaccaacctggacgtccacgtcggccagtcctactccttcctcgtcaccaccgaccagaacgcgagctccgactactacgtcgtcgccagcgcgcgcatggtgaacgacaccgtgtggcgccgcgtcgccggcgtcgccgtcctccgctacttcaagtcctcggaggatcctcataagatgaggagcatagattaa

SEQ ID NO: 38033 - DNA, 717 bp, Oryza sativa
  Clone ID: PAT_MRT4530_41708C.1
gtgtcagtcactgagtcacactcacagtgccactgatccgccatgagctagctcaagctgagctgcaggaggagtgcagataagagaatccgccttgctttcctcgccgcgcgcattctcgtcgtttcccaaggaagcttcctttcttttcttcttctccggtcagtcgcaatgtggcgggctctcgcggcggcggcggcggcggtggcggtggcggtggtcgtggcggcgcggccggcggcggcgactgacccctacgcgttcttcgactgggacgtcggctacgtcaccgcggcgccgctcggcgtcaagcagcaggtgataggcatcaacggcaagttcccgggaccaaccgtgaacatcagcaccaactggaacgtcgtcgtcaacgtgctcaacgacctcgacgagcccctcctcatcacctggaatgggatccagcaccggaagaactgctggcaggacggggtgctgggcacaaactgccccatcccgtcgggctggaactggacgtacgagttccaggtgaaggaccagatcggcagcttcttctacttcccttccaccggcctccagcgcgccgccggcggctacggcggcgtcgtcgtcaacaaccgagacgtcatcgccgtccccttcggccgccccgacggcgacatcaccatcttcatcggcgactggtacaacaagaaccacacggtttttgattttgagaag

SEQ ID NO: 38034 - DNA, 249 bp, Oryza sativa
  Clone ID: PAT_MRT4530_41709C.1
atgggctcgtcgaccttgacggtcatcttagggcttggggtggtagcggtgaccatgaataacccggagtcccgacccacccccaacgaggcagatcaggtattcccgtgggccgtattacacggtcacgtcatccatcccgtgtcgcaggtgcggtcccgcattgctatgccccacgcggcagtgacgaggaggcacacgccagccgcgccgcgccgcgcgtgctcgggtataaatatgtacacctag

SEQ ID NO: 38035 - DNA, 4224 bp, Oryza sativa
  Clone ID: PAT_MRT4530_4170C.1
atgggaacccctggagatcaagcatcttatgcctcacaaatttccggaataatgggaaatattgaacaacttaatggaagtaattatgcttcatggaaagaaaagctggaaattactctagctctgttggatattgattatgccctccataatgatcctccggttgagcctagaccggaaaatgagaattatgagacccttaaaaggatatatgatgaagtaaaggcaaaatgggatatttcaaaccgtaaatgccttatgattatcaagagctccattattgacgcaataagaggagtagttccagatactcagacagccagagaatatcttgctaaaattgaggagcaatttaaaggctcttctaaggtttatgccaccactcttattaaaaggttggtcaatgaaagatatgattttactggaaatctgagggaacatattatgaagaaatgtcacatggcttctaaacttaaatcaatggaaatggaaatctctgaaggttttcttgtccatttcattatgtcatctctgcctcaggagttttcttcatttacaatcaattataatgcaatgaagatcaagtggggcattgatgaattaatagccatgtgtgtacaagaagaggaaaggcttaaggcagaaagagttgaccatgcaaatctatttaaacactccgagaagaaaaagtataagaaatttaagaaggagtatttgaagcataagcctattcagtttaaagaaaaagggcaatcttcgagtcaatcccagcagaataaatctggaggaaatccctatacagaagaaaagggaaaagaaaaggatgggtgctacttttgtggaaagagtggacaccgccaaaaagactgtattgggtttatgagatggcttagtaagaaaggtactgatattatttcttttgttgatgaatccctgaatattgattatgccaccaattcttggtggattgactcaggagcgacatttcatgttgcaaattccttgcagggattcgctatgaggaggaccctaaaaagaggggaaagaagaattagagttgctaatggagttgaaactgaagttgaggctattggagacttcactctcacacttcatactggcttcaaacttcagctgcatgatgttctttatgtaccctctatgaaaagaaacttagtttcagtttcacgtttagataacgatggttactattgtacttttggaaacaatagatgtataattatgcatgataataaagaggttggtctcgccgttggatgggaacaactttatcaaatctctgtgtgcgatgccacctataatgttgactcctcctcaaatgcaaatatcagtaccaaacaaaaacataacgataatgagacttcttcgaaattatggcactatcgtttgggccatatttcgagggggagaattgagcgtctcattaaagaaaacattctttatcctttggacttctcagatgcagatattgatcactgcattgattgcatcaaaggaaaatattccaagcaaatcaagaaaggtgcaaatcgaagtatgggaattttggaaattatccacacagacatctgtggtccatttaatgaaaagtcagtggatggatttgattcattcataacattcaccgacgattactctcgttatggatatatttatccaatcaaagaaagatctgaggcattagacaaatttaaaatcttcaaagcagaagttgagaatcaacatgatcgaaagatcaaaattgtaagatctgaccgtggtggtgaatactatggtagacatactacttatggtcaaattcctggaccttttgcgaggttcttacaggaaagtggcattaaggcccagtactcagcaccgggcgaaccccagcaaaatggagtagctgaaaggcgtaatcgcactcttatggatatggtacgaagtatgttaagtcactccactctgccggtaaagttatggatggaagctcttaaaacagctacacacattcttaacaggattcccagtaaatcagtccctaagacaccctttgaattatggactgggaagaaaccaaccctaaattattttcatgtgtggggttgtcctgctgaagcacgagttttcaatccaaatatgggaaaattagacctcaaaacaatcagttgtcattttatcggttatcctgataagtcaaaggcatatagattctactgcccaaatcagtttacaaagttcattgaaacaagacacgctgtgttcttggaaaatgacataatcaaggggagtatgacacccagagaggttgttctggaagagaaacggaattatgttccaatgcctataattaaagaacccgttttctcaacacatactcatgttacaccttcaatagaaagacataatgatgcaacacctgctgaagctcctgcaactacttctagtagtatatcaaatgatgagaataatgaggatgctcagcagccccagattgtgatagatgagcaaaataacgaacccgtcagaagatcacaacgagttagaaagtcagcaattccaagtgactatatcacttacatgaatgaagaggtgaatgaacctatgagtgaagaggtgaatgagcctatactagataatgatcccatctcatttaaagaagcaatgaagggcgaacattcgtctgaatggctaaaagctatgaaagacgaaatgaaatccatgagtacaaataaggtctgggacttagtagaaattcccgaaggagccaaaacagttggctgcaaatgggtctataagactaaacgtgaccccaagggaaatatcaaaaggttcaaagtaaggcttgtagcaaaaggatttacgcaaagagaagggattgattataatgaaacattttctccagtgtctactaaggattcattcagaattattatggcactagttgctcattatgatttggaattacaccaaatggatgttaagacggcattcctgaacggtgatctgtatgaagatgtatacatggcacaaccagaaggttttgttatgaaaggaaaagaacatatgggatgttatctaaagaaatcgatttatggactaaagcaagcatcaaggcagtggtatctaaagtttgaccaaatcataagacaatttggttttaaagaaaataaaaaggatgactgtatatacgctaagtttaaagagagtaagttcatcttcctaatattatatgttgatgacatactcttagccagtaataacagaaatatgctactggaaacaaagaaatttctggcctctaagtttgaaatgaaagatctcggtgaagccacttatgtgttgggtatagagatttaccgagacagatcaaatggtgttttggggttatctcagaaagcatatatagaaaaggtactgaagaagtataatatgcataattgttcagcctcgcctgctcctataatgaagggtgataagtatggaaagttccaatgtcctaagaatgagtatgaagctgcgcagatgaagtcaataccatatgcttcagctgtcggaagcataatgtatgcacaagtgtgcactcgcccagatttagcttttgttaccgggatgcttggcagatatcaatctaatccaagtctagaacactggaaattagctaagaagaccttgcgttatcttcaaggcactaaagacctcatgctcacatatagaaagtctgaaaaccttgaagttattggttattcagactctgatcttgcagggtgtgttgatgataagaaatccacgtcaggttatatattcacccttgcaaggggagctgtatcgtggaagagctccaaacaaaaggttactgcatcgtcgacaatgcaggctgagtatgtggcatgttatgaagctactggacaggcaatatggctgaaaaactttatcccaggattaagagtggtcgacagcatatcaaaaccactcaaattatactgcgataacaaaccagcagtatactatgcgagtagcaacaaatcaagtgcttctgccaagtacattgatatcaagtaccatgttgtgaaagaaatgatccaagatcagacaataagcgttgagtatatgaacactaagttgatgttagcggatccacttacaaaagacctaccacccgctgtatttaaagaacatgttgccggcatgggtttggtagaaaagcctttgatcctggaataa

SEQ ID NO: 38036 - DNA, 1532 bp, Oryza sativa
  Clone ID: PAT_MRT4530_41710C.1
tgcaggaattcggcacgaggccttcccaagagacgcagatctccaccccgcgctcgcctcgcttcccccaaaaagtcttctcgtgagagctttcccccccccccctcctccacccaacaaatccccagcctcccagattcgtggcggaggctgcggcctgcggctgttctagggttagctctcgctccgccggcatttctcggtagataaagtattgtaagggcttgggtttgcaaccggagatggatgctaaaaagaagaggaacaagaagaagaaggggaaccaagggaagaacactggtgatgtaacgtccagcactgcagaggctgccattcggtcccacaatcatgagacagcccctaatgaccatcataatggcactgatgctgatgatgcaatgtccactgttggagaggaagctcctcagtaccagaatcatgagccagatcgacaggcaaatcatgatagcacaaacactgatgatgtcatgtcctctgttggagaggggattccatttcagaaccttgaccctgccatgacacatgaaaatcacaaagtcagtagtacagcccatgctgatcagaggagtgttgagatgtcagattccaccgtggagcttgacatgcacagactatatgaagcaaagcttatattgccaatgcaggataaattacatgatacgataaagaagttggaagatgagaagagtttgtggcatcaaaaaatgagctccatggagattgaggttgaaaagttgcataacaaagtggattatcatgcacagaatgaggtccgtttggaggaaaagctcaataatttacagaatgggtatgatgtgctgattaagaaggaggtagctttggataacaaagtcaggtccatagaggtcatcaatgatgccttaactcatcaggagacgtctcttaaagagagattaagtggactggaggagacaaataaagtactgcttgtacaggtgaaggtgctggaggaagcttcaaacaatactgttgaggaaagccagaggttggtaaaaggttttgatgaactggcatcaagattaggagtctttgaagcaaagtctgctcttactgaagcctccgtgactaaaaagggtaatgaactgattgttgatagaagtgtaaacagttctgcagcaattacttctgtggataactatagtccaatcaacagcagtcctagcaacgcctatgttagtaatcatctagaagaagctccaatgcaacttccagaaacaacaatcaatgatgtttcttccgagggcctcattgacatgaatgcacatcaaaggtcaaagcaagattttgatgaaccaagaacaagcgaagaaattctgccagttgcattagatgatatacagattcatgaggaagacccacaaccaccggtagccgatgatgaggcagaggaggttccattttctgatgctccaatcgtcggtgctccattccggttgatttcattcgttgctaggtatgtcagtggtgctgatttggtgaaccagaagtaa

SEQ ID NO: 38037 - DNA, 341 bp, Oryza sativa
  Clone ID: PAT_MRT4530_41711C.1
tcactacggtggccgggcgtggcggcgagcagcgaggtggccgtcaagacctcgccgagggtgccgaccgcttggccctcgccgtcgacgaccacgaggttgtcgccgacgacttccgcggcgccaccttccaccaccgccaccacgcacttgtcgagaacgcctacctcccccacgtcctcgccgagggccgcgccgtcaccgtccgcaaccgccagcgccgcctcttcaccaacggggtggcggcagtcgggcgcggtagcggcgagcagcgaggcaaggctttgtcgtccgctcgtcgtcctcctcctggtcgtcgcatgcggcggatacgtctttaa

SEQ ID NO: 38038 - DNA, 527 bp, Oryza sativa
  Clone ID: PAT_MRT4530_41712C.1
cccggtccgatcgatcgatcgaatcgaatgcccccgccgccgccgcctcctcggcgtcgagctcgaccgtgccggcgggttgcccccctctcctcctcctcccccggcgacgcgtcggtcgctgagggagcttgtgttggtgctcgccccgttaaaccccccgaggcggcgagcacgggctgggatggtggtgatcgagcgggagccggctgtcgaggcgaccccggcggcggcagatgagccggctgcctaggagccggcggcgggtggtgcggccggaggggacgcggcgagggcggctggggaagacgaggaggaggccttcgaggacgcgctgaccgacgagctggttcgggagatagctatatgccgagcacatgctgcacaggcggaatggaacaagttctttggtgctggtgaatatgagagggcattgtcgcactatgagacagctctgcaaattgctgctgatctgtactctgtcgatgacatacgctctgcatgtcgttcgaatcgtgctgtatgct

SEQ ID NO: 38039 - DNA, 531 bp, Oryza sativa
  unsure (1)..(531): unsure at all n locations
  Clone ID: PAT_MRT4530_41713C.1
taaattatctttaattcaaaatcaaaatgtttgtgttattaggtgataaacctaaagcaaaattagctgtacacttagcataggcactgagtttaaattatgtatggatcgtattattaaaaggaaacatttttaagagtaggaagcatttagtggtattctataatacattatcaactacatttttcaagtataccattagtctgcatatgacgagcaaatgcattttcaagaaagaatgaaacatgtgaagttaaatttttaatgttacccctactcttctattaaatttcgttatgggacaaatgggagagagatcaaattgcctgagtcctgctggttctgcctgattttattctacttccttngtaataatcttagaaaagtttttttcttaataatcatacctatttttcaagcgtttttcttgtataatcattttacacagttatgtcctggtgaacaaatctcgtgtcggactagtcaagatgattgtctttgatttgttctagaaaagagacaggaaatgta

SEQ ID NO: 38040 - DNA, 1476 bp, Oryza sativa
  Clone ID: PAT_MRT4530_41714C.1
ttcacgttcccgtgtttttgagtgcgcggagcgcaccggaccccgcccgccgggcgtacgaggggaggaagagctgaggcatactccgaacccagccagagagctagctcagtgagcagtacacagtacactccccgggttatctctcccagcacgccagctagcttttgcttgcaatggcggactgcatgcaggagtggccggagcccgtggtccgcgtgcaggcgctcgccgatagcggcctggaggccatcccgcgctgctacgtcaaaccaccgtgcgaccgccccgcccccgaggcggacgacgcgtcctccggcgccagcattccggtggtcgacctcggcaacggcggcgacgacgagggcggccagctcgcggaggccgtggcggcggcgtgccggggctggggcttcttccaggtggtaaaccacggggtgcggccggagctgatgcgcgcggcgcgggaggcgtggcacggcttcttccgcctgccgctccaggagaagcagaagtacgccaactcgccgcggacgtacgaggggtacggcagccggctcggcgtcgagaagggcgccatcctcgactggggagactactacttcctcgtcctctcgccggacgccgccaagagcccggccaaatactggccggccaatcccggcatctgcaaggaggtgtccgaggagtacgggagagaggtgatcaagctgtgcgagcggctgatgaggttgctgtcagcgagcctggggctggacgagacgcggttccaggaggcgttcggtggggcggactgcggcgcgggcctgcgcgccaactactacccgcggtgcccgcagccggacctcacgctgggcctctccgcccactccgatcccggcatcctcaccgtcctcctcgccgacgaccacgttcgcggcctccaggtacgccgccgtgacggccactgggtcaccgtgcagcccctccccgacgccttcatcgtcaacgtcggcgaccagattgagatcttgagcaactcgatgtacaagagcgtggagcaccgcgtgatcgtgaacgccgaggaggagcgcatctcgctcgcactcttctacaacccgagaggcgacgtcccggtggcgccggcgccggagctggtgacgccggagcggccgtcgctctactaccgtccgatgaccttcgacgagtacagggtgtacgtcaggaagaatggccccaagggcaaggcacagcttgaggctctcaagggccagtcaatcacccaaaacaacgaataataaataattagtaattaattaactaattaagctacaccgatcgatccaacagcgacggcatgctaatccatggatcgaactagcaagctagctagctagcagtcagcattaattatcccatgtatgatctgaatcggaataacacatgcatgagtgtgtgtacatgggctacttaatttacgcaacatatatagttata

SEQ ID NO: 38041 - DNA, 386 bp, Oryza sativa
  Clone ID: PAT_MRT4530_41715C.1
aagatatcccatatctatatattatattattattaacaaaaacttgatatgggccgggatatctctagcacacatcttattcacataacatagagaaaacatataaggactaatcatttaataataaagcgtctaagactgactcgcttaaaaacgtgtaatagggatctatcgcatgctaggtaataatcactagatcaaacatattgggaacaaatttgatgcaatctatctgtatatgtatgttacctgctatctatgcacattgtattcatgcttacttgccagccgactacgatgcatacatgggatgccatttgctatagatcaattattcagttgaatagcctaaactcataaaacgaaccaagattcattgcctctga

SEQ ID NO: 38042 - DNA, 394 bp, Oryza sativa
  Clone ID: PAT_MRT4530_41716C.1
ggggggaaaaaataggtcctattacaaccccaagcatgacgggggcacggtggggaaaaaaaacaaaaaaaccattggcttacgggggcatacccatactttgggggggcccataaggggccccttttttccatttgcaaaaagggaacccccctttgggttttaaaaaaacaaggggaattgggtttaaaaaaggtgggccccgggaaaaaatttgagggaccccccctggaaaaaaaccccaaaggttgtaaacaaaatgggggggggccaaccccccccttttggggcttgggggtggagggggccaccctggttaagggtttcgaaaaaaaatacctttctttttcatggacaaaaaaaacgataccggggaggggcctttcccgggggg

SEQ ID NO: 38043 - DNA, 841 bp, Oryza sativa
  unsure (1)..(841): unsure at all n locations
  Clone ID: PAT_MRT4530_41717C.1
gacagattantttgttagnttgaatcgacccagcgangtcnacatggccgncncancggaaggctctnatccggagnacnagccgaacnacgcccncccaaaggtgtgcagncaagngcgcatcactgtacacaattctgtcgnggngcccttcccctcngantcnggnaaccnatcgtacgntgccnaccacttgctcggcntcggaccacactcctgccagccgccgnacngnnnaaccngcgaatnccccaagcgacnacngnttggncnncccggggctatcaaacnacccagacangtgcgcctnataacctggaaacntgatgttntcnactccaggtnnngcaaaagggtancncncttngctccntatgactngaactcctcccccgccacngaatataattctganatcnaggcttgntcaaggctgggtnacanatctcngaaaaggctggcgngangtactcgacangncaaacctgatangcgcccnaaacatccccgcccgctganggggtccaatntantngcnccntagganacccctcaaagggttttctcnaatctcccgggccgggccnntncngntnaangntcntccaancgccncntctnaacnccnggtagggannnntttcttaccccctccttcgggcctcccccanatcaanactctggnaagggcctttccncagaaacctccanccnttnaanngggggggggggtcccgggtaaacccgccntccntcccccaangcttcctcctncngtttcgggngatntcctnccgggccggngccttttctntcccaccttccgaggggnccnggcatc

SEQ ID NO: 38044 - DNA, 636 bp, Oryza sativa
  unsure (1)..(636): unsure at all n locations
  Clone ID: PAT_MRT4530_41718C.1
atgctggctcgcccgcctgcaccggcccggccttcccggctggacccacccacgcgtatgattgtgcggaaaagcatcatgctctgggccatcgttcatgctactgatatggtgggagtcacatgtcttaggtaggcgctggcagaagggcaagttgcagcatcagccggtcaaattgtatcccagcagcaatgagaaaattaaccaagctgtaggaccgttgaatcgcatcaaggacatccttgttgccaacaatcacccagctccagctatccatggacatgctcgattgagctgattatgctcaccaagtcccgccaacatgctcagtttatgagacatctcctgaatatgtacccacttgagtcatcatcatcagtgaagaatgaatgcactggggcatcatctactcaatactgaaaatcgtctgggtgtttatgcgttgaagttatgtaattgattcaaacccccccttggatttgtatttatgtgtttagtgtgattcatcttcttcctcttttgagagtactgctcctggtttgtcaattgcagtgccctttcaggttgctgcagaaaacttgtatatatatatatatatatgatcattatcatttaggttgatgatgttacnnnnaa

SEQ ID NO: 38045 - DNA, 3269 bp, Oryza sativa
  Clone ID: PAT_MRT4530_41719C.1
cacgctttttagcgccgcttcgcctctccccgctccactctctctctctctccacagcgtttgtttttgctcgcgagaaaaaccctgcggaaaatcgaaaaatctcgcctcccctcttcgtcccctcccctcccctccccactcgccgccgaagcttccggtttttgttcctcctcctcgaaccctcgggagagatcgcgtggcttgagcagcgtttcttgctcggcggcggcggcggcggcggcgttgctagatctccggcgtgacaccggtcggaatgggctggatgtcgacggggacgacgttcgggcgttgatggcaggtgtggtgttcccatgattgatgatgtggagatactgggatggttcgagatgaagaaaatgcttgtgaggtgctctgttgagagaaaccttattacctgatgacttgttaattcgaagttattctagcacaccagttgctgctggttggatctttttctttcattgctgagtaggagcgtaggagttggttcaagaatttcgttcaagatgatgcagaggccgttccgtccggaggagtactccttgaaggagacttctcctcaccttggtggtggagctgctggtgacaagctcaccaccacctatgacttggttgagcagatgcagtatctttatgtccgggtagtaaaagctaaggaccttccaagcaaggacatcactggaagctgtgacccatatgttgaggtgaagcttgggaattataagggtacaactcggcatttcgagaagaagactaatcctgagtggaaccaggtctttgccttttctaaggagcgcattcagtcatcagtggttgagatcattgtcaaggataaggactttgtcaaggatgacttcatcgggcgggtgttgtttgacctgaatgaggtcccaaaacgagtgccacctgacagcccattggctccacagtggtatcggttggaagagcggaatggacacaaggtgaagggagagttgatgttggccgtttggatgggtactcaagcagatgaagcattccctgaagcttggcactctgatgcagcgtcgatcccaggagatggacttgcaagtattagatcaaaagtttaccttactccaaagctttggtatctgagagtcaatgtcattgaggcacaagatcttataccaaatgacaggaccaggttccctgatgtttatgtcaaagccatgctaggtaaccaagctcttagaacccgggtatcaccaagccggacgctgaatccaatgtggaatgaggatttaatgtttgttgctgctgaaccattcgaggaacacctgattctgagtgtagaagataggattgccccagggaaggatgatgtacttggaaggacaatcatttctctgcagcacgtacctcggaggctggatcacaagttgctgaacagccagtggtacaatcttgagaagcatgtaattgtggatggcgagcagaagaaagagaccaaattttcaagccggattcacttgagaatatgcctcgaaggtggatatcatgtcttggatgagtcaacacattacagcagtgatttgaggccaactgctaaacagttatggaagcacagcattggcattcttgagttgggtatcttgacagcacagggcctgttgccgatgaagaccaaggatgggcgtggaacaactgatgcttattgtgttgctaagtatgggcagaagtgggtgcggacaaggactattattgatagtttcacacccaagtggaatgaacaatacacttgggaggtgtatgatccctgcactgtgatcactattggtgtatttgacaattgccacttgaatggtggggaaaaagccaacggtgcccgggataccagaattgggaaggtccgcatccgcctctctacgctagaaactgatcgagtatatactcatgcttaccctctgattgttctgacacctgctggtgttaagaaaatgggggaggtgcagcttgctgtcaggttcacatgctcatcactgctgaacatgatgcatctgtattcacaaccattgctgcccaagatgcactatgtacacccattgtccgtgatgcaggtagacaatctaaggcgccaagccaccaacattgtatcaacaaggctgagccgtgcagaaccaccactgcggaaggaaattgtggagtacatgctggatgttgactctcatatgtggagcatgcggaagagcaaggcaaactttttccgtatcatgggtgtcctaagccctctgattgcggtggccaagtggtttgatcagatctgccattggagaaatccgctgaccaccatactgatccacattctctttgtgattttagtcttgtatcctgagctgatactgccaacaatcttcctctacctgttcctgattggagtgtggtactaccgctggcggccaaggcagccacctcacatggacactcgcctctcacatgcggagagtgctcatcctgatgagcttgatgaagagtttgacacattccctacttctcgtccgcctgacattgtgaggatgcgttatgaccggctacggagtgttgctgggaggatacagaccgtagtcggcgatctcgcgacacaaggagaaaggctgcagtccctgctaagctggagagacccaagagccacggcgctctttgtgaccttctgctttgttgctgccattgtcctctacgtgactccattccgtgttgtggtcttccttgcaggcctgtacaccttgagacacccaaggttccgccacaagatgccctctgttcctctgaacttcttcaggaggctccctgcaagaactgatagcatgttgtaagctcgactgcctcatgctatgctatcgagctgcccaggcgatggctgcaatgcataagaaattggagaaacctgaactcttatctattctcttttttgtagtctatcagttgcatggttatgtatgtcttcaggtggttttgaacctttcatgtaactgctgaacgcattatgtgactggatttgcatgtatggtgcgtgcgggaaatttgttcgtggtcatcaaaaaaaaaagggaggcttactgggcatgtcatctcatacatattgcattctgtataattccatcagatatgtgcccctgaatttaggctagttgtgttaaggatgatgactgacatttgggctgcaggaagaaatttgtgttaatctgtgctcggcaattctaagtgcaggcattaaccctgaccaaaaa

SEQ ID NO: 38046 - DNA, 3678 bp, Oryza sativa
  Clone ID: PAT_MRT4530_4171C.1
atgggaactccgggagatcaagcatcttatgcctcacaaatttccggaataatgggaaatattgaacaacttaatggaagtaattatgcttcatggaaagaaaagctggaaattactctagctatgttggatattgattatgccctccataatgatcctccagttgaacctagaccggaaaatgagaattatgagaccctaaaaaggatatatgatgaagtaaaggcaaaatgggatatttcaaaccgtaaatgccttatgattatcaaaagctccattattgacgcaataagagtagcagttccagatactcagacagctagagaatatcttgctaaaattgaggagcagtttaaaggctcttctaaggtttatgccaccactcttattaaaagattggttaatgaaagatatgatttttctggaaatctgagggaacatattatgaaaaaatgtcatatggcttctaagcttaaatcaatggaaatggaaatctctgaaggttttcttgtccatttcattatgtcatctctgcctcaggagttttctccatttacaatcaattataatgcaatgaagatcaagtggggcattgatgaattaatagccatgtgtgtacaagaagaggaaaggcttaaggcagaaagagttgatcatgcaaatctatttaaacactctgagaagaaaaagtataagaaatttaagaaggagtatttgaagcctaagcctattcagtttaaagaaaaagggcaatcttcgagtcaatcccagcagaataaatctggaggaaatccctatacagaagaaaaggaaaaagaaaaggatgggtgctacttttgtggaaagagtggacaccgccaaaaagactgtattgggtttatgagatggctcagtaagaaaggtactgatgttatttcttttgttgatgaatccctgaatattgattatgccaccaattcttggtggattgactcaggagcgacaattcatgttgcaaattccttgcagggattcgctatgaggaggaccctaagaagaggggaaagaagaattagagttgctaatggagttgaaactgaagttgaggctattggagacttcactctcacacttcatactggcttcaaacttcagctacatgatgttctttatgtaccctctatgaaaagaaacttagtttcagtttcacgtttagataacggtggttactattgtacttttggaaacaatagatgtataattatgcatgataataaagaggttggtctcgccgttggacgggaacaactttatcaaatctctgtgtgcgatgccacctataatgtggactcctcctcaaatgcaaatatcagtaccaaacgaaaacataacgataataagactttttcgaaattatggcactatcgtttgggccatatttcgagggggagaattgagcgtctcattaaagaaaacatcctttatcctttggacttctcagatgcagatgttgttcactgcattgattgcatcaaaggaaaatattccaagcaaatcaagaaaggtgcaaatcgaagtatgggagttttggaaatcatccacacagacatctgtggtccatttaatgaaaagtcagtggatggattcgattcattcataacattcaccaacgattactctcgttatggatatatctatccaatcaaagaaagatctgaggcattagacaaatttaaaattttcaaagtagaagttgagaatcaacatgatcgaaagatcaaaatttttacaaagttcattgagacaagacacgctgtgttcttggaaaatgacataatcaaggggagtatgacacccagagaagttgttctggaagagaagcggaattatgttccaatgcctataattgaagaacccgttttctcaacacatactcatgttgcaccttcaatagaaagaaataatgatgcaacacctgctgaagctcctgcaactacttctagtagtgtatcaaatggtgagaataatgaggatgctcagcagccccagattgtgatagatgagcaaaataacgagcccgtcagaagatcacaacgagttagaaagtcagcgattccaagtgactatgtcatttacatgaatgaagaggtgaatgaacctatgattgaagaggtgaatgagcctatactagataatgatcccatctcatttaaagaagcaatgaagagtgaacattcgtctgaatggctaaaagctatgaaagacgaaatgaaatccatgagtacaaataaggtctgggacttagtagaaattcccaaaggagccaaaacagttggctgcaaatgggtctataagactaaacgtgaccccaagggaaatatcgaaaggttcaaagcagggcttgtagcaaaaggatttacacaaagagaagggattgattataatgaaacattttctccagtgtctactaaggattcattcagaattattatggcactagttgctcattatgatttggaattacaccaaatggatgttaagacggcattcctgaacggtgatctgtatgaagatgtatacatggcacaaccagaaggttttgttatgaaaagaaaagaacatatgggatgtcatctaaagaaatcaatttatggactaaagcaagcatcaaggcagtggtatctaaagtttgaccaaatcataagacaatttggttttaaagcaaataaaaaggatgactgtgtatacgctaagtttaaagagaaaattctggcctctaagtttgaaatgaaagatctcggtgaagccacttatgtgttgggtatagagatttaccgagacagatcaaatggtgttttggggttatctcagaaagcatatatagaaaaggtactgaagaagtataatatgcataattgttcagcctcgcctgctcctataatgaagggtgataagtatggaaagttccaatgtcctaagaatgagtatgaagctgcgcagatgaagtcgataccatatgcttcagctatcagaagcataatgtatgcacaagtgtgcactcgccctgatttagcttttgttaccgggatgcttggcagatatcaatctaatccaggtctagaacactggaaattagctaagaagaccttgcgttatctacaaggcactaaagacctcatgctcacatatagaaagtctgaaaaccttgaagttgttggttattcggactctgatcttgcagggtgtgttgatgataagaaatccacatcaggttatatattcacccttgcaaagggagctgtatcgtggaaaagctccaaacaaagagttactgcatcgtcgacaatgcaggctgagtatgtggcatgttatgaagctactggacaggcaatatggctgaaaaactttatcccgggattaagagtggtcgacagcatatcaaaaccactcaaattatactgcgataacaaaccagcagtatactatacgagtagcaacaaatcaagtgcttctgccaagtacattgatatcaagtaccatgttgtgaaagaaatgatccaggatcagacaataagcgttgagtatatgaacactaagttgatgttagcggatccacttacaaaaggcctaccacccattgtatttaaagaacatgttgccggcatgggtttggtagaaaagcctttgatcctggaataa

SEQ ID NO: 38047 - DNA, 378 bp, Oryza sativa
  Clone ID: PAT_MRT4530_41720C.1
atggacaatggatctcaacaagagtcctctgatctgcatgtgcatcacctccccatcgcaagcatcatcggagtagaggatcgcacagaggaggctgatgatgcagctgtagattaccatgatgatagtagtgaaggccaggatgaggtatcaaacaaacgtatgaaacgtcacactgatgaccaaataaagcatttggaaagtgtgtttgagaggtgcacctatctaggagggaatcaacgtgtacagttggccaagaaacttggcatggaggaaaggcaagtaaaattttggttccagaaccgacgcactcggaagaaggtggcaacctgggtggataagatacaattgtcagttagaaatggagggtctccttga

SEQ ID NO: 38048 - DNA, 1382 bp, Oryza sativa
  unsure (1)..(1382): unsure at all n locations
  Clone ID: PAT_MRT4530_41721C.1
tcaacactcctgtctccactctccaccaccctcaaatccccaaaaccccatagtagggtccaaaacgcaaaaaaaccccatccaccccttaccacctgccctaaactgccaaatccccaaaacccagggtgcaacacgcaaaaccgccacccccttcgcatttcgaaaaaagaaggccaccggccaccccaccaccacctccaccacgacgcacgcttcgagcgccgcttcgcctctccccgctccactctctctctctctccacagcgtttgtttttgctcgcgagaaaaaccctgcggaaaatcgaaaaatctcgcctcccctcttcgtcccctcccctcccctccccactcgccgccgaagcttccggtttttgttcctcctcctcgaaccctcgggagagatcgcgtggtgagcccgctcgaatcttttggtatatctttgttcccgttctttccatccatccctgcttttttcttggccgctttccgtgtaatgccggtgccatttccgcctctttggttttccccgatctgtggtttcggtcttgcccggtagagattcgggaacgggaagcgcggcggcggttgcgtgacggtttcttgagggttcttgagaggtcttggttcggttcgtgcttttatctttggtggggtgtgagtccgtgcgtgcgtggatgtttttcttttgcttttgcgaaagtgaaagtgtgcttgcgaaaagggggtaaagcgacgagcttgctgtgtgcgcgcatatgtagctgctggtttcttgcgaatggttggggtggggggatttttttgctcgattcctggttttcttgccgggttcagatctgatcttttttctgctctctcttgtgtgttttttcgagttgtttgtggttgctcacctcttgtgcaccggcaatggcaggcttgagcagcgtttcttgctcggcggcggcggcggcggcggcggttgctagatctccggcgtgacaccggtcggaatgggctggatgtcgacggggacgacgttcgggcgttgatggcaggtgtggtgttcccatgattgatgatgtggagatactgggatggttcgagatgaagaaaatgcttgtgaggtgctctgttgagagaaaccttattacctgatgacttgttaattcgaagttattctagcacaccagttgctgctggttggatctttttctttcattgctgagtaggagcgtaggagttgggttggttcaagaatttcgttcaagatgatgcagaggccgttccgtccggaggagtactccttgaaggagacttctcctcaccttggtggnggagctgctggtgacaagctcaccaccacctatgacttggttgagcagatgcagtatctttat

SEQ ID NO: 38049 - DNA, 1302 bp, Oryza sativa
  Clone ID: PAT_MRT4530_41722C.1
cggcgctcgggctcccatgccggccgccgctcacgagtccgggggagaggagcggcgcccgacggagtggagttggggggcccctccgtccccgccgccgccgctctgaaacgagccggtgttcctgaggatgagatggctaacctagaaaggcaactagcgccaggaccttccacagctccaccagctccaagcactgctaaccggatgatgaactttgtcagtgctggagtgcaggcacaggctgagagcagcagcaggcaacaacaggctgctgctgctaacaatgaggatatcgagctgcctgatgagagcgacgaggaggaagacgatgaccaaattgcgaagaagagtgttcccgctgcggtgtttggagagcttggcaacagagctgcagagaacagggaggaggaaagctctggtgcccaggagaatgggcagcttggcgcccttgagaggatcaagcgaaggcgtcaatgatctgccataggcgtggccggagagcagcccggagcggctggtccagctcgcctccgacgagcacgccacggtgcgcccgttctggctagccgcgtccacggccatctcctgccgcggctgcctcttgtcacactccttcttgacgacgtcgtcctgcgtgtcgttgacggcgccgcctcctccctctccccagcgttggcgtcggcttggcggtggtggcgaggcgggaggaccgtgtcggcgtcggcgctgggagctagagcggcaggaggcagggacaaactgcgttgcactccagctccagccccggccccgcccgccgccgaacccgatcccctgctgcttctgctgcgttgtcggcggcggcgtgaggatcgtcgacggcagctgcatggcgagacgtggccccaccgccatcggcatcccccgcgtcgagcccagcggcgcgcggtggaggaaaccaccgccagcgactccgctcagcggccggaaagaggcgaagaagaaggcggcggcaacgaggacggcggcgttgcctccccggccgccggaccccccgcgccgcgtggcggcttcgtccccactcgtcggtcgccctgccgcttgccccttgccgccctctgttggggcggcaaggggtcccaatgcaaaaaagccagccgggaccggccattttccaggcggccccttgccgctctctggtcgggcggcaggcctcgctttcgacgcatgcacgatacctttcggcgcatgcacgactactttctgccgcaccgatgcagcctcctttattcgagtgcgatacgagtatttgcccgccat

SEQ ID NO: 38050 - DNA, 267 bp, Oryza sativa
  Clone ID: PAT_MRT4530_41723C.1
aacgatcgatttattggtctgttgtttttatgatcacgcggatttgcctaggagtttttttggccaaaaataaatttcttattcttgaccagggaatacatgcattgcaaataatggggggaataaacaagttgatgccactggtttaggaggctgacgacccgcctaacccctttgggagccaaatatgatcacgggcagatgagctaacgctggttgtgtgtataccggaagatcggggagggtaatcaccgaccccgtacccgc

SEQ ID NO: 38051 - DNA, 524 bp, Oryza sativa
  Clone ID: PAT_MRT4530_41724C.1
tgaaaaactagtaaacaacgcacacgaaaagagaatcaattcaatggcttctcgatggatccgtcctgaggtgtacccgctgttcgcgaccaccggcgtggccgtggggatctgcgcgatgcagctggtgcgaaacatcaccaccaacccggaagtgagggtgacgaaggagaacagggcggctggcgtgctggagaacttcgacgaggggaagaggtactcccagcatggcgtgaggaggttctggctctccaagcgccgcgactacatgcaggccctggacaaccccaccaacccctcaaccaaaaaatagacgcaaaagtcatacttattcgatgggtacatatatatatatatatcgatttgattctcggcttcaaaatgcctatatataaatgaatgaatcgacaataagtttttaacatggggaatattcatgttaggacttgctactttacatatttggccatatatctggctggttctctaggaatgaacatttccactggattccttttattttc

SEQ ID NO: 38052 - DNA, 1174 bp, Oryza sativa
  Clone ID: PAT_MRT4530_41725C.1
tctccctccgcctttgccccgccttccctgcccttttctcttgctgagccgcttctgcattggcttgtgatgatgggggccacttctccgtcaggcctggagctcaccatggctgtccccggcctcagctcctctggttcagaaggggccggttgcaacaacaacaacgccggtggcggctgcaacatgagggacctggacatcaaccagccggcgagcggcggcgaggaggaggagttcccgatgggcagcgtggaggaggacgaggaggagaggggcgtcggtgggccccaccgccccaagaagctccgcctctccaaggagcagtcccgcctcctcgaggagagcttccgcctcaaccataccctcacgccgaagcaaaaggaggccttggcgatcaaactgaagctgcggccgaggcaggtggaggtctggtttcagaaccgtagggcaaggacgaagctgaagcagacggagatggagtgcgagtacctgaagcgctgcttcgggtcgctgacggaggagaaccgccggctgcagcgggaggtggaggagctgcgggcgatgcgggtggccccgcccacggtgctctcgccgcacaccaggcagccgctcccggcgtccgcgctcaccatgtgcccccgctgcgagcgcatcaccgccgccaccggcccgcctgccgtgcgcccgccgccgtcgtcagccgccgccgccgccccctcgcccttccaccctcgccgcccctctgcggccttctaggcccaaggtctcgcatcctaaaggccacaaaaagatgggcctcgccgtcccgtgtaaattgaaggagacgacgcagcggtagagggccccgtgtcggcgttgttgcgtcgggtccagtcgtctcagaggagtcagaggcgtggacaaaatgtttgttgcggtgtttgtgttccattggtcgttgatcttagcttgatgatctgtgattcgcgccttgctcgtctaggtttctcttgggccgacgcatgatcttttttcccccgtgtcggaccttattgggccttttgagatcgacgggccccctccttgtttcgcatgtggacatgttatttcgtccttttgggccaacaattcagcacggtggccaacggtgcgtagttcgtcgccgttttctttcaaaaaaaaaaaaaaaaaa

SEQ ID NO: 38053 - DNA, 328 bp, Oryza sativa
  Clone ID: PAT_MRT4530_41726C.1
gttcggacctggaggagcccgacggtaggaccgaatcggctgaggtatccgacggggatgatgctccaggagcaggaggaggagaacgcggtgctgccgcaagccgaggagggcaagccgctggagagcgctcgtctcgtggaccgacagctgcgccacctgccggaggcattcgaaaggatccaagggcttcgagtgctcaatgattggcgcaatcaggtacaggatattccatatgctctaggaggacttgatcatgtagaaaagcttcatgatgctaacaatgcacatgattcttattactgattccattgcactgctcttgaat

SEQ ID NO: 38054 - DNA, 160 bp, Oryza sativa
  unsure (1)..(160): unsure at all n locations
  Clone ID: PAT_MRT4530_41727C.1
ccgtcatgcaatgaagatcnttttcntnttttctctcctttctattgtctgcattgccagtcctctgctcaggtttgtatgtttttatggcaaagttataggcaatatcagtctgcagtcgccctgcacctgcacagcaacaggtgcagcccaaaagagc

SEQ ID NO: 38055 - DNA, 285 bp, Oryza sativa
  Clone ID: PAT_MRT4530_41728C.1
atggagaggacgaggagaacctccgcgtcggatgtcggtgcccctcaccctgcggagaggatcccatccttccagcgccggagagtagagaaggtcgacacagcgcgaggctctcccaacagatcaaagccccgcctcctggagtcatcgatgccgccgctgccctgcacgccgcctccacctccgcccagcgccagcgccctccacctccgcctccacctccaacgccgtgtcctcctccagcgccggcaccgcctcggcgtcgcctccgtctcctctctctag

SEQ ID NO: 38056 - DNA, 363 bp, Oryza sativa
  Clone ID: PAT_MRT4530_41729C.1
ttaatgaacgcagcgccccaactgccccctgccgcattcaatgcggtaggggcagacgtgcggcatgcccgactggcgcgcgacggtcaggaatgaccggtctgtgaccggcctgtcaccggtcacatctgactggacggacagctgtgcccccacgtcgcatctgcctccggcggagtggaggtaggtatgacccgtcccatcggaagggtcattcgaggtcctccccatgagaggacggccaccacaattctccatccattaatgggggattgacaggggtgtcccccgtgtcaggcaagggacggcgccggtgtacatcagcgggtgccccactcaaggataaaccgtggcttagcttcc

SEQ ID NO: 38057 - DNA, 1833 bp, Oryza sativa
  Clone ID: PAT_MRT4530_4172C.1
atgggcaatattgaacaacttaatggaagtaattatgcttcatggaaggagaagctggaaattactctagctctattggatattgattatgccctccataatgatcctccggttgagcctagaccggaaaatgagaattatgagacattaaaaaggatatatgatgaagtaaaggcaaaatgggatatttcaaaccgtaaatgccttatgattatcaagagctccattattgacgcaataagaggagcagtcccagatactcagacagccagagaatatcttgctaaagttgaggaacaatttaaaggctcttctaaggtttatgccaccactcttattaaaagattggtcaatgaaagatacgattttactgaaaatctgagggaacatattatgaagaaatgtcacatggtttctaagcttaaatcaatggaaatggaaatctctgaaggttttcttgtccatttcattatgtcatctctgcctcaggagttttctccatttacgatcaattataatgcaatgaagatcaagtggggcattgatgaattaatagccatgtgtgtacaagaagaagaaaggcttaaggcagaaagagttgaccatgcaaatttatttaagcactccgagaagaaaaagtataagaaatttaagaaggagtatttgaagcctaagcctattcaatttaaagaaaaagggcaatcttcgaatcaatcccagcagaataaatctggaggaaatccctatacagaagaaaagggaaaagaaaaggatgggtgctacttttgtggaaagagtggacaccgccaaaaggactgtattggatttatgagatggctcagtaagaaaggtactgatgttatttcttttgttgatgaatccctaaatattgattatgccaccaattcttggtggattgactcaggagcgacaattcatgttgcaaattccttgcagggattcgctatgaggaggaccctaagaagagggcaaagaagaattagagttgctaatggagttgaaactgaagttgaggccattggagacttcactctcacacttcatactggcttcaaacttcagctgcatgatgttctttattatcgtttgggccatatttcaagggggggaattgagcgtctcattaaagaaaacatcctttatcctttggacttctcagatgcagatgttgatcactgcattgattgcatcaaaggaaaatattccaagcaaatcaagaaaggtgcaaatcgaagtatgggagttttggaaatcatccacacagacatctgtggtccatttaatgaaaaacatactacttatggtcaaattcctggaccttttgcgaggttcttacaggaaaatggcattaaggcccagtactcagcaccaggcgaaccccagcaaaatggagtagctgaaaggcgtaatcgcactcttatggatatggtttcacttggagaccaagaacacgctgtgttcttggaaaatgacataatcaaggggagtatgacacccagagaagttgttctggaagagaaacgaaattatattccaatgcctataattgaagaacccgttttctcaacacatactcatgttgcaccttcaatagaaagaaataatgatgcaacacctgctgaaactcctgcaactacttctagtagtgtatcaaatgatgagaataatgaggatgctcagcagccccagattgtgatagatgagcaaaataacgaacccgtcagaagatcacaacgagttagaaagtcagcgattccaagtgactatgtcacttacataaatgaagaggtgaataaacctatgggtgaagag

SEQ ID NO: 38058 - DNA, 481 bp, Oryza sativa
  unsure (1)..(481): unsure at all n locations
  Clone ID: PAT_MRT4530_41730C.1
ttctaattaagtactaataaataactcgataatattcacagatgtattgcatggcatttaaatgaaaaatgagattttatgagaccttgagaccacaatacctgtgttatgtgccacaaccgtagtatgtagggttttctgcaattttgacatgagaatatgggttttcttaaccttactcttctttgtatggatgactgaacaacttcactcctgcggctgcacaacaactgcaaacatggtttctttttcatgaggtgtaattggttatggtattctctcctaaaactcagggacaaatggtaaaggtgcagcctgtgccagggaggcaaaggagaatgcagcctcgtgagttgatgatgttaatgttcctggatgctacacatgagacgtgagaagcangcaatagtcatccttaatattgcaagggaagccaggatcgatgctgctcttgagaaaacgtctagagtcatgtcaggaa

SEQ ID NO: 38059 - DNA, 534 bp, Oryza sativa
  Clone ID: PAT_MRT4530_41731C.1
cagcggtgccgggaccgggccgtcgtttgttgtttgttgggaggacgccaagtagggcgacgtcgaggagcgagacggtggcctctccccggaggtcctagtggcgtgggcgccgagccagccgcggaaggagacgcggatctaggtgttagagacggcggcgcggagaggaggagggcagaagggggaaggtggggccgggactccggcgagcggggcaatccccgttcacgtcgctcctctcgaccttcgttgcatgggatgctaccatcggttgcccactcatccgcgccaagctcgatgccatgggggccacatctaccaccagcggggcccaatgaggcacgcgggggcaaggacatgagggcgcgccacgttggggtgctcgtcaagatgtgctggtgtggacgtggatccctgacgcgcttgtttggatttctgcaggaagtcgaagctgtcccgccggcgccactccagcacctgcccgccaccactccaaaacatgctcctcgcacacgactgaagaaggggtag

SEQ ID NO: 38060 - DNA, 291 bp, Oryza sativa
  Clone ID: PAT_MRT4530_41732C.1
atggcatggcgtggcggtgcgtgcatgacatatgcaattgtccgccaaaattggtttctcacccttgcgcagatgcagtcttcttttgcagttttgttttgctgcggtctctggaacattcgtcttcgatgtcctgcaccgggagaaggtgacaataaggtttttggaagcgcttcgcgcgactgctccctcttcgcttgcgtgctgtgcgccatcatcaacgcccgcaaccgcgagtacttcctaccagtggcggacctagaaaaattgcactgggtgtgcccattctag

SEQ ID NO: 38061 - DNA, 201 bp, Oryza sativa
  Clone ID: PAT_MRT4530_41733C.1
atggcgtatcctcggccctcgcaggctatcaacaggcggctgaaggacgccattgatggttgtcaacctgaattgatgcttggccggtcagactgcctggcaaggggaataatttgtactaaaaaaattagtgggggctcccacggttacaacgccagtagtggggctcgagacctagtagtggggctcgagaccccgtag

SEQ ID NO: 38062 - DNA, 594 bp, Oryza sativa
  Clone ID: PAT_MRT4530_41734C.1
atggctgcggcgatcccgcccgaggcaagcggcctggcccacgacctcgggtccgcggccgtcaccgcaggcgtcgccctcgccctcctccgcttcttcgaggagctcgccaagcgcggggtcttcgagcagaaactcaatagaaaacttgtgcatataactatcggtatggtattcttgctcttttggcctcttttcagctcaggaagctatgctcctttcctggctgcagtagcaccagggattaatattataaggatgcttctgctggggttaggagtaatgaaaaatgaagctatgggaacttctcaagggtccactgtattatgctaccactataacttttgccacttctatattctggagaacctctccaatcgctatagcccttatttgcaacttatgtgctggggacggtatatgcattacttccagtcattcggtttcattgaagaaagctggtccttggcttttggcttccttgttgtttctgtaactgcagcacttgtagagtcccatcccatcagcacacatttggatgacaacttgactgttcctttaacatcattcctagttggtagccttgttttctga

SEQ ID NO: 38063 - DNA, 818 bp, Oryza sativa
  Clone ID: PAT_MRT4530_41735C.1
ggccgtcaccgcaggcgtcgccctcgccctcctccgcttcttcgaggagctcgccaagcgcggggtcttcgagcagaaactcaatagaaaacttgtgcatataactatcggtctggtattcttgctcttttggccacttttcagctccccgcgctatgctcctttacgggagccggtagcaccagggattaatattagcgggatgcttctaggcaagcggggagtaatgaaaaatgaagctatggtaaaatcaatgagccgatctggagacccgagggaacttctcaagggtcccctgtattatgctaccactataacttttgccacttctatattctggagaacctctccaatcgctatagcccttatttgcaacttatgtgctggggacggaatagcagacatagtggggagacgtcttggccaagaaaagcttccatacaaccccaacaagtcatatgcaggcagcatagcaatggcactagctggtttcatggcttcaattgggtatatgcattacttccagtcattcggtttcattgaagaaagctggtccttggcttttggcttccttgttgtttctgtaactgcagcacttgtagagtcccatcccatcagcacacatttggatgacaacttgactgttcctttaacatcattcctagttggtagccttgttttctgatgtttacctttgaaggaaaattactgggagatcttctgacatgtaaggaatatttcaataaggaactttggttccaatggtatgaacaaaattgcccactggtacttttaccaactaaaaaaaaaaaaaaaaa

SEQ ID NO: 38064 - DNA, 406 bp, Oryza sativa
  Clone ID: PAT_MRT4530_41736C.1
gccacgcgtccgcccacacgtccggatgaggggaaggggacaggctggcatattacagcctaggagctcaatcgtgcttcgactgtcgcagacggaatacccaaggacactcacttcgtgaccgctcaaatatgatatacatcccatgctgtgacgcgagcatctcggccgcaagaatctcgaaaacatgcggaaaattcccggatcagcagtacgcatggccacgccgacggtgccgccgccttggctgagcctcaaggtgttcttgctgagggtgagcacgtgcgaggtgtacgagtccatgctgaattctgtgacctggacccacgccccgctcacccgggacaccgagctcaatgagagcggcggcagtatcaccagcaacggccacgtgtagctccgcctg

SEQ ID NO: 38065 - DNA, 358 bp, Oryza sativa
  Clone ID: PAT_MRT4530_41737C.1
ccaggggcattaattaacaactaattaaacaagggacgttttaacccctacccggccacagtacatatacacctagaaaaaaagactaaaggacccccaaccccaacaggggggggaaacccccggaaaaacaaccgacccccgaaattttacttttgggcgcaagcaaaaacaaacttgccggtcccggggttaacggccggaataaaaaaaaaaaccacgttaaaaaggcccagcggctcaatctggggggggggaaccccggcctcaatgtaaagctgcgcgagggcccccttgccggtaaaaatccccccgatgatggaaaaggcaatccctagctgggcaagccggcccacaa

SEQ ID NO: 38066 - DNA, 614 bp, Oryza sativa
  Clone ID: PAT_MRT4530_41738C.1
tcccagaccgacctcccaccgccgcttttgcccttcctcaggtctcatctctctctctctctccctcacgtctcatctctctctctctctctctccacctggtacttttgctggaatcgatggcttacatatgtttttagaggattttagggatagatataagcatgcttgttgcaggccaaatctttcttcatttttggaattaatactgcacctgaactttttttggataaaaaagaaagtgtatcagctttgaatgaagcctactagttctttatgagtagtgtgtggtcattttcccctggttaaattgtgggatggatgtttgcttcaaagaaataaaagaaattgtgggatggacctgatggttcaaggctaattttgttttgacacttcatttcttaggtttttggtgtgtttgtgttcaagattgaataggacaagacataggggttagctctcaatttaaatgcccaagttaaaaagattgtaataattgtcaaaaaaatttgcatggaatgcttccttctctagaaagtaggaagtctgacggtctgaccccccaaaaaaaggtcagtttgtcctcttctgttttcatgataattactttccta

SEQ ID NO: 38067 - DNA, 256 bp, Oryza sativa
  unsure (1)..(256): unsure at all n locations
  Clone ID: PAT_MRT4530_41739C.1
cggacgtgtcttncggctgcttctccnccggnncaacccaccgctcatnnncgcgngtcngctaaacccgtcctcgccggctcanttanacttccngcngccgccggggtnaacaacgcggccaggcgccttaatgtggtnntccccncccccagccgccctnatggtttaactttaagcggcgaagatttaatcggtagccttcctggccatgtccgctccgccatcgtttcgcgcctcccggtcgcggacgccg

SEQ ID NO: 38068 - DNA, 227 bp, Oryza sativa
  Clone ID: PAT_MRT4530_4173C.1
ggtacgtaccgtcgtacaagttcatgaccttcagctcagggccacggacctgcctcggcaaggacatggcgttcgtgcagctcaaggccgtggcgggggccgtggtgaaatgttccaatttggagaccatccccgcccatgtagttgagcccgcactttccatcgtacttaacatgaagaatgctctcatggtcagggttaagagaaggcatgtgcttaacaactaa

SEQ ID NO: 38069 - DNA, 400 bp, Oryza sativa
  Clone ID: PAT_MRT4530_41740C.1
cgtggtcctggtacactgggcctacatggggagcttcatcacggggacctggcactctggctgctcaccgcacatgatcgactccagcacagccgttcgcgaggctacgctgtacaaggacggagcgaccaagcagcacgctcttctcgtttgcactcttgcagggacctagacgacctgttgctggaggatgcctgatgctaccacttgcacgggctctaaagcccgtaatgacgaaaacgacaagagaagtgtcatgctacctagacaacgtggggtacaatgctgacaagaatggactactacccatctgtgacttcgctggcgacaacacgactgagaggaccaccaaccttgactgggacaatgtccccaacttggttgacgctattgaccagat

SEQ ID NO: 38070 - DNA, 328 bp, Oryza sativa
  unsure (1)..(328): unsure at all n locations
  Clone ID: PAT_MRT4530_41741C.1
ggttttnccagtaggcgccnattgnngggnatngnaggagtttccaattgggcaaccaaggggtgcccaccttgactaatntagttagcccggaaaagccttntgtcaatggactaagctaatggaaatattggcattggncatggattgcgggttaaaagcngtacaatttactgcagtaaaantaagaccattgaatnctcttcgnantagccngtgctcacgggaaatttgagnatnggngactnaatatggtacttttgggtanggacccttattcaatgattttncctaaaatnccttgctgnattttaaacattcagggttc

SEQ ID NO: 38071 - DNA, 612 bp, Oryza sativa
  Clone ID: PAT_MRT4530_41742C.1
tttaatcattataaaacaatgtttgaaatatcataaatatttaattgaaatatctatttctcaccatgcatccactagatcctaaaacatttttattatttatacaatcatttttgtgttatatagaattatatgttgaacaagtaataatttaattttgtagatattgtaaaaaaaattgttgatgagacacatcccatcttcatccccagccatgtgtataacaagataataacatttagttgaaggacacacacttattagttcatggaaaacaatgaagcacatacaagttttattataacatataaatttaatcaacagaggtaacctacatgcataattgatataatttctttcttttacttgcaagttgtgaacctacatatgttctaccaatacgccttgaggcccttgaacattctcgtcctaggggagtgcccccaaagaactatttagtaacattaaatattttctatttatattggtgcttaacattcagtcaaacttttaaaactacagcattgattttattttatagcaagtttataaaaactattaagtttataatactttggaagtgcttttaaaggcaactctacacataccata

SEQ ID NO: 38072 - DNA, 2387 bp, Oryza sativa
  Clone ID: PAT_MRT4530_41743C.1
ctaagctgagccgagctgagctatcctccatggaagccaaattaagataggaggaaagcttgagctgagccaagatctcttcgatcttccatggaagactacgagagtaccatcactgcgaggctgtaccatcccaaataatggctcattcaagtgactgtacgaactcgagtcaagaggaatccagatgtgcatgacgccattgtctgcattcaagatctccatttgccaatttgccagccattgtggctgtgtgttttggtctactgcttctcctgcctccccccacagtttccgacgtggcagtgcggaggccgacgtcgtgcgagctcgcggatggtgtcggcgacgaggtccttgaacaccagccgctcgatctgcagcacggcgtcggccacctccgcgccgggcagcagctgcgacgacgacggaggccaccggtggtggtcggcggcgaggtcgcggacgacgccgacgcggatcagctcgttcaggtcgaggtcggcgtccggcgccgccacgggctcgcgcgcgcgcctcacctcggcccagacgtggtccaccagctcgccgccgcggagccacgacaccgggtcccacgcgcaggcggctcgccggcggtcgagcgcctccaccgccgcggcgcagaggagcatccggtgatgggggcacgtgtcgtcgtcgccgccggtggtggtcttcgccgccgcggcgtacacggcggatgggtcccgcgtcgtccggtcgaacaccttgacgacctccgccacgtaggcgtagtccgggtcgacgtccgggcccaccgtccacgtgtcccactggtcgtcgtcgtcgtcttggtcggacgcggacgccgtcgcggcgtgcggggccggggcggcggcgccgaagaagatggcgcgcttcgaccccgacgacgacggcgagtcctcgtcggcgaggaacgccgccgcgtcgagcacggacaccgggctcggctgctggtcgtcgccggcggtgaacgcctggatgctgctcagcagcttgccgcagcgctcgagaaggccgcggtcggtgcggagctcgtcggggcgcgcgcgctgctgcattgcgaagctttcgttagacgagagaaattccgaaatggtggccgccattggaggtggaggagggctcacctcgaagtcccagcgggaggaggcgctgagtgagccgctgctggtgccgtcggagaaggtggtggacgcgtcgtcgtcgggagacagcgccgcgctgccgtgacctccgcggcgggcaatgcgggagcggtcgccggtgctcggcttcctgagcggcggctggtacctcggcgactgcgccggcgagacgcgtcgctgcggggactgagggccgcgtcgagcgggggaagccgggctccgtgcgggcgacgcggcgcggtccggtgagcgcgggcgccgggcattgtcggcgtcgacgcggactcggcgggtgggcgacgtccgcgacgccggcggctgtggcggccgcgacgagggccgcatgacgacgataggaggcggcggcggctgggtgcgtagcgacgagaccggcggcggcggggtgtggcggaggaggcccttgagctggagcgcctccaagatttgcttgagcgtctccagatccctggccggctcggcgatcccgcgcttgcggaggcgccgctcgatctcgccgtagagcgcgatctcgccgtgccccgccgcggccgagtcgacgacgcgcttcgcgggctccgggaacacgtcgtgcgcgtcgaagcggctacgcctctgaatcccaccgcgcgggcacgcgggatccggcgcgcgccgcagcgccgcctcgaccgccggcgaagacggcctctgctgctgcggcgtcaccggcggcgagggcctctcgaagaagctcgggtcaacgaacctgaagcaggccgggtcacgcggcacgcgctcggacgccgaccgccggagctcacccccacacggcgccgcgtcccgctcgtccggagcgccacgcggcagcgcgtcgaggcccatgagccgcgcgacgacgctgggcgagcgtcgctcgtccccgccgccggcccccggggacggcggcgcggcgggcgacgtccggatgtcgcgcggccgcagcttccccctggcgtccaccaccgcgcggctgtccagcgacagccgcggcagccgccacaccgcgggcgcgccacccccgtccttcgtctccagcggcggcagctgcagcgacggcctcggcgcagccggtggcgtcatgtcgggcgacggcagcggcgtcgcccgctccggcgaccggtccagctgcatcgacctctccgacggcgtcgccgacccccctcggtcttcgcggtattcgcggtacattgccat

SEQ ID NO: 38073 - DNA, 349 bp, Oryza sativa
  Clone ID: PAT_MRT4530_41744C.1
ctcaaatcctcctccgtctccaagctctcgtcgtcgtcgtcagcattgtcgggccgtggcaagggaggcaaggggctgggcaagggaggcgcgaagaggcacaggaagtttgctgcgcgtcaacatccaggggttcacgaagtccgcgatccggaggctggcgaggagggtcggcgtgaagccattctccgggctgatctacgaggagacccgcggcgtgctcaagatcttcctcgaggggggtcccggtacccaattcgccctatagtgagtcgtattataattcactggccgtcgtttacaacgtcgtgacttggaaaaccttggcgttacccaacttaatcgtctt

SEQ ID NO: 38074 - DNA, 122 bp, Oryza sativa
  Clone ID: PAT_MRT4530_41745C.1
gcgctccgagtcgatgctgcgcgcgaacatgagcctacggtcgccggcgggagacctcgcagtcgttccagcccatccccaatgtcgccgctcctcaccatgcgccgatggttgacgacatc

SEQ ID NO: 38075 - DNA, 1895 bp, Oryza sativa
  Clone ID: PAT_MRT4530_41746C.1
atggctgctctcgtcatctcgaagcagcgcagtcaccagcagcagtcatccgatcgccggaggaagccatcgtcgcacttcgcgtcaccccagtccatgcgtggcttcaatgctgtcaactgccgagccttccactccagcgtcagcattggcatcctgccatccccgcctccacccccagcgcgcacctactcctccccggagccgaagacgcccaagtcgcagccacaccacgggaagaagcggagcagggcaatatctataagcccttcaacgtctccgccatcccggcctgagctctgggctggccccgctttctcaaactctccgcctcccagctcgctgccgatacccaagttctcactccaccagaagcgcagtgtttcactcgagttgccacctgctggccgatcagatgatgtggtggtgcctttgcatgctaagtcagcgccttcgtcgccaaccgcaggctcaggtgtcagcttctttagtgatagtgatactgctatcgcgactgagaatctgaggagaatcctccacctgaaaatcgctgatcactgaatggatgatgggcaggtccttgtacataggctatctgcaaactaaccttggtagtgtgtatagagtaaccgagaatggccatctttcacctggatggtggttctgcatagttcatcaacaggaggtactttaggcaggcaaagcacctcaagtatgcatggcagcgtgaaactgcggtgaatgacttggtggtgagactgttggttgtctggatgagagcacagcagtttctgggtagcctttgtagcttgtgctcacctctatgttactaatgttctttcagccttttgggtattccttctttaggttttagatcaccattatccatggtctcacatcattaacctttagtcgtagtctgtccttgttcctggtagttcatgcctggcagggtatgatagtgtcttagtactgttcaaatgcttagatgtctgcatctgattatctggcagctatccatgtgtgaaatatctgtaggatagcaatatcttgcagtggatgcattttgcttcaccttgtagacattccttggttcctctggctcactctactcttgcttctggtgttctgcaaggaacattatgatctctccttgatgtctcttctgttttttggaaggaagaggcgcagtgggatttcatgaagctccaatcttccatgttcttgctccatatgacactactaattttatccatgcacctttccttttctttagtttgttccatagctaccatgtgagacctctcctatctttctttcatgcctctaccactagaattgcgtctagtagtgctatgccttttttagggcaccatcaataattcctagtccttgtttatgtccaagaaacgtatttggagttctactctcttctatatgatggacaagccagacttcagagacctttgagcatgcagacccaaatacggtttgcttatcacagtgcgcttcatggtattcatccctggagctcgtagccaccatcaagtttgaataatcttcgtagtcgacgggcagcacatatgctagaacgtcaattcagtgtagtgcctgcttggctagttgtacctggtactgtttttgttataacattttgtcgatgtcttgatacattagcgtagtgtctatttgggctggcagtgtagtacctgcctggctatttgtatcagcttgcttaatacttaaaagtagacctttttccactgccttccgagtttttatgatatatttggatgttaatgttgtagcacttaacttcttatatgtgcaatgtgaactgcttttcaccaaaaaaaaaaaaaaaaaaaaaaaaactcgagactggccgcgggccg

SEQ ID NO: 38076 - DNA, 464 bp, Oryza sativa
  Clone ID: PAT_MRT4530_41747C.1
tttcttttcttcttcttcttcttcttcttcttggcttcttctatctacttggcaaaccatcaacgtgcccttctatttccttcttcccttcctccgagggcttctgatccggagagacagagatgattgggagcagaggcggcggcggtggcgcggcgccaaggccgaggcggcggagcgacccgggcgacagccgcgacctctccgtggccaccaccacggagtcgtacaactccgagaggtccgtggggagcggcggcggccgcgggaccgccttcctagacgccttacggtcatgcttcgtcggggggaggcgcacgctcgctccccggagacctcgccgttgtccgacgacttacatccctcacaacaggtatcacagtcgataagctcacaaggttctagcagtgggagcaattttgagatgcggagatcaatgaaaggactgtataatccaatgcata

SEQ ID NO: 38077 - DNA, 501 bp, Oryza sativa
  Clone ID: PAT_MRT4530_41748C.1
tttttttttttttggcagtggaaaaaggtctacttttaagtattaagcaagctgatacaaatagccaggcaggtactacactgccagcccaaatagacactacgctaatgtatcaagacatcgacaaaatgttataacaaaaacagtaccaggtacaactagccaagcaggcactacactgaattgacgttctagcatatgtgctgcccgtcgactacgaagattattcaaacttgatggtggctacgagctccagggatgaataccatgaagcgcactgtgataagcaaacctgtagcaccacagcacaggatcacattagcattagccaaagagatcagctgcataagagtaacacaacaaacagaagatagttaccgtatttgggtctgcatgctcaaaggtctctgaagtctggcttgtccatcatatagaagagagtagaactccaaatacgtttcttggacataaacaaggactaggaattattgatggtgccct

SEQ ID NO: 38078 - DNA, 208 bp, Oryza sativa
  Clone ID: PAT_MRT4530_41749C.1
tttctttcctcctcaaaaccctagattgagatacaagggaagcgaaggaagaaccaagtcgatccacgaatagggagacgaatccaaggtagaaggtctcgccgtggttgcctcctgtatctgactcggtatctttcgacggctgacttcatcctcgtcctctaggtgaccgtcggtgtcggcctcctcgttggtgccctacactata

SEQ ID NO: 38079 - DNA, 3891 bp, Oryza sativa
  Clone ID: PAT_MRT4530_4174C.1
atgggaactccaggagataaagcatcttatgcctcacaaattgccggaataataggcaatattgaacaacttaatggaagtaattatgcttcatggaaggagaagctggaaattactctagctcagttggatattgattatgccctccataatgatcctccggttgagcctataccggaaaatgaaaattatgagaccctaaaaaggagatatgatgaagtaaaggcaaaatgggatatttcaaaccgtaaatgccttatgattattaagagctccattattgacgcaataagaggagcagttccagatactcagacagccagagaatatcttgctaaagttgaggagcagtttaaaggctcttctaaggtttatgccaccactcttattaaaagattggtcaatgaaagatatgattttactggaaatctgagggaacatattatgaagaaatatcacatggcttctaagcttaaatcaatggaaatggaaatctctaaaggttttcttgtccatttcattatgtcatctctgcctcaggagttttctccatttacgatcaattataatgcaatgaagatcaagtggggcattgatgaattaatagccatgtgtgtacaagaagaggaaaggcttaaggcagaaagagttgaccatgcaaatttatttaaacactccgagaagaaaaggtataagaaatttaagaaggagtatttgaagcctaagcctattcaatttaaagaaaaagggcaatcttcgaatcaatcccagcaaaataaatctggaggaaatccctatacagaagaaaagggaaaagaaaaggatgggtgctacttttgtggaaagagtggacaccgccaaaaggactgtattggatttatgagatggctcagtaagaaaggtactgatgttatttcttttgttgatgaatccctgaatattgattatgccaccaattcttggtggattgactcaggagcgacaattcatgttgcaaattccttgcagggattcgctatgaggaggaccctaagaagaggggaaagaagaattagagttgctaatggagttgaaactgaagttgaggccattggagacttcactctcacacttcatactggcttcaaacttcagctgcatgatgttctttatgtaccctctatgaaaaggaacttagtttcagtttcacgtttagataatggtggttactattgtacttttggaaacaatagatgtataattatgcatgataataaagaggttggtctcgccgttggatgggaacaactttatcaaatctctgtgtgcgatgccacctataatgttgattcctcctcaaatgcaaatgtcagtaccaaacgaaaacataacgataatgagacttcttcgaaattatggcactatcgtttgggccatatttcgaaggggagaattgagcgtctcattaaagaaaacatcctttatcctttggacttctcagatgcagatgttgatcactgcattgattgcatcaaaggaaaatattccaagcaaatcaagaaaggtgcaaatcgaagtatgggagttttggaaatcatccacacagacatctgtggtccatttaatgaaaagtcagtggatggatttgattcattcataacattcaccgacgattactctcgttatggatatatctatccaatcaaagaaagatctgaggcattagacaaatttaaaattttcaaagcagaagttgagaatcaacatgatcgaaagatcaaaattgtaaggtctgaccgtggtggtgaatactatggtagacatactacttatggtcaaattcctggaccttttgcgaggttcttacaggaaagtggcattaaggcccagtactcagcaccgggtgaaccccagcaaaatggagtagctgaaaggcgtaatcgcactcttatggatatggtacgaagtatgttaagtcactccactctgccggtaaagttatggatggaagctcttaaaacagctacacacattcttaacagggttcccagtaaatcagtccctaagacaccttttgaattatggactgggaagaaaccaaccctaaattattttcatgtgtggggttgtcctgctgaagcacaagttttcaatccaaatatgggaaaattagacctcaaaacaatcagttgtcattttatcggttatcctgataagtcaaaggcatatagattctactgcccaaatcagtttacaaagttcattgagacaagacacgctgtgttcttggaaaatgacataatcaaggggagtatgacacccagagaagttgttctggaagagaaacggaattatgttccaatgcctataattgaagaacccgttttctcaacacatactcatgttgcaccttcaatagaaagaaataatgatgcaacacctgctgaagctcctgcaactacttctagtagtgtatcaaatgatgagaataatgaggatgctcagcagccccagattatgatagatgagcaaaataacgaacccgtcagaagatcacaacgagttagaaagtcagcgattccaagtgactatgtcacttacatgaatgaagaggtgaatgaacctatgagtgaagaggtgaatgagcctatacttgataatgatcccatctcatttaaagaagcaatgaagagtgaacattcatctgaatggctaaaagctatgaaagatgaaatgaaatccatgagtacaaataaggtctgggacttagtagaaattcccgaaggagccaaaacagttggctgcaaatgggtctataagactaaacgtgaccccaagggaaatatcgaaaggttcaaatcaaggcttgtagcaaaaggatttacgcaaagagaagggattgattataatgaaacattttctccagtgtctactaaggattcattcagaattattatggcactagttgctcattatgatttggaattacaccaaatggatgttaagacggcattcctaaacggaaaagaacatatgggatgtcatctaaagaaatcgatttatggactaaagcaagcatcaaggcagtggtatctaaagtttgaccaaatcataagacaatttggttttaaagaaaataaaaaggatgactgtatatacactaagtttaaggagagtaagttcatcttcctaatattatatgttgatgacatactcttagccagtaatgacaaaaatatgctactggaaacaaagaaatttctggcctctaagtttgaaatgaaagatctcggtgaagccacttatgtgttgggtatagagatttaccgagacagatcaaatggtgttttagggttatctcagaaagcatatatagaaaaggtactgaagaaatataatatgcataattgttcagcctcgcctgctcctataatgaagggggataagtatggaaaattccaatgtcctaagaatgagtatgaagctgcgctgatgaagtcaataccatatgcttcagctgtcggaagcataatgtatgcacaagtgtgcactcgccctgatttagcttttgttaccgggatgcttggcagatatcaatctaatccaggtctagaacactggaaattagctaagaagaccttgcgttatcttcaaggcactaaagacctcatgctcacatatagaaagtctgaaaaccttgaagttgttggttattcggactctgatcttgcagggtgtgttgatgataagaaatccacgtcaggttatatattcacccttgcaaggggagctgtatcgtggaaaagctccaaacaaagagttactacatcgtcgacaatgcaggctgagtatgtggcatgttatgaagctactggacaggcaatatggctgaaaaactttatcccgggataa

SEQ ID NO: 38080 - DNA, 150 bp, Oryza sativa
  Clone ID: PAT_MRT4530_41751C.1
atggagcagaggcgcagtgtgcactccgccgtgtcgcgagtggccggcgcagattccttctgggccggcgagccatccagacaaggctttcacagtttcactcaagtactcaaccttgactatgagaggcactgctcttcatcggcttga

SEQ ID NO: 38081 - DNA, 152 bp, Oryza sativa
  Clone ID: PAT_MRT4530_41752C.1
catttataatccccacggccacatcctaccgtggggccggctacgccaacgactaccctgtgccgccgctacgtttcctactcctcctcatccatcttgacggattatcgcggttaggtctatccatatctccaaaatctaacataattcta

SEQ ID NO: 38082 - DNA, 270 bp, Oryza sativa
  Clone ID: PAT_MRT4530_41753C.1
atggcgtcatcacaggcgcggtacgtggagatcgaggtgaaaagggttgacgttgatctgaccgtcgggcaggcaggggtaggcatacacggcaaggacgcccacgagcttgccgacggcgatcagttttgctcggactcgttgtcatgcttattatgtcgcctcaagttcgctattgctacgccatcgagcttgttggatccagtggcagatcgagtgtttgatgatagcagggacgaggaatactggttcagatcggacaacaactga

SEQ ID NO: 38083 - DNA, 672 bp, Oryza sativa
  Clone ID: PAT_MRT4530_41754C.1
atggagccgttgatgctgctgcgcaaggtctcaacctctacctccgccgcacgtgccgcatcttccgccgcctccgcctccgcctccgccctggctgctgccaactccgctgccgccagtctggctgcccttgctgctgctgcaacggatgaagatgttaggcaccccccaaggagagttgttcagggtggttatggtgcatacaatgcatacataacagctgctaccagatatgcagctttgggtacaccaacatcgtatgatcatccaggaccagcttatggaaatcgtgttgcacagagaagtcatgaaattcttggacaggaggttgctgtggacacagctgagccacttgagggtggttcaggtggaggttacttggaacctgcagaggcatatggaccatatggagcttatggctcattactgccttatggcagattctctggtagccttggttatgattatggttatggccccagtggaaatagtagcaggcatggcaataccgtatatcttgagaacaatatacgtctgaaaccgggtatagagcatcccgaagtatcaaaaccaatgcaaatcgagttccactgcatttttgtcatacggagcgctcacatggctggattcagcttcggtgacattgctatggcaagttacggtgtgacatag

SEQ ID NO: 38084 - DNA, 1580 bp, Oryza sativa
  Clone ID: PAT_MRT4530_41755C.1
ctggcgcgcgcgcgggcgcgggcgcgaggcgagggagtggcggtggcgcgcccgcggggcgagcaccaccaccaccagcagccaccaggaggcacacaagtcgacataaaaaaaggagacgtcaagacccaaacaaagagaatcttcgcgacggggatgcgaggcgaggcgcctcgtggtcgtggcgcggcgcgtcgcggtctttccctttcccccctcctccgagtcctcctcttccgtcgcgctcgctgggggtggactggggtgtttggctgcgtgagtgcggagcggcggctataaagggggaagaaagaaacagcgccaccccgatctcctacctctaccgctgctactcaccacaccagccgccgccgcctcctgagccacgcagtttgcaggtctgatactgcttgttggttcctccccatcaaaatgcttggctcacttatgtcttactcaccttcagtggattcaaagacggagaacactgatgagttaattgcgactggtgttcttgctagtctgcagaatttcatccgcaaatgcattgtagctgtcctctcgtatggcccaatgcctaagcatattgcatttattatggatggtaaccgtagatatgctaaattcaggagtatccaggaaggctctggtcacagggtgggcttctctgctctcattgccagcctgctctactgctatgaaatgggcgtgaagtatatcacggtgtatgcatttagcatcgataattttaagcgagatccgactgaggtgaaatccttgatggagttaatggaggaaaagatcaatgaactgctagaaaacagaaatgtcatcaacaaggttaactgtaagatcaacttctgggggaacttggacatgttgagcaaatcagtgagggtagcagctgagaaactgatggctaccactgctgaaaacacgggactggtcttctctgtttgcatgccatacaactccacttctgagattgtcaatgcggtcaataaggtctgtgcagaaaggagggatatactgcagagggaggatgctgacagtgttgcgaataatggtgtgtattcagacatttcagtggcagatctggaccaccatatgtacagcgctggttgccccgatcctgacattgtgatccggacctcaggtgagactcgcctgagcaatttccttctgtggcagacgacgttcagtcatttgcagaatccagaccctctttggccggagttctctttcaagcaccttgtctgggccatactccagtaccaaagagttcacccttctattgagcaaagcagaaatctggctaagaagcagctgtaatcacatcctccctgggaggagatagaaaccatcatacaagatatctgtagttacacaataatctgtattctcctgtggtatctcctggaatatgaaatatataaaggatagctatgccattgtatgcttgaacatgtgtatgcttgagttggtccaaatgtgtgaaatgtaataacatttggtctaagcaagtgccttactttccctgaaaaaaaaaaaaaaaaaaaaaaaaaaaaaaaaaaaaaaaa

SEQ ID NO: 38085 - DNA, 1053 bp, Oryza sativa
  Clone ID: PAT_MRT4530_41756C.1
atgtctctacaggtgccaaatgtgcaggaactcgcactgacttgcaaccgacctgaccagcagatacctgacaggtacatcaggccggaggctggcaccgaagaggtcatctgcggccaaggcatcaacacggcaatcccggtcatcgatctcgccaagctgctcaacccgcagtcatcccaagaggagtgtgccaagctgcgatctgcatgtcagcactggggtttcttccagctcgtcaaccatggggtgcctgacgatgtgatcagcgacgtgaggagagacttaactgagttcttcaagctaccacttgaagccaaggaggcgtacgctaaaccaccagacaagtacgaaggctatggccagcacttcgtcgtttcagagaagcagaagctggactggggagacctgctacacctccggcttcgcccaaccgagtccagggatttgaggttctggcctgcccatccttcatctttcaggaattccatggagaggtactccttggagacggcaaaagtagcacgctgcctgttggagttcttggccatggacatgggcgttgatccggagtctctcctggaggtattcagaggccagccccagaacatgagggtgaactactacccgccgtgcaggcaaaccggcaaggtgctcggcctgtcgccgcactgcgacgcgaccagcctgacgctgctgctccatgtgaacgacatgcagggcctccagatcaggaaggacggcaagtggctcaccatcgaagccctcgacggcgcgttcgtcgtcaacgtcggcgacatgcttgagattctgagcaatgggaggtacaggagcgttgagcacagggccgtggtgcacccggagaaggagcgcatctcggcggcggtgttccaccaggcgtgccgggacgcgacggtcgggcctctgccggagctcgtgacgaaggacggtggcaggccggtgtacaagtcgatggcctacgaggatttcatgaagcgcttcttctcggccaaacttgacggaagggctaacgtcgagggcatgaagatttag

SEQ ID NO: 38086 - DNA, 666 bp, Oryza sativa
  Clone ID: PAT_MRT4530_41757C.1
aattatgagtttttttacagtccaacaagttgtggtggtaccaaatatgagccattgattggatcagatccaaaggctattattcgtcggtaccgccagttacttgggatggtaccgcggaggtggaagagtaaggaagggcaggcggaccggaagatcagtagccgaagccatgggggccacctcgccatctccttcctgcatcgtgatggggaggccgccaaatctgagctgaagcatgccgacgacgctcctcctctcaacaccgacggcaaccactggcactacaggagacgaagcagggaagatgaagctgcccccttctcgccttcgtccattcggggctcgcccatccgccgcaatatctcaatacaaattccatcaccagggactaggttcagccaccagggtctaggttccagaaatcaaactcagcctcgcccgtcaatatataggcagcggcggcggcggcatagtcggtcacaccaggggagattgcgttggccgaggggggcaggacatgttgcggcagcgtcgaccgcaccgccgttgccacggaggaaggatgcgatagggcctatggggagggcaggctgcggtgggagcacctagtttttatcatgatccttttccaaaagagttacacagatttgcacaagcatgttt

SEQ ID NO: 38087 - DNA, 486 bp, Oryza sativa
  Clone ID: PAT_MRT4530_41758C.1
atgaagaaacttgttcaacagatgcaacatatgtgtcttggttgttacagtatgactcgacaagggaagctgattcaaaagaataaagtcgagttcccaaagcttattgaagaaaagactgataagaagcctgatggtgaacaagatggggatagagaagaatccaaaccaactctgcaagatcacattgactcagccgtgcatcatgcattgatcaaccaatctagtgtgcttgtcaatacattgacgggcatgatcaaatcagtggtagatgggtccattgatgaggagaaaactaaggggccaatatattttccaaatcttgtttttccatcttacaaaactgtaaggactaagttgggaagtggacagcatcaaacgactcctacatcggttccaattgcgccaggagttgatacaattttactcacaaggcaacagccgatatcaggggtgcagacatctaatactttggctctagagtag

SEQ ID NO: 38088 - DNA, 699 bp, Oryza sativa
  Clone ID: PAT_MRT4530_41759C.1
atgggtgcgttcccggagcaagaacagccacctctccttggtcgacgcagctcctttcgaccggaggaagaagaagaagacgatgagtacacggatgccttcggtgtatgcttcggcctgtttctggccatcttcgcgatcatgctggtcgtcctctgcatccgccggcccgacacggacgggatggcggcgagcccgcccgactacttcgtcgcgatcaacgccgtctcgggcgtcgacccgtccacggacctcggccggccggcgctcgacccggtgttcagcctgaccgtccgcgtcgcctcgcggagctccacccgcggggcgtgcgtcagggccggcacgtcggtgctggtgtcctaccgcggcgtcccgctggccggcgggcgcgcgccggcggacccggagctctgcgcggggccgatgggcgcggcggaggacggctccgtcgtcgcgcgggggagcggggcgcgcgtgccggggacacagctggacgccctcgcggaggacatgcggcgcggcgaggcgctgttcgaggtgacgctcgcgatgccgtactacgggcagcggaaggtggcgtcgtgctgggacagggtcggcgacgccgcggcgctccgggtgccgtgcgacgtgtccctggtggacccgcgccgccttgccggaatcactggcttcagcgatctacctagtgccgtgtaa

SEQ ID NO: 38089 - DNA, 243 bp, Oryza sativa
  Clone ID: PAT_MRT4530_4175C.1
actttcctatttgtactaagattaattgattcgtagttctaagttcgtagtgttctacatgtcttcacgtcttgatacatattgaccgtcaagcttgccatggttgtttatatgccccaagtaccaaagcagcggcaacctgtcggtatctattaatgtttatttgcaaagaaagggagtgtttgattttgatgtttaaccctcgcgtttctgttttcgttcgacagatcagataggccgtaa

SEQ ID NO: 38090 - DNA, 279 bp, Oryza sativa
  unsure (1)..(279): unsure at all n locations
  Clone ID: PAT_MRT4530_41760C.1
acatggaggtggcacactcctctngcctcgcttttcccttctagatctcgccgctctctctccgtctcttgcggtctcgccgtcgtcagtngcctcttccttcccttccgacctcctgtcctctccagtctcccctttccctccatctccccacggtagcgcgcaggacgacgcacgggcggacgggggaggcgcacaggcgggcgtggcgagggatgcggacggcgcataggcgcnacggttggcaaggggacaggcnggcgancgggcgacacaggt

SEQ ID NO: 38091 - DNA, 301 bp, Oryza sativa
  unsure (1)..(301): unsure at all n locations
  Clone ID: PAT_MRT4530_41761C.1
gtcttcttcctcgccgaccaccaccattgacgagagaaaggagaaagaagtggtgactgaaaaggntgattcctgagtaacttaacagtttttttcaaatttggttagcaattgagtttatgatcttactgtgattgatatgagcagagctactatatcatagattcgtcaagctaatttttgggtccctttgtgggggaaataaagccgattacggaataattgttggacatgataagcaatttactgaggaaattttgatgctaaaaaaaaaaaaaaaaaaaaaaaanaaaaaaaaaaa

SEQ ID NO: 38092 - DNA, 886 bp, Oryza sativa
  Clone ID: PAT_MRT4530_41762C.1
ttccatttactatgccgccgccggcccgccatgaacagaggcacagagcagccgaagcttcctcacagaaactcccaagaaaggtaggcaagcgcgcctagcatcaggccagagaccgagctcaacgacccaatcgattgatttgataaaacaagcgcgaggagcaagatgcctcgctcgaactatctagcaggtggatccaaagagctcccttggcatcactagttgaacgacatggcggcatgctcccttgaaaccgacgtgcccccaaccgatgccgtgatctgcaggcgaggcaagacggcgatcgagcaattagcagtccttgttgaaaccacgggccaccaattcagtagctagcaaatagcattagcaagctgcgagatcagttgcattcaagagatctgtgcatcgagatcctactacagatggaatcgtagaaagatgaagtacgtatttgtggtggtatacagacaatcgactggggcttcagagagtgacctgaaagactttaagcttggagactgaagagttggggaagaatgcagtgcacagagcttgcattttggagtgtttcagttgtttaatccgagctattaaagaaccgaggagttcgtggattggcgcttaaagagtgcaaagattgccgactggtatcgattccctggagttagggttatccttaccagcctagagataagagatagttacatgtatgctagttaatctgccaagttgcccaagaaaatccattctattctggagtatgtgattgagctctttgttgctgcatgcagcaatgtcactgtcggagtagctactcggccgagaggatcaatccatgtacgattcttctttgacagtttttgaccttttgcgtcatcgt

SEQ ID NO: 38093 - DNA, 866 bp, Oryza sativa
  Clone ID: PAT_MRT4530_41763C.1
tttttttttttttttttttttttttttttgcaccttaattaacttggcttatatctgccacaatacgattgtcgccccctagtaacacggcgattaccatgatactacactggacgctaagaagttattagtaacaaataattacaataaactaggaaccaattttaaggtttttggttacaagaaatgagactacaacaataataaacatagagaatatccttctcgaacgagccctcatgacgcgagaggctcaaccaggacttcggggtcgtcgaatttctgttgaagcaaacgggggcatctttcgatttcatcttgaaaaaaaacaagctggcgatttttctcctccacaaccttcaaagaatcgataactgctctgaagggattatgggggcatccgatgttgtactttagcagctcgttgacatagtctcgcaaaatgtcttcctatatccaaaccttgcacgcagaagtgtcttgcaaaaaaaaaaaaaagtgaaaaacaagcatgttgggagagggtcaaaacataaacaacaccgaataagatcttctgtccacgtaaaaaaaggaaaaagattcatgctgtactgcctcgacatgctgtagttctggagctcgtcggcatactcttgcaagatgtctttccatatctaaaccttacatgccggcttctccttttttgtacacttgagaaatcttctgttcggatctcaaacacgggcggctgctggtctcgttccccacgccgatgaccatcaggcgagacgcctgggatgaggaagagcggctgaagccattatccgcgcctgctgatgctctcgactgcaaatggctgctctgattaaagcagtgagaaaatg

SEQ ID NO: 38094 - DNA, 270 bp, Oryza sativa
  Clone ID: PAT_MRT4530_41764C.1
atagcgctagcaacacagggattaactcatcactcacttagctaattaaatcttcgaccatgtcggacaagtgcggcaactgcgactgtgctgacaagagccagtgcgtgaagaaaggtaccagctatggcgtcgtcatagttgaagccgagaagaccacttcgagaggtcgccgcgcgagagacggcgtgcaggcgaccgtgtctgacgctgaggcgaggagcacacaccaccccgcgagactctatgccataacactagggtggggcg

SEQ ID NO: 38095 - DNA, 607 bp, Oryza sativa
  Clone ID: PAT_MRT4530_41765C.1
agtttataaggttggttataattttcttcttctctctccatgcggtgcaatgggcattatcaccaccaaagcagtctattcctcttcccaaaattcgccggctctgtgccacaatggcaagtttatttgggacaacagagctccgcctcgagtttaattctttgcctggcttattgccaaggatcgcctccccacgaaggttaatctccataaaaagaacattgtgcaatcccccaaatgcaagctttgcagcgatgaagacgaaacggtgagtcatctttttcttcactgtccgttcgctgatgaattctagagatctctcaacattcaccccggcatctcacgcgtgcaagatctctcaggtctagtcgctcctaggcagctccccgctaaacacttccaagttttatatctactctgtttctggggtttatgaattcatagacatgatgttgtttttcgtgatctgcctaaatcactcctaagaatggtagcaaaatgtatggaagacgctaatctttgggctgagtgttttcgtagagaagacagggtagttgtgtcaatttggaaggatcttctctcttcctccgtacacgtcactcgtcat

SEQ ID NO: 38096 - DNA, 998 bp, Oryza sativa
  Clone ID: PAT_MRT4530_41766C.1
aagcttcctactacattttcattcataattagactgaatatcatgcaacgtgttgatcgatcggctagctgattgaccaggaaattaaatagcatccataagagttctaaaagctttcctagaacatttttattttacatcgatccctgctttttcgatttcccaattgcccccatcagatcagaaaacaataatccatcaccgatccatgtacataagcatgcgttcgtcaaaaggaggggaaggcccacctggcggggtggtccccggcggcgcccgggggggcgtcctcccttcaggggggggggggggggcggccctcgtagggggggatcaccatgcgggaattctccgacaggcggtccacccgcttttttacgcggcagttgttgggggtgcacctgtagtaactccttggggggaggctgttgctgcagccctctcgcccatacttcctccactcgcagccggggtgtccgcatccacggagcccaagtgcgcgaagccggcgggcggctcgccgtcgcagctcctcacgccgcagccgccctcgaccggcccctggatccatgggagcagcgggtacaaacagccatggtccgacgagaacatcacgccatggttcgtcccggtggcggcggcgtggtcgtggaccagctgcggcagctggggaagcttgtgctgcaggctcggcaatggcgcaagaaaggaaggaggggaaggcggcgtgtacgggcagagcggcgcgtagagcgcggcagggaggcaagccgtctccaactggctcccttccatgcacgcatacatgcagcaactaattaactagctactagtagtatgctctacaagagatcatgcagcttggattgccggtgaggtatagctagctagagagagatcgaagacgatcgagatgccaagaaagatctctttctttaggttaaaagggaagcgatgaccatagagagagagagagagagagagagcataaaagaaag

SEQ ID NO: 38097 - DNA, 702 bp, Oryza sativa
  Clone ID: PAT_MRT4530_41767C.1
gcggaagaggaacggacagcactggcgacgaggttgaagcggcggcggtcttcgggtcgacggtgacggcgatgctccggcggtcaacagcgacggcggaggggtggacaaggacggcgacgacttggcgatcccaacggtggccttcccgagcgatgacgacgaccggaacggcggcggcgcacggctggagcgacggcggcgactgcggctcgaggtctcacggcgctagggcgcttccgacgacgagaggcgaaggcgagggtggcgacgggtagaggagagctcggggatccttttaaaggggttcaagggcgacggcgaaggcccacggcgaccagcgacgacgaaggaaacttcgggaaaaacgaatccgaagcaaactcgaatccatcgatttccaaaccgatttagccgatgtttccaaaggggaaaaggtagaggagatctcgaagatcatttcccctctattgatttcaccggaaaaggaaaggagcggccggatttggaaggaaacggcggcggcgcggcgctagggtttcgggcagcggccgacgcgaggaagacgacgacctgacaggcggaccccacctgacagcgagcgagggcgcgcgcgcgcggctgcggactgggccgacttgggccgaggagagagagaagggttttgggccgactttcggcccaaagccaaaagagactttt

SEQ ID NO: 38098 - DNA, 1669 bp, Oryza sativa
  Clone ID: PAT_MRT4530_41768C.1
cctccgagacactcgcaggcagcggagagccgagccagttcactctctcacactccacactctgccactgccactgcactgccactctccagctgcagcgcagcagtgcgtgtctcctccccccgatggcctcgcggatcttgctccccatcctcctcttcctcctctgctcgcgtggcggcagcggggcgccggcggcgaggcggggaatgcgcgtgccgccgttgggtggggacccggtcaagttcgacttctccccgttcttgatcgagtacaagagcggcagggtgaagcggctcatgggcaccgacgtggtggcggcgtcggcggacgtgctcaccggcgtgtcgtccagggacgtcgccattgatccggccaacgatgtccgcgcgcggctctacctccccagcttccgcgccaccgccaaggtcccggttctgctttacttccacggcggcgcgttcgtcgtcgagtcggcgttcacgcccatctaccacgcctacctcaacacgctcgcggccaaggcgggcgtcctggccgtgtcggtgaactaccgcctcgcgccggagcacccgctcccggcagcgtacgacgactcgtgggcggcgctcaagtgggtgctggcgaacgcggcgcccgggacggaccagtgggtctcccagtacggcgacctgtcccgcctcttcctcgccggtgacagcgccggcggaaacatcgcgcacaacctcgcattgcgcgccggcgaggagggcctcgacggcggggccaggatcaagggcgtggcgctgctcgacccgtacttccagggtcggagtccgatgggcgccgacgccatggacccggcctacctccagtcggcggcgcgcacctggagcttcatctgcgccggcaagtacccgatcgaccacccgtacgcgaacccgctcgcgctcccggcgtcgtcgtggcagcgcctcggctgctcccgcgtgctggtcaccgtgtcggagcaggaccgcctgagcccatggcagcgcgcctactacgccacgctccggagcagcggctggccggggcaggccgagctctacgagacccccggcgagggccacgtctacttcctcaccaagctcagcacgccgcaggcgcaagccgagatggccacgctcgtcgccttcatcaaccgcaactagcacgcacgcacgcacgcagtaactcgaattctaccgtactattacagtgagtaattagccactagtgaggattgatgaggtgattacatttttcttttttacctttctttggagtagtacggcgagattccatcgtccatcgctacggccacgagtacgttaattggttcctccgccacaaaccggcaggacggagaggggccgggaccgtgctcgatcccatccatcgctcgcgtctcgtttcattaactgcagcctgcctactgttaccgtgttattacagctacggccagcgttgtgcaacggtgacgacgcatccagtggttggccgctgcgtgcagttactagtactagtgagtactaccagtatacacgtgtcatagccagtgtcactctgtttctactacctacggggtcgcaatctgtaataatttttttttgtactgctagtctgctactactacggtggtgattaatcgaagtggaaaattttgtcc

SEQ ID NO: 38099 - DNA, 325 bp, Oryza sativa
  Clone ID: PAT_MRT4530_41769C.1
atggtgaggatcgagactatgctcagggaggagcagaggtccagtgcggtcgagataccatgtgagaaagcgactagagttaggatttttggaggtcaacttcggtcaacggtgggatcgggactagaccagggagcagttgaggtgcaaatggtcaatgataatgggtgacgaagttggatatgagatggtacacagtggatggacgccgtgtgggagagatctttgcaacgggcttcacgaggtgtttggtctcaccatcgagcaaattaccagcctcggatggatggcaaatgcacgaggtgctccttctcagctaacttcg

SEQ ID NO: 38100 - DNA, 3330 bp, Oryza sativa
  Clone ID: PAT_MRT4530_4176C.1
atggagcagaagattaaattcaaagaagaaccttcagctcctgctcctgcaactgaatcccatcattgtcggttccccctgtgtgcagtggctataaatagaaatcgatacttaagtgcaaaccctaagattcgattgctacccgatcaagcaaaacccactgagaacacggggaagaaccgaaacacatctctctctgtgcttccaaacaagagagaaagagagaagaacaaagacagagaatgggaacctctggagatcaagggatttgatcaatattcacaaattgccggaataatgggcaatattgaacaacttaatggaagtaattatgcttcatggaaggagaagctggaaattactctagccctgttggatattgattatgccctccataatgatcctccggttgagcctagaccagaaaatgataattatgagaccctaaaaaggaaatatgatgaagtaaaggcaaaatgggatatttcaaaccgtaaatgccttatgattatcaagagctccattattgacgcaataagaggagcagtcccagatactcagacaaccagagaatatcttgctaaagttgaagaacaatttaaaggctcttctaaggtttatgccaccactcttattaaaagattggtcaatgaaagatatgattttactggaaatctgagggaacatattatgaagaaatgtcacagggcttctaagcttaaatcaatggaaatggaaatctctgaaggttttcttgtccatttcattatgtcatctctgccccaggagttttctccatttacgatcaattataatgcaatgaagatcaagtggggcattgatgaattaatagccatgtgtgtacaagaagaggaaaggcttaaggcagaaagagttgaccatgcaaatctatttaaacactctgagaagaaaaaagaacaactttatcaaatttctgtgtgcgatgccacctataatgttgactcctcaaatgcaaatgtcagtaccaaacgaaaacataacgataatgagacttcttcgaaattatggcactatcgtttgggccatatttcgagggggagaattgagcgtctcattaaagaaaacatcctctgtcctttggacttctcagatgcagatgttgatcactgcattgattgcatcaaaggaaaatattccaagcaaatcaagaaaggtgcaaatcgaagtatgggagttttggaaatcatccacacaaacatctgtggtccatttaatgtaaagtcagtggatggatttgatttattcataacatttaccgacgactactctcgctatggatatatctatccaatcaaagaaagatctgaggcattagacaaatttaaaattttcaaagcagaagttgagaatcaacatgatcgaaagatcaaaattgtaaggtctgaccatggtggtgaatactatggtagacatactacttatggtcaaattcctggaccttttgcgaggttcttacaagaaaatggcattaaggcccagtactcagcaccgggtgaaccccagcaaaatggagtagctgaaaggcataatcgcactcttatgtatatggtacgaagtatgttaagtcactcccctctgccggtaaagttatggatggaagctcttaagacagctgcacacattcttaacagggttcccagtaaatcagttcctaagacaccttttgagttatggactgggaagaaaccaaccctgaactattttcatgtgtggggttgtcctgctgaagcacgattttttaatccaaacatgggaaaattagacctcaaaacaatcagttgtcattttatcggttatcctgataagtcgaaggcatatagattctactgccgaaatcagtttacaaagtttattgagacaagacacgctgtgttcttggaaaatgacataatcaaggggagtatgacacccagagaagttgttctggaagagaaacggaattatgttccaatgcctataattgaagaacccgttttctcaacacatactcatgttgcacctttaatagaaagaaataatgatgcaacacctgctgaagctcctgcaactacttctagtagtgtatcaaatgatgagaataatgagaatgctcagcagccccatgttgtgatagatgagaaaaataacgaacccgtcagaagatcacgacgagttagaaagtcagcgattccaagtgactatgtcacttacatgaatgaagaggtgaatgaacctatgagtgaagaggtgaatgagcctatactagataatgatcccatctcatttaaagaagcaatgaagagtgaacattcgtctgaatggctaaaagctatgaaagacaaaatgaagtccatgagtactaataaggtctgggacttagtagaaattcccgaaggagccaaaacagttggctgcaaatgggtctataagactaaacgtgacctcaagggaaatatcgaaaggttcaaagcaaggcttgtagcaaaaggatttacgcaaagagaagggattgattataatgaaacactttctccagtctctactaaggattcgtttagaattattatggcactagttgcccattatgatttggaattacaccaaatggatgttaagacggcattcctgaacggtgatttgtacgaagatgtatacatggcacaaccagaaggttttgttatgaaaggaaaagaacatatgggttgtcatctaaagaaatcgatttatggactaaagcaagcatcaaggcagtggtatctaaagtttgaccaaatcataagacaatttggttttaaggagaataaaaaggatgactgtatatacgctaagtttaaggagacctcgcctgctcctataatgaagggtgataagtatggaaaattccaatgtcctaagaatgagtatgaagttgcgcagatgaagtcaataccatatgcttcagttgtcagaagcataatgtatgcacaagtatgcactcgccctgacttagcttttgttaccgggatgcttggcagatatcaatctaatccaggtctacaacactggaaattagctaagaagaccttgtatcttcaaggcactaaagacctcatgctcacatatagaaagtctgaaaaccttgaagttgtcggttattcggactctgatcttgcagggtgtattgatgataagaaatccacgtcaggttacatattcacccttgcagggggagctatatcgtggaaaagctccaaacaaaaagttactgcatcgtcgacaatgcaggctgagtatgtggcatgttataaagctactgggcaggcaatatga

SEQ ID NO: 38101 - DNA, 269 bp, Oryza sativa
  unsure (1)..(269): unsure at all n locations
  Clone ID: PAT_MRT4530_41770C.1
ccaacctcaaaaacccaaaccctagctctcctcgccgccatcccatggcgcgcctccacctcgtggtcgtggccatggccgcgctcttcgccgccgcggcggtnggcgcaggagcccgagcgcctccccgacgccggctccgaaggcgcagcanccgtntggcgaccccgccgactnggccgccggcgttggcgccggtggtctcctcccgccgcccagccgccagtaacgacgcctnccccgggtttccgcgcccgcgccccgtnccc

SEQ ID NO: 38102 - DNA, 477 bp, Oryza sativa
  Clone ID: PAT_MRT4530_41771C.1
atggcgctcaggtccgtgtatacactgcacacggcctctgccgcccctagggccgccaccgtcttcgggatcctcctccacctcctggactcccagctcgtcgccgccccaagggccgtcgtcggagacctctgcagccgccgtcgaggaaaatcaatctcttccacccggactcccaggcatctgccgcccctagggcagccaccgccaacgggatccgcctcctcactgcgaaccttgcaccggcactcaggccgccaccgtctcggttcgatcgctgcccctagggccgccgccgccgccggagaagccttctgcccggactcccaggcgattctgccatacgctgttgcgaaagataccacctccacccaatcccgctatctccttgccaaggatacaccggcgacacttaggccaccgccgtccgaagggacgccgccgtcgactccagaacacctcagctcccgcacttaa

SEQ ID NO: 38103 - DNA, 2937 bp, Oryza sativa
  Clone ID: PAT_MRT4530_41772C.1
atggtgggaggcagccgtctgttcctcctcctcctcctacctttgctgctgctgctgctgggcgccggctgcagagatggccgccggtgcgccgccgcggccgcgcagactcagaggctgccgcagcaagaagttgaagcacttaagggaatagcacgcaagcttaacaagatggattgggacttcagtgtggatccatgcactgggtctaaaacttgggttaatgccagtgattccaatagttacccaaaatctagttatcctaattttccagtcagcaatctgacatgtgattgttcattcaagaacaacacagagtgtcatgttatcagcttggaacttatgcgtcagaatcttagtggagttctacctgaagaagttgtcaacctcacttatttgacaaatctgtctctccagggaaatcgcatatctggaacagtacctaaggagcttggacgcatgcccttcttgaaatctataaatctagaaggcaatcagcttgagggtcatattccaccagaattcggtaacatcatcagtttggagagatttttcatttctgcaaatgacatcacaggagagttgccttcaaccttttccaggctcacaaatatgacagatttagacatgcagggtaccttgatgagtgggcctattcctccagaaatttctttgttgaacaacttaacagaactgagagtgactgatttgagtggaccgagcatgaaatttcctcccttacaaaatgcacagcaccttacaaaagtggtcctaagaaactgctccatatatggtgaaataccaccttaccttggacagatgcagtatctaatactcatggatctaagcttcaacaagttgactggtcaaattccacaaaattttgacagaatggtggcactacaactacaatatttggatgtgtcgtttaataacttcacgggtaaccctccaaatgaatgtcaacaagcaaacgtaaatatggtttcaagtttttcatcctcaaatgacaatcttttgcaaccatgtttacgaaagaatcttccctgcatggacaaaccacgctattcctccctatttattaactgtggtggcaaaagtgttgaggtcaatgggaatatttatgaggatgactcatctcgaataggaacatcaacttttgttttatcaaatgacagaaaatgggcctatagtagtacaggagattttgtgggtaatccagatgctgattacattgctagaaacacatcagaactcacactggatcaccctgagttatacactgaagctcgcctctcacccctctcactgaaatactatggagtctgcatggaaaatggtgaatattctgtagaacttcattttgctgagattgtgtttacagaagatcatactttttccagcaatggcaagcgcatttttgatgtttttatccagggtactaaagttttgaaggattttaacattcaagatgaggctggtggtgtccatcgtgtaattacaaaaactttcacaaccaacatcacagataatacattggaaattcacttctactgggcaggcaaaggtaccacaggtgttcctgaccggggtgtgtatggtccattgatctcagctatatctgtgatacaattagcagcatgtttgattgtcatacttgcgctaattctttgctatatcaaattcttccggaaaaagaatctgaaaggaaatggtttacaattcttttaccatggaaggaagaccgatacttcagatcttcagacacggacacagtacttctttagcttaaaagaaattgaatctgcaacgaaaaattttgatcctgcaaataaaattggtgagggtggctttggacctgtttacaagggtacactagccaatggtactacagttgctgttaagaaactctcttcccagtcgagccaagggaatcgtgagtttttaaatgaaataggaataatatctgccctaaggcatcctaaccttgtaaggctctttggttgttgtattgatggagaacagctactgctgatatacgagttcttggaaaacaatagtcttggtcgtgcactttttggacgtggagatcatcaattgaaactagactggccaaaacgatataatatctgccttggaacagcaaaaggcttgtgctatctccatgaagaatcaacattgaaaatcatccatagagatattaaaccatcaaatattcttcttgatgaaagactgcaaccgaaaatatctgattttggtttggctaaactgaatgatgaccgtgggcgtatgagcactcggatagctggaacagttggatacatggcacctgagtatgccacgagaggttgcttgacatgtaaagcagatgtatacagttttggagtggtgacattagagattgttagtggaatgagcaatacaagtagcatgtcagatgacgaatatctccatcttcttgactgggctgaaagattgaagcaggaagggagactactggaaatcgttgaccagcgtcttggttctcactactctcaagaagaagcacttaggatgctcaatgtagctcttctatgcacaaacacatcacctgttcagaggccaagaatgtcttcggtggcccagttactcccaatccaatcaatccatgaacaacagcctaacggagtggtcctacgcgccatcgagcgatccttcgatcttgctgcagaacagtatggagagtggttacctcccatcttcaagctccccttcttcaaagctctaggaaggttattgtttggtgggcaagtagagaagacatgtaacataataacagttcagtgcaaactagtttctgcccttgttaacttaaaaaagaaggaaaaagtacactcaaggtccctcaacttgtcatcgagttacaataccgtcctcgaaccgcaaaaccggatatga

SEQ ID NO: 38104 - DNA, 224 bp, Oryza sativa
  Clone ID: PAT_MRT4530_41773C.1
gttttaggcgaggttgacccttcgagccactgcggggccgagtgtagctacaatgctgatctgacaccgcatagcttggcatcagaaataggttgacaacgattcgaccaccctcttcaacataagatagtgcggatacgcagaccggcccgacctctacgacaaccgccgcgagatgtgcacagggacccttgtgacagctagcgctcacataataacgaccg

SEQ ID NO: 38105 - DNA, 856 bp, Oryza sativa
  Clone ID: PAT_MRT4530_41774C.1
cgtgggcgtatgagcactcggatagctggaacagttggatacatggcacctgagtatgccacgagaggttgcttgacatgtaaagcagatgtatacagttttggagtggtgacattagagattgttagtggaatgagcaatacaagtagcatgtcagatgacgaatatctccatcttcttgactgggctgaaagattgaagcaggaagggagactactggaaatcgttgaccagcgtcttggttctcactactctcaagaagaagcacttaggatgctcaatgtagctcttctatgcacaaacacatcacctgttcagaggccaagaatgtcttcggtggtgagcatgctctgtggccaagcccctctagaggttgtacctgatgaagatttgagtggatacatcaggcccagttactcccaatccaatcaatccatgaacaacagcctaacggagtggtcctacgcgccatcgagcgatccttcgatcttgctgcagaacagtatggagagtggttacctcccaatcttcaagctccccttcttcaaagctgtgagctgcagcaccaggattagctaggatgaaatgttggcaattgttttgagcccaatgcagcaactgtacatatgcatatgcatttgctctgtctgtaatcccctgtagtttggcattctgtcagttgtcctcagccttctcatccatggcatatgacaattgatatcaatgatgcattgccatgatgatatattcttcacaaggggactggaagcagatattggaatctgatgctgctgatgtgatggtacatatgaattgagcaacttctcaggggcaccacttgagtttcttgtttgtt

SEQ ID NO: 38106 - DNA, 903 bp, Oryza sativa
  Clone ID: PAT_MRT4530_41775C.1
ccgggctgcaggaattcggcacgaggaatttggaggccgtgccgtgccacacccgaccccaaaccctagaaccaaaaatccccaaactctcgctgtcgccatggacggggttggcgatggcggcggcggcggcgaccttgctaccggcggccgagctggccggggaggcgtgcccgctcgccgtcctaggaaaagccgattctctgttcttgcttccatggaagacgactcggcggaggaagagttggaggagtacatcgacgacctcgttcctccaggttcagcggcatttccctctgaacgaaagtggagacaaggacgggcagaatttgccaggagacatggatgtacagtagctggagctagaactcctattcggcaaagtgttctttattcagaccgccccaagcgatcccaaggcagacgaggacgagtcaagccacaaactgaatcactggctgagaaggatgcgagtgaggtgagcaatagtgagcttggtgctactactacagacatgccaaaattcaagacactgtcgctgaaggattcaccctctgcacttgattcagctgatagggccatggtgagtactggtagcatggacagtgatttacctgattctgcaattaccgagctgccacttgtagaggaagctttgtcgccaaggtccgagagcatacggaaaataaatttgtacctggctgaacacacgtttgatgatctcagggagggattcgcagctatgttaaatggcttccgcgacccacccgaagatgctgctcagcccaatgcagagttaccagaagcatctaagccttgtcctcgtgagttagatgccgaaccatttcaggattcagagtctctttcccctgcagctgaagacgtagcacggcataacatgtc

SEQ ID NO: 38107 - DNA, 927 bp, Oryza sativa
  Clone ID: PAT_MRT4530_41776C.1
atgctcgtcatcggcaccgcgaacccgcccaactccctgtcgcaggaggagtacaccgactggtacttctgcgtcaccaacagcgaccacctcaccaacctcaaagacaagatgaagaaaatatgtcacaggagtggcatcaagaagcggcacttccaccacaccgatgacacgttccgcgaccacccagagctcgccgtgcgcgaccagccgtcgctcgagacgcgccaggacatactagcgaccgtcgtgccagagctcgccgcggaggccgcggcgagtgcgatcaccgagtggggccgcccggcgagtgaccgcacgtcgatgtacttccacgggtgctccgcagccgccgccgtgctccgcgtcgcaaaggacctcgccgagaacaaccccggcgcgcgcgtgctcgtcgtcagcgccgagctcagcctcaccctgttccgcgcgccccaggaggggcatgtcgacacgatcgtcgggcaggcgctgttcggcgatggcgcgggcgccgtcatcgtcggcgctggcggggatgagcgccagctcaacgcgtccggcttggtgttccgcccttcgttcgagctcccggcgatggtgcgcgacaacatcgagcagtgcttggccgagggagtcggcaagcatgtcgcccatggcggctggaacgacctcttctgggcggtgcaccccggcgggaggaagatcctggacgtcgtggaggaccggctcgcgctggcgccggggaagctggatgcatcccggcatgtcctgagcgagtacgggaacatgtctggcgcgtcgattatcttcgtcctcgacgagctccgacgacggggcgacatgccgtcgggagggctaggcgtgatgctggggatcgggccggggatctccatcgagacgatgttactgcgtgtggcggcagcttga

SEQ ID NO: 38108 - DNA, 943 bp, Oryza sativa
  Clone ID: PAT_MRT4530_41777C.1
gaggtagcgtctacaaagggtgtgctccacaagtccgccatcaaggtcgctgtaaagaggatgtcacatgaatcatggcatgggagatgggatgaaggagttcattgtagaggttaagcatgcgacagccactggccaccacgacctcgtgcagttgctagcgaaagggataagtacttctcttggtctatagttacataccaaatggtagcatggataaatacctatatgattgtagcaagggtacattggattggccatcagggaagtagcttcagggttatcatactccatgaggattgggagcaaattgtcctccgtcaagatattaaagcaggtaacgtactcctcgatgaccagatgaatgggagtttgtcctagcaaaactttacgatcatgggacagatatgcaaaccacacacatggtccgcactctgggatacgtagctcctgaactaggacagaccagcaagactaccccatccatcaatgtgttcgcctttggtgtattccttctggggatcaccttgagcggaggccaattgagccagataagggaaacagcagcatcattctcctagattgggttgtggaacattggcgtaatgatctagtcactaaggcagcagacatgaggattctaaataggtgtagtcttgactaggtttccctagtgttaaaactcgggcttctatctcacatggtcatacccacttcctaatgcaaggttacccatgcaacaggtcatgtagtaccttgacggaaacatgctccatacccccaaacttgttaccggcataccttagctcaaacatgttggagcggtccatatctgttggctgctcatctctgggttcgtctccaagctccagagcttggtggggaagggtatcatgggataggtggagcagccgaggcagaggaatgaaagacacaaggaaac

SEQ ID NO: 38109 - DNA, 213 bp, Oryza sativa
  Clone ID: PAT_MRT4530_41778C.1
atgggcgtgtggctggctgatgacacggggggcacgcagctctggcggcgctcagcctggaaggcacaggcggcgatgggtggacggtgcgcagcccaagcgtcgccggcggcgctgagcccagacggcacaggcggcggccgtggggctcgtacgcgagaggccatcgtcttcacggtggagctaatagaaagattggaacagatcgtatag

SEQ ID NO: 38110 - DNA, 1839 bp, Oryza sativa
  Clone ID: PAT_MRT4530_41779C.1
tttttttttttcattttccgaaccgtaacccctatatatcatcgccgtgaaaattgtttacagagcactcaataagacaagtgcatatgcatgtttgcataacaagacgaggaatcgctaaacttgcttcgagagatattgcaaaactttcacctccgtttgacctggactttcacaagatatatgctgtttgaagatgatagcaaaaatctaatctcatcaggggatgtgtataacgagggcaatttctaagataaggcccaaatatagcgagaattggattatacaacattgtaaacaaaatcccatcttcatgtccaccactgatcattgtgtcggagaacttcaaaacctcttgcaaacaaattcatatggaggaactttatcaacatctccccaactagccattgtgggtggtgaagacaacatcttcttggcaaaagctgttatatcatctagagtcatttcgtccatacattgaagaaaatggtcaacaggcttcctgcaaccataagtcaatatctgcctccctatatcttctgcaacaattaccctggattcaagattcatcagcacggcagaaattgttgagtttttcgctcgtgccaattcaatgtctgtcacttgtccaggtgttgcaatagcaatcagttcttttgtcgcaatatcaacagcctttgcaacaaaatctgaaggcgtggtcaagtaaataccaaagaggccacttctatcaaatgcattgctaaataccgaaaatgattcgaccgtgtggtatttagttaagacacgcagataaagccgtgaatgcatcccttttccaggaccaccagaagagaatgaaccaccaccgcccattaaagtctgtactacagtcataattgtggcatctctctcttcaagccagcccccgggcacttcgaaagccaaagcaacatgggtcatctctgagtctgctctatgtctaaaatccccaccgatatacttagactctggcctttccactggggagcccttgtgccaatcagacaataaaggctctgcaacatctaaaaggtattgatgatcaacacctgatgctgctacaaccaagcgatcagcagtgaagttctcgtgatagaacttttgaataatactgccattgattcgtgtgagactctcctcaggggctactagtggatttgcaagagcacctgtgtatccaactagattaagtgattcctgaagaaatctctcagggttcttctgtagctcctgaacttcttctctggcaaaggccacctgtcgctcgacttcgtcttggaggaacaatggattgcggacacagtcgatgagcacggccgtggcctgcggcaagtaggccttgagagtctcgtagctgtacaccgtctgctcccttgatgcagacgccccgatgtttcctccggtggcctccacatcctgcacaatctgcaggtggctgcggtgcgccgtgtccttgaaggacagcctctcgagcaggtgtgacacgccggccgtctccgccgtctcgtaaaccgagccggaatccacgaacacccctacgcacgccgacgggcccgggaggtcctcggaggcgacgcggacgccgttggggagcgtggtgacgcgggtgggctggacgccgagctggtcggggaggcactgcgggacgtcgagcccgggcagagggtgcaggagcgaggtcgtccgcgcggcggaggctactgcgccgccggagagccattcccggcggcgccccgacgaccgcgacgcctcccgtagctctctcagcaggcgagcggaggagcgcagccggaacatcggagcgcggacgcgctgggc

SEQ ID NO: 38111 - DNA, 537 bp, Oryza sativa
  Clone ID: PAT_MRT4530_4177C.1
ataaaaaaagaaaaatttttggaaaaaataccctcgactcactggggggcaacaagcctggggttatacttttgggaacacaaacaaccctacagaacccaaacattttttttaccgggttcacccgtttttaggacgttttaaaaccccaaatggggggccaccagggggaccggaccaaaaccttgttttccctgggggggaagggaaagaacccctctttttttttcttttttttaaccaactagcgggggacggccaaaaacagggggggccccatatgcagaaacatacattttagggggcgggacgggggaggcataaccggtccccccggaaaagggggccccaaaaaacaaattggttcttcgggggccaaaaacacccctgtttatgggaggggccggggccccaagaaagggaaaccgccggctttccaaagacgggccccttcaatccttggagggcttcttccgaataagttttggggacaaattgaacaaagcccccttggttccctaaaagaatttttacagg

SEQ ID NO: 38112 - DNA, 399 bp, Oryza sativa
  Clone ID: PAT_MRT4530_41780C.1
agagcaaaggcacataattttggattaatagagctgttatgtacacatcaaaatagtttcctatcgcagtagtactgaactccgttgcccatccattgaaaacagtaaaacactgaccaatattagatgagccactttcacccatgaagcaaagggcataaaaaaagcgagtggcgttttttttttgtttacagagttcaaatggtacaaaccggtagaaccatgccaatttgccaattactcttggcggtggtcacaactcaaaccattttaaaaacaaaatggttttttttcttggaaaattttccatgaagcctaatttataatcttatctcctgcgaaatctcatttccgacccaactctcttattacattaaaaaggggggaaaaaagccactg

SEQ ID NO: 38113 - DNA, 1797 bp, Oryza sativa
  Clone ID: PAT_MRT4530_41781C.1
atgccagcctcctccctccgcctccgcgccctcctcgcgtcgccggcaccgctccccgcgcgcgcgctcctcgccgcccacgccctcctgctcacgtccggcctcgccgcggactccgccctcctcgcgcacttcgccaggcacctcgcctccgcggccgcgcgctcctcctcctccgccgccgccgcctccgccttccgcgcgctgctcctcctccgcccgcgctgcgcacacccgttcaacgctctcatctccagcctcacccatgcgggcgacccctccgcggcgttccgcgccttcgcgctcctcctcgtcgcgtccggcgcgggcgcgggcgcgcggccggacgggtacacgctccccgcggcgctcaaggcgtgcgcgcggctgggcggcggcctccgggagggctgccaggcgcacgcggtcgcggagaaggccgggttcctggggcgcgtccctgtgcagaacgcgctggtcacgttctacggtgcctgcggccagtgtggcgacgcgaggaaggtgttcgacgaaatggcagagcgggacgttgtgtcatggaccgcgctgttgtctgcgttcaccaggggaggtatgttcatggaggctctcggggtccttgctgagatggacgttacaccgaacgaggtaacactggcaagcgtgcttgtcgcttgtggaaatctggggacggcacgggctgggaaggccgtgcatggatggtacttcaggcgggagaaggagctgaacctaattgttggcaatgctctgttagatatgtatgtcaagtgcgagaaactggatcttgcaaggagggtatttgacatgcttttggcgagggacattgtttcatggacggttatgataagtggcttggtgcagtgcaagcgtcctagtgaagcattggaggtgttcaatgcgatgcagatatcgggagtgaagccagacaaggttgttctttccactgtcctctcagcttgtgcaagcttgggcgcactggagtctggtaggtgggttcatgagtacatagaacggaagggcatcgagtgggatgtgcatgtggggacttcagttgttgatatgtacgtcaagtgtggatgcttggacaccgctgtttccatcttccaagagatgcccctcaagaatgtatcttcctggaatgcgttgatcaatgggtttgcattgcatggtcgtggcagggaggctcttgactgctttgacaggatggttgcatcaggtttgcaccccaatgaggtcacttttataactgtccttggtgcatgttgccactctggtttagtgcaagaaggccgtcagttgtttgagttgatgacaaagtcctacaagctctcaccttgggaagatcattatggttgcatggttgatcttcttggaagagctgggctcatccaggaagcatatgatgtaattaaagccatgcctatgagacccggtgtgttcacatgggtaaccctactaagtgcatgccaagctcatggacgaatggatttctcgcagcagattcttatgcatatccatgagttggagtcctctgggaatgggatttatgtccttctctccaacatgtatgcagtgagtgatagatgggcagatgtagggaaggcgagagggttcatgaatgagaaaggcatgcagaaggaaccaggatccagtgtgattgaggtgaatgggaagacctgtgaattcttagttgggcaacagaaccatctgtatatggatgatgtacgtgcaatgctttccatacttatgaagcaaatacatctggatggtctctag

SEQ ID NO: 38114 - DNA, 668 bp, Oryza sativa
  Clone ID: PAT_MRT4530_41782C.1
atggacaaaagacgaggcactagagccacagggaagaaggagggcggtgggctagcgttgacggtaaagggcaagggcggtgtaggcggcgctcctttggtgaataaggacggccggatgcaggcggcgagagggcacggccaggggaggtgccgaagcgcgcgagagggatggggaccgccggaggatgcgggcgcgcgccgcgagggaggggctcgccggccgcggcgcccgcgcgggaagggttcgcctgccacggcaagcgcggggggcgcggttcgccgggatgggtcgtcgaatcgccgccactgccgtcgccgccgacgagctggctcctctcgtcgccgtcggtccaaagggaggagacggagacctcgctccccttgtcgaaatcggcggagctcaacctgggcatcgccatcgccgcctctggctccacctcccggatcggcaagacaacgcagcggctgcgcaaatccggcagctcagcggcggtctccgccgcgggaggccgtggtagtggccggcccgctcccgccgggctcccgccgctttgccgagatcctgccgtctcgccactcccgccgtcctgccgctaccaccgagctcccgctgccccacctctcccgctgccccgccgctcccgctgagctcccgccgcctcgccg

SEQ ID NO: 38115 - DNA, 591 bp, Oryza sativa
  Clone ID: PAT_MRT4530_41783C.1
atggtggcggcgcgcgcgcgaaggccgagtagcctgacgcgcggtggagaagtgctcgcgtcgaaggtgtcaaccatgaaagacgataacactaagtcttttctgaacaaggtgaaggatttttggactgagatcacaactagagagtcgcaagttgtgaaaaataacaatgcggatgagattgaaaaaaacaacaagaagcgttcaggactctaccgcgacctaattgtgatgttcgcgctgggtagtgtattttggagtggcgcgaaaaaagcactttctcagctaaagggttgggttttttgtgtcgccagtgtatacatcaacttcgcgctaatctccatgatggtaggggctgcggctggtaccttgccagatgtctttagatgtcacatgggcctctcgggcaatggcgtgcttcaaggacttctcttcaatatcatagccttcaactatgaattattcacaaccttgttgcccggttccttagttaagctgtcccagagagttatgtactgggttacaggagcaacaagtgctattgcagtaacagtcatttggacgttggccacggaagaccccctggtttga

SEQ ID NO: 38116 - DNA, 232 bp, Oryza sativa
  Clone ID: PAT_MRT4530_41784C.1
ttgttttgaggagctcactccctttccccttgtggcgccgtcgcgccgagtcgagacggatcacgccaatgatatccacccccttgtatccagtactggaactgttatgaccaaggctggtttagggggacattaatcccccagggctgtatttcttaagaaggacggcacccctagggacattgttggcatgaccggaatgggacgaaaggactcttatgatggacacaag

SEQ ID NO: 38117 - DNA, 125 bp, Oryza sativa
  Clone ID: PAT_MRT4530_41785C.1
cgcatcaactctaccgggagtgcggcacccactggggaaggggtgggaatccgctcaaaccggaccgtgggtcggaccttcaacgcgagacccgctgctacaagcgcttcgctcggactgcgtac

SEQ ID NO: 38118 - DNA, 235 bp, Oryza sativa
  unsure (1)..(235): unsure at all n locations
  Clone ID: PAT_MRT4530_41786C.1
ccccaagagaatntgcggcttgtctgcacacggggcagatgaacctaccccctgggatgaccccctgntgccagtggcctgtctgagggtgacctgggggacaggctgtctgagatgngcaaactgtctgtggtagaccgtgttgaaacccttgcgaaatgtgggaaccncctgatctgttgggtggaaacctaaaccacanatgtgagcgcatttgcccccccgactgcaacgc

SEQ ID NO: 38119 - DNA, 592 bp, Oryza sativa
  Clone ID: PAT_MRT4530_41787C.1
aaaaaaaaaatttcataaaagaggggtgggcaaacatggggcccaaaacccgggggtggttttttttttttgggacggggggggaacaggggggaattattcatgggacaaggcaaggacccctcccccccagaaagaaaaaaaaagctagcttggccaaccctctctttcttttttttttcacctggaaaaaaaaaaggccgttaatgcccaaaaaaagggggtcccccccctcctgggaacccccggccaccgcctaaagccgggggttttttctttccttttcccggctccccgggggggggaaacccggagttcctcggggaaaacggggcccccggaggggaaaaggaactccgggccggggccgtttcccacaccgaccccgaggacggggggccccccgaggggggcaggggggggcccctccccccatgcccaaaaaaggagaaaaagggggcacccccggggggggcccaattaaggaccccccccaatcaagctcggggccaaatttggggggcccgggggatattggaacccccacaacccacgggaggggccgacaagggcaaacacaaaaggggggggg

SEQ ID NO: 38120 - DNA, 352 bp, Oryza sativa
  Clone ID: PAT_MRT4530_41788C.1
cgggaattacattcttttttttttacccaaaattttttattaaccaaatttttttatattccacacatacagtttgtttacaaatttttttacacacaaggttattgcagaggcaaaacacaaggtttttatttcaacccctctaaaaaagattcatgtgatgaaatacatgatcaaccacttttgtttttaaggtaaaattaattaacccagtttatttttaactttgcccatcgatcttaacttttaactgtgccgacacactggtttcagtgccctaaaagtactaccacctatacattatctgtagaacataacatcagcaccagcaggttcacttttttgattggat

SEQ ID NO: 38121 - DNA, 888 bp, Oryza sativa
  Clone ID: PAT_MRT4530_41789C.1
ccggccggggtaaaattctctctcctcgcgccgcctccccaactaaccttcctcttgcggcggcggcggcggcgccactgccggagaagaaacccgaccgcgcctcgcctcgccgagcggcgaagcggcgtagggcggtagcggcggcacatggagggggtgaacggcggggcggtggaggaggagaggaagccgctgtcggaggtggtgggcgactgcgtgcagcgctggttccaggacgcgctcaaggaggcccgccgcggcgactccgccatgcaggtgctcgtcgcgcagatgtaccactccggctacggcatccccaagaacgagcacaagggaagagcgtgggctgagaaggcatctagatacaggccttcagtctggaaagttggcacaaagcgtccgggatataatgccagtgactcagattctgatgaaatgaatgatgatgagaagcaataacaatgaaagaatcaattgtgagtttagatagaagaatggcagggtaatgataaatctggttgtcaaaccctcgtcaattttaccaatttgtgtgagattggggcttctttcggctggagtctgccatgtgagctatcaagtaaattttgtaaaaccgtttggatacttggaacacacaatgtattcaatattgccccaaaaacagagggaaaaatgtcaatttagtggtgcttggtgcttacaggttcattatttcaaacttagctagtttgagtccattttatgggttcttgcttgcatatgcttcaggttccccatggtgaacagtcttgtattggtttatgggctaaatggttgtctgccgagttacaacattctttcttttcctaaaaaaaaattggattatttgcatttattattttttgc

SEQ ID NO: 38122 - DNA, 390 bp, Oryza sativa
  unsure (1)..(390): unsure at all n locations
  Clone ID: PAT_MRT4530_4178C.1
ggctgcccgatttcggcacgagggtagnatccccattggacacctgntctatggactaatctagtcgacaagtccaagctgagctgngctgaaagacatgctttgctagccgtctacttcgatcagcagtcaagctcaagcccaagctatgttgggcccctaaacatgccgtcaatatgcggtatctacccaagctacaacactggctccctgtagcattcccaccgtcggtggtatctggtattgaattgtagcagtatagtagttacagggagagaaaaaataaagtcatgcatcatcgtgtgttgacaagttgaaacatcgcggggtgatacaaatctgaataaaaatgttctatgcaagtttaaacataatgcctctgttaggatg

SEQ ID NO: 38123 - DNA, 2182 bp, Oryza sativa
  Clone ID: PAT_MRT4530_41790C.1
tctaccgaaataatctacatttttttttttttcagctcctaaaatgcgtatatttgaattacacaaaggaccagtttggtttcatctttgagatacacatggattactatatggctattgaatacaatgcagtgcacagtagtggttttacaacagtttttttaaagcaggaaacatcagcctcaatcgaaatgatctgcagagaagtcaggctcatcaggcttctgcagcctccggatggcggtatcgtcggcacggaaccttctggaagcggaggcgaacttgtgcatttgagcaatggcactctcagcaatagtcttggtactgcttgaagtgccctcctgtttaggcttgtcagcaggtggatgttcttctggccaccatgagtatgattcccaccggctcaggctctctgccagctttctcctctggtgctgccgccaagcagcctggatgaagcaggcagcccatgtacctccaatggtgggagtagaaccggaacgtgtgctggagcttcttgctgtgtagtcttctgaactggttcgcgacgaacttgaggtcctcggctctcagggcaaaggcctcaacctctgtaaggctctgcactgtcctcgtcgaaagcgggaaatggacattggtctttggaagtaaagcccatgtgagcagctcctcgccagcgaaatcaccagggcgcaggatgatggagttgaagaagttgctgcggcctccgttggttgtggcgctctctagaggtaacgcttatgaggtagattcatctcatacacatggttctgcctgacgtgaaacgtgtgtgcgcccccggacccggaaatacagcacacgatcgcgcaggtggtctcgaagccgctaatccatatctgagtgaaatagcacacgtcgaacaaggtccaaacagagggggcgctggacattccggcgtataccaacaggcaaagcttgtaagacggattcctgttctacaactcgtgttgcaaacgagttctctgcgatgaatgcacttgtccgaacaggatttccactagaactaagctgcagcaagccccaccccagacaaaatcattacttctcaagaaatggagcagaaacagcacctttactcagtgcggttgaaaacattccataattaaatggtggggggttagcacttgaattacgattgggatcacaattgtcaaatatacttgtgttctttccccaagtaagataactgctagaaccagtattgtcacagcttatgaagttaaaactacaagactcatttaggcactgctgattccaacatgtaatttgccgttcaatggagagaagatagtatattgctccagtaatcagagcaaatgtggtgttccggatgttgtaatctgagttttttattgaaggcataataatccacacggtaacctgaggaagagggatcgttgcaagtaggtcaataaagaaatctgttctgagatatctccgttgaatcttctttaagtccaagacaagctctcccttcccaagtactctggactttggatctacatatgcagtatggaacttgaccatgatgttcagcatgtaaaacaagtccgcaaatgtcctaagaacagtgatagttatgctcaatcgccggtccttggcaatgcatgaacggttggtactttcatctagtacatgaactagcggcaggtagtagaagaaaggatcaatgaaaagagcaaacaaacaggaccctaggaacaccctgttccacattagcaccatgctactcccagggtctagaatgcggcggtgccatggtatgttgccttcacttatcactttaatcttctcagtagtctttgcatctatcctgtttaccccaaatctgtcagcccgtgcagcttgaaacggtagcttaaactggtcctgtctctcatcaggaaagatcctgttggtagtcctcctctgcatctccacctcatcctggactcgggacccaaacatggcggctgctccccttccccccggaccaaatcttgctgtgtcaactgaggaggccgatcagaggagcagacggcgagcccgatgcttcttcccgccccaaatcaacaccatggcaagtcctcctcctgcttgagaagacttgccaaggactaggatggaacggacacagaaatttttcttcccctttttcgtt

SEQ ID NO: 38124 - DNA, 743 bp, Oryza sativa
  Clone ID: PAT_MRT4530_41791C.1
ccacgcgtccgggggtaaacaggatagatgcaaagactactgagaagattaaagtgataagtgaaggcaacataccatggcaccgccgcattctagaccctgggagtagcatggtgctaatgtggaacagggtgttcctagggtcctgtttgtttgctcttttcattgatcctttcttctactacctgccgctagttcatgtactagatgaaagtaccaaccgttcatgcattgccaaggaccggcgattgagcataactatcactgttcttaggacatttgcggacttgttttacatgctgaacatcatggtcaagttccatactgcatatgtagatccaaagtccagagtacttgggaagggagagcttgtcttggacttaaagaagattcaacggagatatctcagaacagatttctttattgacctacttgcaacgatccctcttcctcaggttaccgtgtggattattatgccttcaataaaaaactcagattacaacatccggaacaccacatttgctctggttattatgattcagtatatattcagaatgtatctcattgtaccattaagcaatcaaattatcaaagcagcttggagtagttgcccaagtcagcctggctaggagcagcatacaatcttctgtactacatgctttgcaagtcatattactggagcaatatactatcttctctccattgaacggcaattacatgtttgaatcagcagtgcctaaatg

SEQ ID NO: 38125 - DNA, 557 bp, Oryza sativa
  Clone ID: PAT_MRT4530_41792C.1
cccacgcgtccgggctacattgccagctttgatggaatggtggaacatgtcattgaacaatactcacggataaaaggcaggaaggaggtccgtgggctcccacattttctattgggacaatcaatgggaggtgcagtggctttgaaagtacacctgaaacaaccaaaagaatgggatggagtgcttcttgttgcacctatgtgcaagatttcagaagatgttacaccaccagcgccagtgttgaaggcattgagcatattgtcatgccttcttccagaagcaaagttatttccacaaaaagatattggagatttggcatttagagatccaagtaaaagaaaagtagctgagtacaatgccatttcatatacccaacaaatgaggttgaggacagcagttgaacttttgaaggctacaaaggacatagaatcccagttggagaagatttgttccccattgctgattctccacggagcagcagacttggttaccgacccccatgtcagcgaattcctgtacgagaaagctagcacaaaagacaagactctcaagctcta

SEQ ID NO: 38126 - DNA, 268 bp, Oryza sativa
  Clone ID: PAT_MRT4530_41793C.1
tcgtggtagagtactcggcttttaagtgcgactatgatcttttacacatttggatgaagcaaaaaattcgtccagactcttggtagagtctataagaccgcgactgatcctcaagggtaatgaatggaaaaaatagcatgtcgtaataaaatgaatttcttattttggatttttggaatggaataaaaaaattctgattttctgggtctaatgaataaatggatagagcctggctccacttctggtaaaacaaaaagcaaaaaaaaaa

SEQ ID NO: 38127 - DNA, 595 bp, Oryza sativa
  Clone ID: PAT_MRT4530_41794C.1
gcacgaggatcaacgcatacactccaaccactcctctccctcccatccccccgcgccctcaacacctctcccagatccaccggccatctctcctctccctcaatcatgggtagcgcgtggcagcaaggatagctggggcggcaaagctcgtggcgcgcgacggcagactgcggcagtggcacgatgggggctcgcggcggcggcgcgcgggcggctcgcggctagatctgctgccacgacgactgggaaggccagatccgccgccgacgccgacaagggtggtccgatccgccgccacgacgaccgaggaggccggatccgccgccgacgccgacggtggaggccggatccgccgttgcgacgacgggggaggctaacggggagggtgggtgcggatccgccggcatcggtgcttgggcggtccttcacggcggtgaaggaggtggatccagtggtggacaacgacgacggctcccgcgataacgacaacggctaccgtgacaatgacaacgacggctacggcttcttggcgacccttcttgctcgccggcacgccgctgtaccgccacaaggtgcctcaagggaagcccgctcg

SEQ ID NO: 38128 - DNA, 1317 bp, Oryza sativa
  Clone ID: PAT_MRT4530_41795C.1
atgggtggtggtgacgaatcctggacagtttctgtttttcttttggaaggtgatttcatcaatatgtcgctagatgaggatcttcccctagctggcccacagcctaatcctgctgctgatgatgatgaggatcctgatggtggccacatctggcaaatgggtcatccccaagcaggtcctggtgattgggatgatttagtccagcaacagaatacagcaaatgagcaggtggaagatgcttggggccaagatcaccctatgggccagatcatggaagtaaaccctgatggaataattgatttggctgttgctaaccctggagatgataatgtagtggtcccctttgttcctgctatagacaaggggaaaaaggtgcaaggatctgaccaggatgcacaagtgcagaggtctttagcaagattggagaaaattgctaaaaatgagtaccccaaggttccctatttctaccccatgaaagagatcaataagaagattgaccacctgtgcaaagaaaggggttctatgcatcagttcttggctagtaactctattcctgctactctttatgagccaagcccctttaaagctctagtcctaccaaagaagactatgtttgatttctccccccaagtgagtaagctggatgctacctgggctttggactttcataagtctaatagtcctcctcagtcacaggcccatgaaaacatggaaattcttgaagtcttgccttgggtggttcacccaccctccagtctagtctgccaagcagctgctcctttgatgctaccaaaagcccctggtaagaaaagggaaggcagaactcttctatataatccctacaggaggcagagtgcaagacttcagcatatcaaaggggattctgaactaaaggtggatcccagaatgggcattggtaagtcaaggggaaagtctgcaagaaagctcaaagaattggcagtcgaagaaaacagaatgctttcagtctatgagtggaatttcagagaaacagttaagctctttcataaccctggttccaaagaaaacctcccagagactgttaatgatttcagacctatttcccttatgggtataagtctgaaaatcttaaccaaattactagatgacatacttcaaggggtaattctcaaactgtgtcagcagtcaaaaagagaaattgtcctcttgaagttagactttgaaaaagcctttgataccattgagcattccgcaattctctccgttctgcaacatatgggttttcctctaaaatggattgagtgggtacaaatggttttctctactgcttgctattga

SEQ ID NO: 38129 - DNA, 1109 bp, Oryza sativa
  Clone ID: PAT_MRT4530_41796C.1
atggccggagaagacgccgccgccgccgcttccgctggcgccgcagcggtccagaggcgcccgaaggtggtggaagaagacgacgatgaagacgatttcgtgccgctctcgcatgcccggggaaggaagaaagcgagcggtgcggccgcccccaagtataaagaggaggaggaggaagacgaggatgacgatgaagaggacaacgtgccgctcgcggtttctcgggccaagaaggcgggcaatgcgggtgcctccaaggccaagaaggacgaggacgacagcggcgacgatgacgacgactaccacgtgccgctctcgcggtccaataagggaaaagagaagcagaaaagcaccgttaaggctaaggttaagaaggaagaaaccgattccgatgatgaacgcaagccaaaggcgcagaagaaaagttcagctgtgaccaagacctccaaggttaagaaaataaaagatgaggatctggaaatcgataccaagaaaataaagaagggtgctgccactagaaagggagatgcagagaaggtgaagaaagagaaaaaggtgtatgatttgccagggcagaagcatgatcctcctcaagaaagggatccactgaggatattctatgaatcgctctatgagcaggtgcccactagtgaaatggctgcaatctggttgatggaatggggtttactcccagtggatgtggctcaaaaggtctttgagaagaaacagggccagaaactgaagtcgccagtgaaaacaacctctgcaaagagaaggccagacactccaaccaaaaagccacagttgtcatctgctacaaaaaccaactcagccgtaaaggattctggaaaaactaccgcgcagaagaagaggagggcaagcagtgacacagatgatgacgatgatgacttcattgtttctaagacgaagaccaaaatgcaaaagatgaatagctaggggtatcatccttggcataattgctgaatcagggtaaccttaggaaaagatgaggagattttccctttccatgtactgacatgcatgagcatctggatactgaagtgaaggaatgcactgcttagaagttcccccaaaaaaaaaaaaaaaaa

SEQ ID NO: 38130 - DNA, 493 bp, Oryza sativa
  Clone ID: PAT_MRT4530_41797C.1
atgggtttttttggaggatatgagatcgggttcaagagcgcaagcaagaaggcgtcgacggtgctgctcgtgaacggcgatggcacagaggagagagacactggagccagctgcgaccaccgccgccgtcctcgccgtcccagagccaactgcgaccgccgccgccgtcctcgccatcccagagccagccgcgactgccgtcgccgtccgctgccgtccccgcgtggatttgactgggcggcgtggattcgggagaggaagagtgagaaaaagaggaagagggagagaaagagaaagaggaagaagaatgggctgcgccaacgtcacctgcgccaggcgccaccacgcatccatgccggctgcgccaccctcgccactacgccggctacgccacctgcgttgttgacctgcatcgtgcagcttgagcccgtcgccatcgccagtgctcgtcgcgacggcgctcgtcgccacctctgctgcacggcctgcaccg

SEQ ID NO: 38131 - DNA, 136 bp, Oryza sativa
  Clone ID: PAT_MRT4530_41798C.1
atggcgggcggctgggtggcggcgctgccagtgccagccatgactgaccagggacgacatgggcgccgcattggcaatttggcatgggcgggcgagggatttcccatccccgagcggatgaagcgtgtcgactcgt

SEQ ID NO: 38132 - DNA, 972 bp, Oryza sativa
  Clone ID: PAT_MRT4530_41799C.1
gcagacacattcactttgccttcgctttagcctttgtgctgtaacttgcaagaaacgtcggagtactcgcttgcgcgcgcccgcggcggcggcggcggcgacgagcgatcgcagcgggtgacgcggagatggcgtccaggtgcttcttccccagggaggccgaggccggcggccggcaccaccaccaccagtccaaggcggctgcggaggcgctcgagcagctgcaccacggcgggcgcgtcctgtcgcgggaggacgtcggcggcgcagtgcgcgtcaagatcgtggtcagcaagcgcgagctcaagcacatggtcgcggcgctcggctcgggcaccggcggcggcggggcggtggcggcggcggcggcggtgacggccgcgggggagcggcaccgtcagcgcgcggcgggcggcgccggcggcccaggcgccgagcagaggctgcagtcgctgcggcggcgcagcatgcggagggcggcggaggcggcgcggcggatgcaggcgaacggggagtgggagcccggcctgcagagcattcccgaagaggtttactgaatattataccagtagatggcgtcgttagtgatggttaatcacttgactaattaaggttgggttttgatcactgcctgctaagtctaagtggtagatgtacttgtacagcgctcttgatttgttcccggttactgttgagggttaaaccgttaatcctcccccaatgagtttgtgcatttttttttcactgtaaaattttggatggaagagaggggaggtggtgtttggactgcaatgcaactgctcctgatggtgtttgagtgactgtgagagtgattcagcgagtggctgaatttcttctcctttttgtttgtggcactgtaaaagtttttactgccactgcagctgatgtaaaatggttaattttgaagaaataaaaaaaaaagccccccgccccgtgctctccctcgtgccg

SEQ ID NO: 38133 - DNA, 741 bp, Oryza sativa
  Clone ID: PAT_MRT4530_4179C.1
atggcgatacagaagtccaaaataaagcatggacgaagtaagcacctaaaagcaattggatctagtacccaggttactaggaagatgcatatttcagatgtgcgattgatcacagaatatggtgttaagaatttcgtggccgttcaacatttgacaattgagaactgcacgcagataggccaaaacctgctttcctcaaccaagagctggttaccatctaacttgcggttcttgcagttcagttcttgcactttctctggtgttcttaatttccacaagggtctttcgatgctttcgggactagagatcaggaactgtgctaaacttgaatcgttgataggtttgaattatctcaataatcttcgaggactggttttggttgaatgtcctttacttgatatgtcaactggaacaaaatttccagatctattgtcatctttgataattcgcgggtgccatcagcttctatctctgcacttatgtaaccctgcagttctgacggagcttgagatatccgactgccgtggattcatgtacattggaggattaagaaattttagagaccttgaaagcttgaaacttcttcattgccctctacttcagctgcgggacttgatgccagctgctcctgaaactgccgtaatctgttgttgtccgaggctgaagaagtggtgcgaatggcatgacatagagtataaggacattcaggaaaatccagaagattcatatgggaagctgtga

SEQ ID NO: 38134 - DNA, 117 bp, Oryza sativa
  Clone ID: PAT_MRT4530_417C.1
atgggaatccgaatggaacaatcacgtcttcaaccagcagttaagaacctgggcagaagttctcaagtttccgaggaggttaaactctggtgtttagcttttcaggtcatccttccg

SEQ ID NO: 38135 - DNA, 327 bp, Oryza sativa
  Clone ID: PAT_MRT4530_41800C.1
cctgttcaactggcgcctggagaagatggttcaattgggctttcaacaaactggcaagggatgggcttaatctgagaacccccaagggatgggtgaatattggtgctgacttatgaagaccaagggatggagactgggatgcttgttggcgatgttcacactgggagatgtttcccaaactcttgtccgcagacctcaaggatcaatgaaaaggttcagaatgcaaattggacgttgctcacaaagggccaagtttgaataaaggtccccataaacccgcatacctaagaaaattgggtttgtcctgccccccaccaagtcaaaaaa

SEQ ID NO: 38136 - DNA, 291 bp, Oryza sativa
  Clone ID: PAT_MRT4530_41801C.1
acgcaccatgagctcacctatttacctgaacaagcacatctcagcacacacattgacatggcacatatttccatcatgttgcaacatactttaaaccattatcctcaccattcagaaaacatagactaaacattgccctatagagttcacctgatagctggtcgtattactgttgcatgacttgggaggcatgcccgtacgaaacatagcctgacatcgaccagggtctttatctgtggcgcataccacattggaacatggagttgctagctgatcagaccacactgttcc

SEQ ID NO: 38137 - DNA, 263 bp, Oryza sativa
  Clone ID: PAT_MRT4530_41802C.1
gtctttaggcatcaatgcagtagcagcaaagaggctacagagccaaaatgatcaaagaggagagatcatacatgtgaagaatggccttcaattgttgaaaccgactttgacacaacagcaagaacaagcacaagcacaagatccatatccaccaagttcaatacagtgaacgacagcmaaccatcttcttcgattggaaccggatttggraggrgamctcttgcmccratymaagcvarrrgkaaamcattgaaaattccwag

SEQ ID NO: 38138 - DNA, 311 bp, Oryza sativa
  Clone ID: PAT_MRT4530_41803C.1
aaaaggacaagaccggggatcatcgatcaggcgtagagcatgaacagaaagtcccactacctgcacaaatggaatcttctattgaaaactagaccaaccatccacgctggacacactaagacgcacatgctatacgtgacacgtacgtacatgtactgcaccgtgtgcacacacgcacactttactgcagagacgcgcattgacttcaacctatctagcttagctgaaggcgatgtgccttcttggacagacccatggcagctgagctcacttgacggggccctaacatgcggtcggtggcccattcccag

SEQ ID NO: 38139 - DNA, 520 bp, Oryza sativa
  unsure (1)..(520): unsure at all n locations
  Clone ID: PAT_MRT4530_41804C.1
atgccgcttcgctctgctggccacgtgctcgcccgccgccgcgccgctccgctctgccggccgccgcgcacttgcccgtttcgcgccgcccacccccggggcggtgccagatccgcgccgcccaccgccagtctccgcgccgccacgcgtgcaccggccgagacccacgcacgcgccggaatccgccgcccggangcaacaccggccctccccaccaccgaccgagccactccacatgcgccgcccccacggtgccgccgccagcactccgggccaaaaggcggagggactggccagatccggcggcggcgccgccggatccccctgccgctgccacccaccgacgccgtcgacgcccaccgaagccgtcgcggcagtcgagcccgctgccttcgcccgtcgccgcccgccgctcaagcccactgcgcgagcctgcccgccgctgccgcccgccacgcgttgcgccgctctcggccagccgccggtcgccgcctgccccgccccgtgccgctgtggatga

SEQ ID NO: 38140 - DNA, 483 bp, Oryza sativa
  Clone ID: PAT_MRT4530_41805C.1
atggcggccagaggcagccggtcctgcgcctggccgtgtgggttggggatggctggaggtggtcaggagggcagcgggaaccggcaaggagtcggcgatggagtccctccggacggcggtagggacagcgaagcacggcggaagatggtgacggcgctcggcggctacggcagccctaggggctgcggcgtcccaagacagtggcagtctgagcactgtgaatccgataaagtggaagctgatcccatcgagcaaatacagaggggattttcgatctacagagccaatacagaggggaaaggagtggtggatgggggttttacctgctttgctatgggcatcggcagggtggtctcagcagggacggcggcggcctcagcagagagtagactaaggaggctgttggagatgctcttagtagtagtatcgaacatcgggacataccaaacgagagggattttggtcaaggatttactaaagtag

SEQ ID NO: 38141 - DNA, 199 bp, Oryza sativa
  Clone ID: PAT_MRT4530_41806C.1
atggccaagccatcccgttggtcaaacttgctcactggctggctagagttggccaaccaaaacgccttgccaaacggtggcccgcagcaacgaccggtcggcgtggcggctggtgtactcctcaccgctaccagcttcgccgagcctttccgcccccgccgaattcagccgaccgcacgacctccgcctctgcgcctcg

SEQ ID NO: 38142 - DNA, 1177 bp, Oryza sativa
  Clone ID: PAT_MRT4530_41807C.1
gccacgcgtccggctgatcagtgactcgaggccggggcacatggcgtcggcgatcgtcgacgtcgccggaggcggccggcagcaagccctcgacggctcgaacccggcggtggcacggctgcgtcagctcatcggcggcggccaagaatcgtcggatgggtggagcaggtgctgggaggaaggcgtgacgccgtgggatctcggccagcggacgccggccgttgtcgagctggtgcactccgggaccctccccgccggcgacgccaccaccgtcctcgtccccggctgcggcgccggatacgatgtggttgcactgtccggccccggccgcttcgtcgtcggcctcgatatctgtgacacggccatccagaaggcgaagcagctgtcggcggcggcggcggcggcggctgacggcggcgacgggagcagcagcttcttcgccttcgtcgccgacgatttcttcacgtgggagccgccggagccgttccatctcatcttcgactacacattcttctgtgctctgcatccgtcgatgaggccagcatgggcgaagagaatggccgacctgctacgaccggacggagagctcatcaccctcatgtatttggctgaaggacaagaggccgggccaccattcaatacaacagtgctcgattacaaggaggtgctgaacccgttgggtttagtcattacttctatcgaggacaatgaagtcgcagttgaaccacgaaaggggatggagaaaatcgcaaggtggaagaggatgacaaaatccgactaataagattgtgaaggatgcgtgcactcctgttcgcagcataatatatttggcgtcatccgcatatgagagaataaaatgtctgtaataaaaagggagaaggaaacaaagaaatttaaataaatttaatgtaagttgagtttgtgcaccagtgtaatatatataataatatagggtaattattctatgcatctcaatgtaaaatgtatggtgtggcttaattattacagtaaattaattacttcctcttgtcttctactgtaaatccattcaattgtgggccgtgtattgaatcacatgagagattctcacgtgttcataccaccactctacaactttttgcccccttcaattggtatttcatacagcatgtggctctctcaaaaaaaaaaaaaaaaa

SEQ ID NO: 38143 - DNA, 302 bp, Oryza sativa
  Clone ID: PAT_MRT4530_41808C.1
tcgttatagtctgactcgtcatggacgaccaatatttgtgacttcaacagcgccatcggtattaaatagtctgaatgccggttcacaataattactgatgcatgttatggtaagacctccatttatgtcttgtgccccttttgtgacatcaacagtcaacgtctgcaaatgtatctgctcctgttaagcaccctgtacatttgccacatcctatatcatcccaagttaatgcaatttctcaccccacagaatcgcacttttcactcatgaagctcttataacttttctacaacttcacattt

SEQ ID NO: 38144 - DNA, 2518 bp, Oryza sativa
  Clone ID: PAT_MRT4530_41809C.1
ctcccgcataacagccattcgccacttcaccaccaccaccgccataatccgtctcgccccgatccagccggctcgtcaccgacgcgacgccgccgcggccccccagatcccgtcgtgcgcgcgcgcgatctgctctcgcaggcgaagatggcggcttacgagcccaagaacattcttataaccggcgctgctggtttcatcgcatcacatgtggcgaaccgcctagtcaggaactatccgcactacaagattgttgtcctcgacaagctcgattactgttccagcctgagcaatctcaacccttcacgtccatcgccgaatttcaagtttgtcaagggtgacattgcaagtgctgatctggtgaactaccttctcacaactgagtcaattgacactatcatgcactttgctgctcagactcatgtggataattcatttggcaattcctttgagtttacaaagaacaatatttatggtacccatgtccttcttgaggcctgcaaggttactggtcagattagaagatttattcatgtgagtactgacgaggtgtacggagaaactgatgaggatgctgtggttggcaaccatgaggcctcacagctgcttccaacaaacccatattcagctacaaaagctggggctgagatgcttgtgatggcttatggaagatcttatggccttcctgtgattacaactcggggcaacaatgtatatgggccaaatcagttccctgagaagctcattcccaaatttattcttttggcaatgagaggcttgccccttcccattcacggtgatggctcaaatgtcagaagctatctgtattgtgaggatgttgctgaagcttttgaggtggttcttcacaaaggagaggttgggcatgtgtacaatattggtactgtgaaggaaaggagggtgattgatgtggccaaggacatatgcaagctctttggcttggacaccgagaaggtcatcagatttgttgagaacaggcctttcaacgaccagagatacttcttggatgatcagaagctgaagaaattgggatgggcagagcgcacactatgggaagaggggttgaagaaaacaattgaatggtacactaacaatcctgattactggggagatgtcgcaggtgccttgctccctcatccaaggatgttgatgacacctggagttgaaaggcataactggactgatgagatcaaatctctttccacttcaccagatgaagctaaggaatctagcactgcggttcctgcagccactgccaaaagcaccagcagtgcccctcaaaaggcctcatacaagttcttgatatatggtaggactggatggattggtggtctacttggtaagatatgtgagaagcaagggattccatatgagtatgggaaaggacgcctggaagagcgctctcagctcttgcaggacattagaaatgtgaagccaactcatgttttcaatgctgctggtgtcactgggaggccaaatgttgactggtgcgagacccataaacaggatactatccgcaccaatgttgttggcaccttgaaccttgctgatgtttgtcgtgagcagggcttgctcatgattaattatgctacaggttgcatatttgagtatgatgctaagcaccccgaaggatcaggaattggttttaaagaggaagataagcccaactttactggttcatattattccaaaactaaagctatggttgaagagctgttgcaagaatatgacaacgtctgtacgcttcgagtcaggatgcccatatcatcagatttgagcaacccccgtaacttcatcacaaagatagctcgttatgacaaggtggtaaacatccccaacagtatgacaattttggatgagcttttgcccatctccattgagatggcgaagcgggactgcaggggcatatggaacttcaccaatcctggggttgtcagccacaacgagatcctggagatgtacaagaaatacctcaaccccgacttcaagtggaccaacttcactcttgaggaacaggccaaggttatagttgcaccaagaagtaacaacgaaatggatgcatcgaagttgaagtccgagttccccgagctactgtccatcaaggattctttggttaagtatgtttttgagccaaacaggaaggttcctgctaactgaagatttacgggcgcgggcgggagttatggaggttacgagcgcgggcgggagttatggaggttattgcacggatgcagttgtgaccatacttttttttgtagtttttggttatatctggtgttttgttaagatacatgtaggtgaactacataccgttcgatacttaacctatttatttatatattcatagcaattcgtgtgcacggcatgtgcatattattttttttgctttggtttgtgcggtggttcagaatgtatctcacctctacgttgtactctttgaactacttactctatctaaaaaagggcaattcttacatattaaaaaaaaaaaaaaaaaaaa

SEQ ID NO: 38145 - DNA, 526 bp, Oryza sativa
  Clone ID: PAT_MRT4530_4180C.1
caaattccaggccaccggacatctaaaagaaagaccggggggggggccaaaaacaacaaaacaaactttaacgggggggcccaaacaaaacccagaaggggcccttataacccacggcaacaggaagccccccggggaaaaaattccaacccactaggcccccaggggcacaaaaccaaccctggacaggtggaacttttaaacttttttcgggggcaagggggaaaaaaaaatttcggaaaatgggtccacggaaaccccttcccatcaaaaggaaaaagtcccttcaccccaaaaacccgggggggaaaacaaaattggccccttggaccgaccaaaacccccaaaaaaaggggatttcgggacaaaaaaccggaaaactttggaccccttaaaacatttaagggccggaaaaaaaccggccccgcctttgaatccaaggaaccccccaaaaaaatcccggcccccttggaggcccaaccggccccacataggcgacgggctgaaaagaaaaggtaaatttggg

SEQ ID NO: 38146 - DNA, 1863 bp, Oryza sativa
  Clone ID: PAT_MRT4530_41810C.1
atggcggcggcggcggaggaggaggagcccgagcaggtgcccatggtgttggtggcgccggggaagctggtgacccccgagcagtttcagcgagcccgagccctaccgcgccagctggcggcggtggcggcgtccccgcggcaaccgcgcccgctcgccatgcagcagcagcagcagcagatgtcgcagtcgatgatcttcgggcggccgtccgcgccggcgccgacgacgctgcaggggttcgggttcgggcgcggcgcaggccctggtgcggcggcggtggcggcgcgttcggccgagggggatggggatggcggcgccgcgtctcgccatgcagcagtcgacgacaacgacgatgatgcagcagcagaagggattcgggttcagcggcgctggaccagcggcggtggcgccttcgccgcgcgggatgacgatggctgtggggccgcgtctcgccgcgcagcagaagcagaggcagcctaccctcgcgccgccgccgccgccgcagcagaatcagggcttcagcggggccggggctggggcgatgggggtgccttcgccgcaggggatggcggtgggaacgcgtctcgccatgcagcagcagcagccgtccatgatccccgcgccgccgacgatgaccacgcagaagcagcaaggaatggtgttcggcggtggcgcagcgggagcgggcagcagcagccgtcgacgatcctcgcgccgccgccgccgacgccgacgcggcagaaacagcagggaatcgtgttcggcggtggcgcagcagcgggggtggcgcctcctccttcgctgcgggggatgccgatggcgtctgggccgcgtcccgctaggcagccgcagcgcaagcggaagcagcggaccctcgcgccgccgcagcagaagaatcagggcatcggcgtgtccgggggccgcggctggagctggagctgcgcccgtgtcttctccgccgagcgggatgttggcggcggtggagatggcgttgggggatatggcggaggacgctcggaaggcgtgcaacccggacatcacgacgccgttcgcctccgtcgaggacgccatcagcagttcttcttcgccgcggtgaacagcaccgagattgatcgctggttcctagttgcgatcgacttgcgtttgcaaggtttcgtccgtgttttaggggattcgggcttgctgcttccatacaacgtgtacgcggagtacgaggaggacgagatctacgtcgaggaccagccgccggcgaaggacaagtcgagcgtgcaggagtgggatgacgaccgcgaagccgaggtgatccgcatggcggaggagttcgagaagctggtgctgacctacaacgtcgccgtccggaagtccggcgccggcgccgcccgcggcgaggagcggctcatggtggagaacctcctgctcgccgacgagcagcgcaagtcggagcacgtcagcgccctcgtccggcagcagcagcagcagctggtggcgctgcagaagcagcagcagcagcaggaggaggcggcgctgcagcggcaacggatgcagcagcagcaagccctgcagcggcggcaactcttcctggagcagcagcagcagcaagcagcgctgcagcagcagctcatgctagagcagcagcagcagcaacagatgatggcagcgctgcaacagcagcagctggcgatcttgttccacgaccagccgcagcaaccggagccgctggggccggcgtactggctggcgcccgtgcatgccgtgccgccgccgccgcagcagcagcaacaaccggaggaggggcaggcgggtggcgcggccaccgagatggcgccgcagccgttgagggagcttcgtgattcgtgctag

SEQ ID NO: 38147 - DNA, 1804 bp, Oryza sativa
  unsure (1)..(1804): unsure at all n locations
  Clone ID: PAT_MRT4530_41811C.1
atggcaccggccgggctcctcagctcccacctccgtctccgcgcacgctccaatggcggccacggctgtgaccctgccgtcctcgccggcccccttccccgtcaccaccaccgcctcctcctcccgtaacgtccgcctcctcctccgctccccgcctcctcgccgagccctccgcgtcgccgcctccgccgcggccgacgcgccacccaagccggcgccgccgccgacctcgccttcgggcatcgtcctcgtcgaccccaccgaggcacagaaggtgcaccgcctcaaggctgtatacgaccagaaggtggtccccctcatcaccgaggagttcggctacaccaatgtccaccaggtgcccaaggttgagaagattgtagtgaattgcgggttgggggctgaagccggtaactccaaggggctcgaatccgccatgaaggacctcgccatgatcaccggccagtggcccgtcaagacgaaggccaagaagtccgtcgccagtttcaagatccgcgaggggaacaccattggtattgccgttacgctccgcggcagggtaatgttcaacttcctggataggctcatcaaccttgggcttcctaggaccatggacttccttggtgtcaaccccaacagctttgatggccatggcaacttcaccataggccttcgtgatcagggcgtgttcccggagatcccgtacgaggtcggtgggaagaagaatggaatggacgtctgcatcgtcaccaccgcgaagaccgacaacgaggctctcaggctgctcaccctccttggcatgccgttcgcggagcacatcaagtcctccgtggtgatccggaagaagaggttgaagcgccaccacttcatgagcaagggcaggggaagacggtgattgcaaaccgctgcctaggcacgttgagctttgcttctcactttgtcaattgtcattgtttttgcaaagtttcgtttagaagtttgatgattttgttatcttgtcacgtgctgtatttactgtcagaagacaaaatgaaaaggctttgctttggtcaggtcattcgcagatgagcactcataaatgaattgggtgtaaagagattatccggcagcattttcaaactgcttaactttactcactaaaccacatcatatatatctctttggtcccaagcatctcatagcccaggccattacccacaccatactatcatcctatatcagtatttcagtagctacacgttggcaattcaggcggaccgatgacgagctcttcttcagggaaggcgcatggcttgcccgccgccccgagctccgggcacggcaccggcgagacgtcggaggcgacacccttgacatcggtgcagttccattgcagcttcttggcgtccggcgcgagctgcgcggtgacgttggacatgcagatgccagtgtaggggtcgttgggaatcccctccatcctgccggccatggtgacgttctccgcgaacacgtcgctgtagttgatgccggtgacctccggcagagcgttggggtcggaggagttgtccgggtgctggccgtagttgccggtcatccagaacacccacttcatggtgtggaggctgaggccgcggacgaacacgtccttgacgtagccgccgcgccccacgccggacttgatcctgacggccgactcggtgtcgatggcgacgttgtccacggcgcgcacgtcgcggatgccgccggacatctcgctgccgagcgcgatcatggcgctcgtcggngagaagcaggtgagcctcctgatgaggatgtgctggctcggcat

SEQ ID NO: 38148 - DNA, 928 bp, Oryza sativa
  Clone ID: PAT_MRT4530_41812C.1
cctaggtggcggcggggatgaggaggaggagcccagggtcgccttcgaggtcgtggggaggaaccccgtggtcgtgcgctcggtgggcggcggcggcggcgggagcagggtgttccggtgcggcgaggccggggagctccgcgacggggacgggctcgcgctgtcgctgaggtcgccgtcgtcggtctgggcggtgcggaggacgaggagcaagggcggggatggggatggggatgtggaggcggaggtcctggaccccgtggcgaggcgggagaggcgcacgagggagcggaaggagagggagaggcgagccgcggaggaggccatggaggtcaccgccgacgaggaggcggcggcggaggcggaggcggaggcggaggcggcgtgcagtggggattccgatgccgaagcggaggatttgaatttcgatctatcaagcatcgacccggttcgagaattcgggttcttatcaatgggccacgaatttgacaactatcctaaaggaagaattcgtcccccaaaggattggaattggtttctggaggaagtaaggaagggctccgatgatgaagatgatgaggaaggcaaattaaagggtaaaggcgctaacaagaagaatgaggggcagcgtgaagacgaagattggataggtgagagtgaggacgataaagattcattatcaagaggttctagtgtgaagagatcaaagtatgttacaagatcaaaagaaccaaagaaacctcgcaaggaaaaaactgagactaaagataaaaataagaatagtggggatgaaaaagatgagggggacgaagatgatgaggaagatgaaacactcagtggttttatagttaacgaagaggatgagcctatggaagagctgagcgaggaagaggaggacgagttcgatgacgacgacgatgacgactga

SEQ ID NO: 38149 - DNA, 770 bp, Oryza sativa
  Clone ID: PAT_MRT4530_41813C.1
atgtaagtagcctctttcttctcttccttcgcattgatttgattgattctcctacactttgttagtttagtttttcggcaatactaaatgcaatgcaatgataattcaatgtagaaaccagcttgccactctgtaaaggataaggataggctcaccactctgcctaatgacgttcttctcaacattcttgagcggctggacacggctgatgacatcagagcttgcaccctttgcaaaaggatgactaagctccctgccgagctctcccgcattgttgttgatgccaattccttcacgcccaataagattgcacccgatcctttgacactgagtgatgtggttcagatgaatgaggctttagctggtgcaacagagaaattactcaacttcaggagtcaacagatcgcccttcgccaacttagcttgcgattctacttgagatactatgattgcctcaccatcggcaaagctgtgcaacacgccatgtccacctacaacctcgagactcttgagttcacaatcctaaccgagaagcaaggaggctgttgcgaagaaactcacatgctctgctttggcaagcagttcagaacttttctagctgcttttccagatgcgtttgctggcctcacacgcctgcagctacaacacttgcatttcgctgaacctgacatccccaacctgctcaccacatgtaaacagttgaagcatctgcgtttgttctcttgtctcaccaagatgacccgccgtgctgcggatagagcacccgcaac

SEQ ID NO: 38150 - DNA, 2794 bp, Oryza sativa
  Clone ID: PAT_MRT4530_41814C.1
atggggaggccgaagggcggcgccgcggcgtcctcctcctcgtcgaagaagcccaaggcgaagccgaagcagcgcggcggcgtcgacttcaagaagtacaagcacaaggtggggcggaagctgccgccgccgaagaatgccaccgacacggagatcaagtccagagcgatcgtgctgccggagcagagcatggcgtcggagagggctggcatggccgtgaacaagcgcgggctcacgctgcgggagctcttgcagcagacgggccactatactgctaatgtgcgccgagctgcgctgaatgggctaaaggatcttgttactatgcatccctcaaagcttaaactgcacgaggttgcaattgttggtgaggtgcaggaaagaatatgtgacactaacaaggtggttcttcaatactcatccagtatgctgcggtctttccacttcccatcgtagatagagttctattctattgtctgcatatgtgagacaattggtatctatttatggcaggacaatgcaatatcgacacgcagtacactgtttctgctgatggccaatattttgaacggaatgacccatctatccatggatatccagttaatgtctttcagatttttggagcttgttgttattaatttcccatcctcctttccaggatacgctgaacaggtcttcaacaactttcttgctgtactgagcaatgacaggattcatctccaggataagagtaaacttaacagtgtccttagtgggctcgggcagtgtctttctcaggttgcttatgcaacagaaaatggtgatgcatcaaatcgactggttcataatctttctggtagggaactttggaaatgtactcttgatgaagataactcaggaagtagagcatttgcgatgtccaatatattaatgaagcttcaaaacctcttccagattctcgttaattctgtagaggtctcagtttcagaactttttgcaaagtcaactattgatgctcagtcaagtgaagcattattatcagctcttcactgtctggatctaatatgtaacatatgtattcaagaggcaaaaacacttcgcaataaggataccatggaaaagcatttgagcccacttataactttcataccagatcttgtatccaatgccccagatgactcaaaaggatatttattagaggcatttacagatgcattctgggattgcaaggtggattgcaagctgattttcccatatttggatgcagtgggaaaaatgctgtttcctgaaaaaacaggaatattatttgtggaaaatgattcaggctctgaataccatggtgtgtgggtaaaagagctacctggaattctactacaatcaattgacaaagccccctcagtaacaaaggttgttttggagctacttctaagaattggacagtacttccccacaatggagtttggaaatctgcgttccttcattaagttatttggtgttaaatgtgatgtgctggaacccaccatattgtttagaattattgaggttctacagtcaacatacaaggctgggaatttacatataacagagcaactcagtttcttgtcattgctaatggcacgattcagagttcatcctgggtctttctctacccaggataattcccagaagggctcaaatatgaatacttttaaatcattgaaccgcctaattttaaattctctatctgaaatgggtgatggctccctggttcttgagttaatgtgggataatttatctaaagagattgcacagataccatctttacataacatgaatggattgtttagaattattgtcacacttgatgcaggaacttgtaagctcatgaacgaagatgctataaaaattatagctggctacttgattgatgctgctatggatttgtctaaaaccattgagcttggctttcaatctgataggacaagactatttcaatactttataaagccttgcataatcatattttgccagaacgagaaggttctttgctgcgcattggagatgcttaaatctttcgcaacaggagatgaccacgtgctttcatctgcatccaagttaaactacccaggagagctttcacatcgaatttgtgttgtcacaactatactcatattcttatgcaatgatggaaaactccataaaaacctttctttgggcaaatgtgttattaaaggtatcctgcaacatacaaggcatctcatggattctaatgttcttgatgtaacatatgaggacaagcagaagttaagatttgcatttgagcaactaaagacgaaagcattgcagttgaactgctgggacagaagtgagctggaagggttttcaagcaccacgtaaatagtaccaaatactaatggtactgccgtaatgtgaaaccttactctgcacgggatgaaaattttgacgaactgaaggtgaagatggagagtggacatggtgactggtgaggggcagaaggatatgtgccatccgacctgcgtcagactccagtatacacctctgctgttcagctgttaccaacactttacgaaggtggccggaaaatgcattgttcacatgttgggaacgaggtggtccactggtccatgtatcattgtggtacagcgcttggttttgatgcaacagaattgcagtttagactgctcaatagaccataggttatttcaccgaaaggtttacatttcaacctacatgtccatgtaagaatcccgatgtaaatgtagaaattttgttttggaagttcatttcgggcctctcatgtcattgtttccacttcccc

SEQ ID NO: 38151 - DNA, 555 bp, Oryza sativa
  Clone ID: PAT_MRT4530_41815C.1
atgaggtggatgaggaggcggcgcggcaaagttgtcgaggcgtccggggagaagcgggacggtggcggtgcgtcggtgatgacgtcctccatggggccggatgagaacccaccgccgccgccaagaacccgctgccggggacgcctccaccacaaagaacccgccgccaaaaacccgccggatctacgtccccacctcctcctcctcctcatcgccaccgccgcccgccggatctacgcccccatctcctcctcctcctcctcgctgccgccaagaactcgctgccgcctgccggatctactcccctacctcttcgtcctcctcgcgttcactatggaagaccgcgccgccgactgctgcttgggaggagaggagaaggaggcgcggctgccaccacatccgtctgcgtcgaccaccacatccgccgctacagccaccacatccgcctcggccgccgaagggaggggaaggaggtgcgggggagaagtggagcggcggcgcgggaggataagcgaagcggcgcgggatgagaggcaggcgacggcgatggagtag

SEQ ID NO: 38152 - DNA, 590 bp, Oryza sativa
  Clone ID: PAT_MRT4530_41816C.1
ttattttatgaatttagagcaagggaggggtacttcagggcgtgacaccgatggcagcggaggccggctcggcgcgagaggcgcgggcggcggagatggagaccggcttggcgcgtgaggcgcggccgatggagggaggccggattggcgcgagaggtgcatccggtggaggaagccggcttggcgcgagaggcgctgccggcggtggaggaggcgacctcggtacgagaaggagctgctggtggatgtggcgcggtcttcggcgctcgaaggctggccggcggggggcgccggtgcaggggtcccacatgttggcagaggttgaggggtggtgggagcatcaatgctgggcgatctcgtctgtgttcctttgttggtctagcggcggtcggtcacgcttagcggcgcctggtccggtgttagtcttctcccggtcttgtgtgttggcgctgtcggtgtgtgggtggtggtatatttttttcttttccctggttacgaccctccaggattgtaattttgtaatttttttctcctctatcaatagaacttcgcatcgtttcatgcgagtcgttaaaaaaagaaaaaaacaa

SEQ ID NO: 38153 - DNA, 512 bp, Oryza sativa
  unsure (1)..(512): unsure at all n locations
  Clone ID: PAT_MRT4530_41817C.1
tgcaaagggaagacttgatgtattgcgcctactgcctagttttcacttaggatgttactagtaagggttgtgatattttggcaatgaattgacttgtatcacaacacttgagtgcttgtaccttcataatgtgagtttgagcatgaggaaaggtagatgcatccaatcgtagcagtattttgttttctgcttcaaccgagttgctgcacatggtttctgccattatatggttccagactttttggggcttactaatgtaatactgctgtggaagtgtggagttgaggtcactgcagagaaattntagtctagtgtatatccactttagatatgaatttagtaattgagtattgacagattttatataaaagaaggaagtttgggcctaaataactactcccgccgttattaaatgtttgctgctgttgacttttgggcatgatgtttgaccggtcatcgtaaatgtgcaaaaatataacgcatggcttaagtacttttagtgataaaacaag

SEQ ID NO: 38154 - DNA, 313 bp, Oryza sativa
  Clone ID: PAT_MRT4530_41818C.1
caaataaaacggtcgattaaagttggacgcaaaaactcatagttgcgcttattttaggacggaggtagcaagagaagctctgcaaaatgccaaacccggctgttctgataggacgggcccacacgacccggaaaaccgagaccagccacaaaaacgggagatgccatccatccgtccttccggttcgatgcatcgggtcaccttcctccagcaacaagccaacaacgacaagtctcgacgagattcatgcacgatgaagtcacgcgtgcgatgagaaaaccgcacgcgtgtctgtagcatggcaaaaccaggg

SEQ ID NO: 38155 - DNA, 624 bp, Oryza sativa
  unsure (1)..(624): unsure at all n locations
  Clone ID: PAT_MRT4530_41819C.1
ggcacatctgtnatcttaacaaggnaagcaattactaaaaccagctaagttgnagggcttnntaatatctatcgnngctgcttcctaatagctatttgttctctggnagggaactaagtctgtctcagnngttgaactaatagnnttttcggctgctagcgtgnagctatctgctactaagctatgctattttggnatttaatgactgtggnaagaactctagnnaaatgttgcttttgagnngcttactnnntcatgctaannttggnatggnaatnntcgcaactagnnaattttngtnnctggttctgaggaagtattatnntgatnngatactagnaagnnactatttgtcannatattncaaaacttgnactaactcagncnngtaatgaaaacttatnntcagcttttcagctttactacttttgactattnnngcatcctntnncggcatttagctttgtcaacnaaccttncattagcnnntggggctttttttgcgnnaatgaacaatnccagnnagcannaattgtnaccagnncattgnnatgatgnnngtagctttcnnttttggcnnncatttgtnntggggnngcaccttnatttcgggctttgcttcat

SEQ ID NO: 38156 - DNA, 180 bp, Oryza sativa
  Clone ID: PAT_MRT4530_4181C.1
atggcggtggcggcttcgttgctgctcgaatacgtcagccgctcgctgcggtggccgattcctcgcgctctcaaggagctcctcttgtcgccccactgccttaaagagagcccacggtggctctacagctcaagacggtgttgggacgaaatcccaacagaatatggctttacagcttga

SEQ ID NO: 38157 - DNA, 331 bp, Oryza sativa
  Clone ID: PAT_MRT4530_41820C.1
acgaatgaattacaaactggtcccagattgatttaaggctaaaagagaagagtcgaagatgttcaaagaaatttcacaggtccctaacaagccttattataagggcaaagggaactgttttatttatcgaacaaacagatgtggggggggatgatacttttcagaaaaaaaaaactaatgggcggaaatctgaaaaacaattatgatgttgggaacactgaacttaggctcatggttcaggtagacacttttcacaatctttttttattgactgaaaaaggatagatcaaagggacctctcaccaaagcttgtgaactcaacccctaccaa

SEQ ID NO: 38158 - DNA, 239 bp, Oryza sativa
  unsure (1)..(239): unsure at all n locations
  Clone ID: PAT_MRT4530_41821C.1
gcagatcggtgtgtgtgtgggggagtgatgccgggggacgtggcgacctcgccggcgccggcgccngccgtcccgcgtcttcgcagcaganccaccacgccacctccgcccgcggcctgctctgccacgcccgccgccngcgccctccgctngtgtggttgcgngcgaccttcgtgtgcccgctcgatgtgatcaagacgaggtttcaggtgcacngctggcccangctcgcacccgca

SEQ ID NO: 38159 - DNA, 531 bp, Oryza sativa
  Clone ID: PAT_MRT4530_41822C.1
atgccggggctgacaggctgggggcctgccctgccaccgtggcccttggcaatggaggcggccggccgacggggtgcccatggggcgacggctaatgtcagtggcatcgaagcgaacaccgtgacccttggcgatggaggcggccggccgtcgggatgctcggctcgctctggcagccctcctccccaaaatcttggtgctccggtggcagggcaggggcctcggcccccggcctcgcggcggccggcctgcctccccaatcacggcgaggggcccccctacctcccgcctatctggtggcgacggcagggcaggcgccccggccccggcctcggcggttggcgtgctgcacttcccggcgccggcagccctactccaagcgggattgggacctccgcgggattggaactccgccagcagctctactccggtgcgggattgggacctccgcggtaccgggcgtgcgcgcaggattggggcgagccgcgagatttgggcgtcgggcggcagaggaaacagagatttgggtga

SEQ ID NO: 38160 - DNA, 386 bp, Oryza sativa
  unsure (1)..(386): unsure at all n locations
  Clone ID: PAT_MRT4530_41823C.1
aaacccactaatngagggaaatncgaaaagggtgccccaggcccacccccatccttgaatcctgaatgggtacttanccaggaaacaggctggccaactgtgntatggaccaccaccaggtaaagctctggaatgcccatggttggnaaatncaccaactgtcatgtaaagnaactactttgccccttgctgcttctggttcccagcttgggtcaagtgagctcagtgtttttgctcagcacaagctgataggctatacgcatggccacatggtcattagcagttgcattatgctgcaggaatttaaccgtttcctgcgaaaatattgtgaaattcctgcgttcaaaacagagcctttatttccagtgccaaatgtggttcttata

SEQ ID NO: 38161 - DNA, 485 bp, Oryza sativa
  unsure (1)..(485): unsure at all n locations
  Clone ID: PAT_MRT4530_41824C.1
tcaagngnggacacagcctgctccggctggacnacnccgcggcgcggctggcgcgggangggaagtacctgnaacggaagaacangtacctggccgccattgcggcgatcaaggacgccctcggtggccacctctactgcnacgacaagtnnagacnacgacgatcgaatgagtactccgttaataaccggccactggtgaggactcccatggccatangtttctttggttttgtttggcttctctgcttcacaattcagagttcanaattctaatgttaatatttttgttagttcctccaaggggggcccggtncccaattccccctatantgagttcctattncaattcactggcccgtcgtnttacaacntccttnactgggaaaacctggcgttncccaacttaaatcnccttggcancacatccccctttccccnacttggcgttattnccnaaaaaggcccgcnccgatcgnccntccc

SEQ ID NO: 38162 - DNA, 261 bp, Oryza sativa
  Clone ID: PAT_MRT4530_41825C.1
atggtggcggcgcgccgacggtctgatgggttccacacagacctccatctccatgtcacagactctgtggcttatccctgcctgcacggtcaccgccaggcctccacctccgacccatatcagctgtcacctggatccaccctcgaccacgttgctcccaccagcagcacaacaccaccacccactagagaaaagattttcctggacgccgagcgcttttgttttctggcgggccataactggaaccgcatggaaaaataa

SEQ ID NO: 38163 - DNA, 224 bp, Oryza sativa
  Clone ID: PAT_MRT4530_41826C.1
atctaatcggctccattagttttatcttatcgttcaataatagggtatgtcctcctaatccatccagctaggatggtcttatccactccatccgatgctctgctctgtattatccattccatccggcacctgcttttccgatccttgattattgttcctccgtataaaatccactaaatgagtatatctgaacctttattattatctcccaaaaaaaaaaaaaa

SEQ ID NO: 38164 - DNA, 1063 bp, Oryza sativa
  Clone ID: PAT_MRT4530_41827C.1
tttttgtttttttatttttttttttttttttttttttaggtggatagcccccgtcatatcacattttatttcaaccaagcaggatacacattgtttctttattcccaacgtaactaaaccaattttaatgaaaataaaagaaagaaagaaatgtcccttatcccttttacatcctgcattatactgttaactgtatgaatctatctccttctatatacagctcgaaggactgattttcagtcccagtagctactaaccagttgctaactcctctagtgaagaacgcctaatgcccagttagagactattacagaggtattccaagaaacaacaacaaagaaaaaaaaagtgagcttgggcgtacttcatggcaaaatggttaaaagcatgtatcatttgatttgctttccgcgcatatagcttgatattagtgcagctgtgcaggacttggaggcgccaacttgtgaaaaaaaaatgtattgccagctgccaagtgcatttggattggcatggagagtcgaagatctccttcctattctgaaccaaaatagctgtcttgtaccgatagccggtcgaaggcatcaaaatttgcctttagaccaacaaactggcttccaagctgtgcacacgctgcatcaggccatctacatccttccctggtgcggaaagggcagagtgactcacagatatggttgcttggtgtttctgaaaccaagctgtcctcaatcgcggtgatggatatagagaagtcggaacttttttcgtgctgggactcaaaatctgtgtctcttcgaaatgaatatgtcagcccctcagttttctccacctggctttcattcgtgccgaaattaaccgtacagcccaacgatcgcactgcctttctgatggcaacgctctccctttgagcacgttgagccatggccaaggctgaactacttgcacgcttctccctctgtaattctaatctgcatagattccatcttcgttttaatatcttttacaccttgattcagctgtgtcctttgcccctcgtgccgaatcctgcagcccggggatccactag

SEQ ID NO: 38165 - DNA, 132 bp, Oryza sativa
  Clone ID: PAT_MRT4530_41828C.1
atggcgacaaacctctacttcgacaagtgcttcacctgtgataggttgcgatgccaccgcccgttagaggtgtccaaccttcacccattagagatgagtttggtcatcactgaccagcgccctacccgttag

SEQ ID NO: 38166 - DNA, 1773 bp, Oryza sativa
  Clone ID: PAT_MRT4530_41829C.1
atgcgcaagatccaaggccgcaacaagaagcagctgtcgaagcacttcgcgaagctgttcaagaacaagcacccccggctgaacagcgccaagatgtgcagcacagagcgaaggggcccgcgatacttgaaccagcagatctctttcgaggcagaagatgccaaaggagtattgttcccgcatcaagaccccttggtgatctcggccgaggtagctggcttcgaagtccggcgaatcctaatcgatggaggaagtttggccgatgtcatttttgccgaagcatatgccaagatggggttgccaaccctagccctcacccaagcaccggtctcgcttcgtagttttggcggagaagcagttcaagtcctaggccaagtacaattggtggtagccttcggcacaggtgaaaacaggcgcgaagagcaaatactgttcgatgttgtcgacatcccatacaactataatgccatcgtcagccgtgcgaccatgaacaagttcgaagccatctcccaccacaactatctcaagctcaagatgcttggtcctgcaggagtgatcgtggtcaagggtcttcaaccttcggctacatcaatgggcgatttggccgcaatcaatagagcagtgcacaatgttgaggccgaactgcatgaccatgtgaagcacatgccgaagcccgcccctcacagcaaggtgatcaaggtgcaggtcgacgatgccgatcccacaagatttgtatcgctggggggcgacatgggcgaaagggaagttgaaaacatcctgaaggtgctcaagaaaaacattgacatcttcgcctggggccctgacgaggtgggagcgaaagacgaagtgcaaaagctgctcaaggctggggtgatccaggagatcgaccacccagagtggttggcgaattcggtgctggtgcggaagtcgaacggcaaatggcgcatgtgtgttgatttcacaaacctcaacaaggcgtgcccgaaagacgacttccccatgccgcggatcgaccagctcgtggattcgacagctggctgcaaactcatgagctttttggatgcatactccggctaccaccagatccacatgaatccggccgacatccccaagacagccttcatcacgccattcggcacattttcccaccttaggatgcctttcggcctaaggaacgccggagcaacctttgctaggctgatgtataaggtcctttacaagcagctggggcgaaatgtggaggcttatgtcaatgatatcgtcataaaaagctgcaaagctttcgaccatgcgtccgacttacaggagaccttcgacaacttacgcgctgcggacgctaagaaatcgccgcccaaggtcagcgccacctcagctgccgagccgaaccgcctgcgccggccaatcggcagacagaaccggcgccgtgttcttctccacgccgccatcatcgaagaaatgtgtgaggggctaaacctggaaatcaggttcgcttcggtcgcgcacccacagtcgaatggggcagccgaacgtgcaaatggcaagatcctagaggcgctaaagaaaaggctcgaggaggcggtgaaggacgaagatgggcgcaaggtgtcactcgaactcctggaaggggtaagagtcgaggcactagaacacatgcgcaagtacgctacaagcacctcggcaacttacaacaagaaagttcggccgatggaactattgcctggccatctcgtcctaaggaagaaggcgaacccagtggcggtcagaaagctctaa

SEQ ID NO: 38167 - DNA, 512 bp, Oryza sativa
  Clone ID: PAT_MRT4530_4182C.1
gcacgagggatcaatatgcacgccgtggtggctgctgacgccagcggcacggttgagcagtgccgctgcagtaaggatcatgatgcattttggtgctgtgttgaagaagacctacatctgccgtgactgcaggaaacacatgcttcaagttcttaatcatggtccagcctacatcagcaaagagttgtggctagagaaacttacagctttgctaaatgtattcatctattaagctcaaatcgatttcaggggacgtgttacagctcctgctttatttttggttcaattaggaatgaaaatgtattactgatgcaggttgtgccacaagagttttaattgactcacatgtatagtggggataactattggttcaaatgtagacacatgtatcacattgctcctcaaggagattttttttttaactagagaagcaaagcttcccccattttcattaagagaaatgagcattacatcaaagttcatcatgggatttcaaccttaaacccagttct

SEQ ID NO: 38168 - DNA, 226 bp, Oryza sativa
  Clone ID: PAT_MRT4530_41830C.1
ggacaacaaacatgacacaatttaattgaacggaagaaacaataatggacgttgtttgcaaagctgaaaactggccaaatgcaagagcgaaatgaagctcatacaagtgggaggaaacaaaatatctggagcagataccaattgcctactactgcctacaaagatgattgggacttatgtacaagcaagaaaatttgagcgcattcttcccagaatatcagaggat

SEQ ID NO: 38169 - DNA, 326 bp, Oryza sativa
  Clone ID: PAT_MRT4530_41831C.1
gcgtcctccaagccccagcacctacgcgtcgtcgcgccatggccggcttcggcttggaccagcacctcgacctcatccgcgcccacctcctcgaagacgcccaccaccacgtcctcgcgccatcgccgtcgccctcgccaccgggtactgggcgtgtcaggccggcgcccgtgtcgctgcccccgaggccgccgctcctgtgggcggcggcgtcggcggcgccgcggcagcaggaggagtgcttcgagctcggcggcggctacgcgggggagggggagggggaggaggaggccgacttccgggggtgccgcggggggcggcagcgg

SEQ ID NO: 38170 - DNA, 1605 bp, Oryza sativa
  Clone ID: PAT_MRT4530_41832C.1
atggcgtggtgcttggtgttcatggtgttcttgatctactgcctcatctcgactgtcgggctgccggtggcgccggccgacgaggcggcgatgcagctgggcggcgtcggcggtgggcggctcagcgtggagccgtctgatgtgatggaggcgtcccttgactttgggcggctcaccagcgccgagccgctggccgtgttccacccgcgcggggccggcgacgtcgccgcgctggtgaaggcggcgtacgggtcggccagcggcatccgcgtctcggcgcgggggcacggccattccatcagcgggcaggcccaggcggccggcggggtggtcgtggacatgagtcacgggtggcgcgcggaggcggcggagaggacgttgccggtgtactcgccggcgctcggcgggcactacatcgacgtgtggggcggcgagctgtggatcgacgtgctcaactggacgctggcgcacggcgggctcgcgccgcgctcgtggacggactacctctacctttccgtgggcggcaccctctccaacgccggtataagtgggcaagctttccaccacgggccccagatcagcaacgtctacgagctcgacgtcgttaccgggaaaggagaggtggtgacctgctcggagtccaacaacccggacctcttcttcggcgcgctcggcgggctcggccagctcgggatcatcacgcgcgcgcgcatcgccctcgagcctgctcctcacagggttcgctggatccgggcgctctactccaacttcaccgagttcaccgcggaccaggagcggctcatctccctgcagcacggcggccggcggttcgactacgtggagggcttcgtcgtcgccgccgagggcctaatcaacaactggaggtcgtccttcttctcgccgcagaacccggtcaagctcagctcgctcaagcaccactccggggttctctactgcctggaggtcaccaagaattacgacgactccaccgccgtaaccgtcgaccaggacgtggaggcgctgctgggcgagctgaatttcatcccgggcacggtgttcacgacggacctgccgtacgtggacttcctagaccgcgtgcacaaggcggagctgaagctccgcggcaagggcatgtgggaggtcccgcacccgtggctcaacctcttcgtgccggcgtcccgcatcgccgacttcgaccgcggcgtcttccgcggcgtcctcggcagccgcaccgccggtggccccatcctcatctaccccatgaacaggcacaagtgggacccgaggagctcggtggtgacgccggaggaggacgtgttctacctggtggcgttcctgcggtcggcggtgccgggctcgaccgacccggcgcagagcctggaggcgctggagcggcagaaccgggagatcctcgagttctgcgacgaggccggcatcggggccaagcagtacctgcccaaccacaaggcgcagcgcgagtgggaggcccatttcggagcgaggtgggctcggttcgcgcggctcaaggccgagttcgacccgcgggccatgctcgccaccggccagggaatcttcgactcgccgccgctcttggcggagtcctga

SEQ ID NO: 38171 - DNA, 339 bp, Oryza sativa
  Clone ID: PAT_MRT4530_41833C.1
taaatatcctactgggtatcttcctggtcggatggcacctcttaagaactttttttggaattatgtcattcgcttttgttgtacttgggatttattggttctatcagtacatgaagttttggcgtgaagttctgccactgcaaaactgtattactcttgtcattacattgggcatgcttgagatgtcattgtggtattttgagtatgctgagttcaacgagactggtgttcgaccaaagggcatcacattttgggctgtaacatttgggactgttaaaagaacagtagcccgggttattattcttattgtctcaatgggatatggagttgtcaggccta

SEQ ID NO: 38172 - DNA, 909 bp, Oryza sativa
  Clone ID: PAT_MRT4530_41834C.1
atgtcgaagctccaactccggccgcctctgttggctactctgcattgcagcttgctcgtgctcctcatcatcaatggcgccgccgctgccggcaagaccggcgagctcaccgtcatctggggccggaacaaggacgagggctcattgcgttcgacctgcgacaccggcctctacaccaccgtcgtcatctccttcctcaccgtcttcggccacggccgctaccggaccgacctcgccggccacccgctcgccggcgtcggcgccgacgtcaagcactgccaaaaggccaagaacgtcaccgtcctcctctccatcggcggcgccggcgaccagtactcgctgcccaccgccaagtcggcgcaggacgtggccgaacacctgtggcacgcctacctcggcggcggccgcaggggcgtgtcccgcccgttcggcgacgccgtgctcgacggcgtcgacgtctacgtcgaccgcggccggtggggccactacgacgagctcgccaggcgcctgaggagcttcggtcgcgagaagccggcagtgcgcctgacggcgtcgccggcgtgctcgctggcgctgttcgacgacgaggtggagacgatgaagacgctgtcgctgttcgagcggctgcacgtgcggttctacaacgagagctcgtgcgactacaactacttcgagacgcggccgttctggggcgcgtggaggacgtggacgtcgaggttcccggcggcgcgggtgcaggtggggtggccggcgatggaggagatgagcgggttcgtggacccgcagacgctgcgggagagcgtgctatcgtcggtgcaggacgatgccaactacggcggcgtcatgctctgggatcgctactacgacaagatcaccggattcggccgtgccatcaaagacattgtctaa

SEQ ID NO: 38173 - DNA, 2668 bp, Oryza sativa
  Clone ID: PAT_MRT4530_41835C.1
atggactcccgctccatcaacctccggggtttcgccgggaacgccggcaaaaacatcatgcaggggattgggggatttgttttcggaaatgagaggtccgagtccaaggaagacagctatgttgagagattccttgatcgcataagcaatggcaccatatctgacgataggaggtctgccatgaccgagctgcagtcgcttgtggcagagtctcgttctgctcagatgtcatttggagccatgggatttcctgttctcctcaacgttttaaaagaagaccgtgaagatgttgagcttgtgagaggtgctctagaaacctttgtgagtgcactgactcctattgaaacctcgcaaggaccaaaaactgaggttcagcctgcatcagtgaactctgatttgctttctcgagaaactgagaatatctctcttcttttgagcttattgtcagaggaggatttctatgtgcggtactatacgatccagcttttgacagcgctacttacgaactcgctgaaaaggtgccccgtcataaggaatgaagcactgttacttcttacttatctgaccagggatgctgaggaaattcaaaaaattgtggtatttgagggtgtatttgagaaaatatttagcattatcagagaggaaggatactctgatggtggtgttgttgttcagatgcttctgaaagagacaatcggctttgatccattgatagcaatactaaagataaggagaggcagtgcattcaatttcactcaacaaaagacagtaaatcttctcggtgctttagatactgttgagttgcttttgatgggaggaggctcatctggtgagccaggtaaagatgctaacaagaccaccaaccaaactgctttagctcagaaaaatattctggatcaccttctactgttaggcgtggagagtcagtgggcccctgtagctctccgctgtatgaaaaatcctggtggccaggctttactagcatcaacgattgctccacatccaaatcaagcacatgctacatttggggccactactgacatgccttttggaagtatacttctgcaagctctggtgtcaagtgatgataatggagatatggaggcatgttgcagagcatctagtgttctttctcacataatcaaggacaacttgcaatgcaaagatcgtgtactgcaaattcagcttgaaacacctgcaccttccttgggacgcactgagccactactgcaccgcattgttacatgtttgtctattgcagcttcagcagaaggagaaaatggccaaagcggtcaaccagaagaatcatatattcagccagtcattctccggttactcattgtatggcttgtggattgtgctaatgccgtagattgccttttggaatcagcagtacatctgaactacattatcgagcttgcttcaagtaaacgctacagtgcttgtgttcgtggattggctgccgttgttttaggtgcttgtgtcctgtataatgcaagccgggagaagggccgagatgcctttgctgttgctgatgctataagtcagaagattggcctatccacatacttcttgaggttcgatgagttgcggaaaaggtttgcacattcatcatcagggcagcagaaccgcaagcagctttcacggtcaagtgcaaatagtatgtcagatttccaagagattgaagaggaagaaataaataaaggcgatcagcatccagtcctgtcagaaatctttgattcacattttgttagtttcctcagtaagcttgagactgatattagggacaatataatggatatatttagtcgaacaaagaccgcaactgcaattatacctgctgagttggagcagaagaatggggaagttgatggagaatacatcaagcggctaaagtcatttgtagagaaacaatgcaatgaaatgcaggacttgctaggtcggaatgcaatgctggcagaagagttagtgagaactggtggtggcaactccgctgattccttacagaaaccaagcagtggccgagaaagggtccaaatcgaatccctcagacaagaactcgaaggagcaacccgacgcatagaggcactcagagctgaacatacccagatcgaagccgaagctagcaaccaacgaaacctcgcagcgaaactggaatctgatctcaagagcctgtcagatgcttacaacagccttgaacaggccaacttccgtcttgactctgaagtgaaggccttgcggcagggaggcagtgcaccctaccccgatgtggaagcaatcaaagcggaagcgaaggaggaggcagagaaggagagcgaggcggagctaaacgatctcctcgtctgcctgggccaggagcagagcaaggtggagaagctgagcacgagactggcagagcttggtgaagatgtggacaccttgctgcaaggcattggcgatgacactgctttgccagatgatgacgacgatgaagatgaagatgatgagtaatataatgtgtgtaattctgtcatctcatggtgtaaccagttggggatcatgctgttgtagcaacaactgtacagtggatgatgatatttagacaaaggtttcaagttatttatgttggatgattgaattgctgaatttagttctcagaattaagtgaagtccttaggacccatcagct

SEQ ID NO: 38174 - DNA, 537 bp, Oryza sativa
  Clone ID: PAT_MRT4530_41836C.1
tataaatagccggagaagaagagccagaattcgaatattgagaacccggggacccagtgaagatggaaaaaagcgttgctaatgtgtcgagtgagcataaaaaaggccagaaaagcatagaaaaaagagatatgagtaataaaggacaaaggaacccaaattctccaagcaggatagtaaatactggtataagaactaataatgaggctcgattgggggctcctcttggaaaaggtcagtattcgctgttcaaggaggaaaatagtgggaatgatgtgaagtatgggattagttcggcgatttcgaagagcacaatattcaggaacctcttcttaaaccacgggtgaggaaatagacggctggctgggtagagatatagcttaaactgtttcgttttatacacttggtccatgtgaaatgaccggggatcagtagtattcaagtatcttttatatttttttcaaagactttttatgtgtttatatgcgcttataacactagttttttcaaaatccactacttaaaaaaaaaaaaaaa

SEQ ID NO: 38175 - DNA, 333 bp, Oryza sativa
  Clone ID: PAT_MRT4530_41837C.1
caagatatgtccatctcggacacgactcttatctctaacaaactctaagataccataagtctttgcggcagacttttgcccaaatatatctccagtctgacttgaactcaaccaaccctggtcatagccgatttggactccagccgattcttactctgtttccgaaacgatcttcatcttcgattccgcttcgatctaatctttatccccgatactcatattaccaaatttggtcgttaacactacctcctttatctccttgaacaaaatacctcccgtcgcttgatcgtgagagttcgactggacagcactcaccagaatttttgaatcagt

SEQ ID NO: 38176 - DNA, 450 bp, Oryza sativa
  Clone ID: PAT_MRT4530_41838C.1
ggtaacggggccaccgtacgcggggggggcgccgggccgccggtttttggccgttggtccgttgggccggggggccgggctgggcctggggccggccgaaggaacgtggtcgtcctttgggaccctcccgtccagggacctcgccggggaagctggaaggacgtccccaggccccgaaccggccgaaccaagggggcaagcgtcaacaacaacaaggcttccaacctggtaagcggcccgaacctcttcatcgggggcaacttcaacaagggcaacggggtccggccttacttcttaaaggccggaaaaaacaacaacggaaccggggggctcttcctttccaacgttttgggtttcaaggactccgccacccggaatttggcttaccgggtggggtgccacggttacaagtaaataacgccgggccgcctttttttttttttggttttt

SEQ ID NO: 38177 - DNA, 168 bp, Oryza sativa
  Clone ID: PAT_MRT4530_41839C.1
atggcgaccagagatgagggtatcagcggctgccgtgctcctgtgcatgctggaatgctgggtgctgccgcaaacttaattcgtgttatgggagactcggtcggcccacgacgccgcaacgcgacgaaccaagcgcaggcagagtggaatcgcttctccgagccctag

SEQ ID NO: 38178 - DNA, 166 bp, Oryza sativa
  Clone ID: PAT_MRT4530_4183C.1
atgccaccgcagcggaaattaggtggcgccgatgcagagcgcagcgccaacaatgatgacgatgttgaggtagctttcccttgtgggcagcgggccaagccacacagccttgtcggtggcactcacgtgcagtgcccagcgatcaacaacacagtggactgccacg

SEQ ID NO: 38179 - DNA, 187 bp, Oryza sativa
  unsure (1)..(187): unsure at all n locations
  Clone ID: PAT_MRT4530_41840C.1
acaacmamacgccaggcvmtgtacaagaaagkgdcccacmwggcccgtaamccaaaaaaagactccgacaaccgtgactgttcaggctgtgacytkkacaccaaywtakacaatkaatacaacycctccakakawcaackcggagcacmccbccgcccaccwtccaaccncsravaaccatatttta

SEQ ID NO: 38180 - DNA, 409 bp, Oryza sativa
  Clone ID: PAT_MRT4530_41841C.1
gcgcgcttactaccttctctgttgtcggctccctcgacagagggagtggaggaggggggggccgtgtggggcatgaaagggctaggacggtgttgacatgagccctaatgagtcttaagggctactacgccgacgtaaacactccgacagacggagctccctgactgggttgacattgtgaagacagctaggatagaggagctacctgcttatgatggggactggggctacgcgacggctggctcatttgcgggggacatctaccttagggaggatgttgatgccagagtctggcacaaaatctatggtgcccaggctaagaatgggtcacgtgccactctctcactgtaggaccggaggagctatcataagctatgttcttcatcacctgcttaatatgagcatcatc

SEQ ID NO: 38181 - DNA, 426 bp, Oryza sativa
  Clone ID: PAT_MRT4530_41842C.1
tcgagtcgtccccgacctaggatttcgccgccattctcctccaaggagatgccgcgctatgatgatcgttatggaagcacgcgcttgtatgttggtagactgtcttcccgcactcgttctcgtgacctagaataccatttcagcagatatggaaggtacggacagaaccatggtccttaagattttatttctctgaagcgcagattttttgcagaagtttatggattttttttctgttaaatttgtaataagctgcattttctgtgtataaatgtaaaacactattactatgataacacttgctaaacagttgatattacaacaacttggtacgttcaaatttcactgtagaaatttaattatttcccattaaaattgtaacctttcaaattgtgtgcgagtcttctgtgctgagcatagactagt

SEQ ID NO: 38182 - DNA, 171 bp, Oryza sativa
  Clone ID: PAT_MRT4530_41843C.1
tcagagcaagaggaggccaaggttcttctgggtatctgcagctgcgccattggcgtctgtcatcatcgggagcctcctggtgtacctcacacatgcgtctgccacaagcctgaacttctcgtcgccgtacatgatgctggccctgaagaccgggatcatcactggcgtcat

SEQ ID NO: 38183 - DNA, 250 bp, Oryza sativa
  Clone ID: PAT_MRT4530_41844C.1
ccagtaaataatgttggaacccttccttaattcccaaggtttccttggccttccttggttgaattccccaaaaaccccccataaccttccccccttgccataaaccttccccgaaaaccaacccagaaccttgggtttccaggccggagaaccaaagccgccggaggtaaccaacccgccaaaagttcccagccggagatttttgggaccaaggaacctgggccggcccggaccttaacccaaggaacat

SEQ ID NO: 38184 - DNA, 2372 bp, Oryza sativa
  Clone ID: PAT_MRT4530_41845C.1
cccacgcgtccgcgcagttaagattagttaatccaagctctagctcgatcgcgcggtcgccggagctgaggtagacgaaggagtgcgacgagctaagatgggtagtggaagcgcggcgaacggcggcggaggaggggcgggggcggcgagggtgccgatgccggcggcgaagccgttcctggagacgctgggggggaacatgaaggagacattcctgccggacgacccgttcagggtggtgcggcgggagcgcgggtgcgggcggcgcgcggcggcggcgctccggtacgtgttcccgttcatggagtgggcgccgtcgtacaccctcggcaccctcaagtccgacctcatcgccggcatcaccattgccagcctcgccatcccccagggcatcagctacgccaagctcgccaacctccctcccgtcctcggcctctattcgagcttcgtgccgccgctggtgtacgcgatgatggggagctcgagggacctggcggtggggacggtggcggtggcgtcgctgctgatcgggtcgatgctgagcgaggaggtgtcggcggcggaggacccggcgctgtacctgcacgtcgcgctcaccgccaccttcttcgccggcgtgttccaggcgctgctgggggtcttgaggctggggttcatcgtggacttcctgtcgcacgccaccatcgtcgggttcatgggcggcgccgccaccgtggtgtgcctgcagcagctcaagggcatgttcggcctcgaccacttcaccaccgccaccgacctcgtctccgtcatgagctccgtcttctcccaaacccacctctggcgatgggagagcgtcgtcatgggctgcggcttcctcttcttcctcctcatcacccgcttcttcagcaagaggaggccaaggttcttctgggtatctgcagctgcgccattggcgtctgtcatcatcgggagcctcctggtgtacctcacacatgctgaaaaccatggcattcaagtgattggttacctgaagaagggcctgaacccaccgtctgccacaagcctgaacttctcgtcgccgtacatgatgctggccctgaagaccgggatcatcactggcgtcattgccctcgctgaggggattgccgtaggaaggagctttgcaatgttcaagaattaccacatcgacggaaacaaggagatgatcgcgtttggaacgatgaacattgtgggatcactcacctcttgctacctcaccaccggtccgttctcgaggtcggccgtcaactacaacgccggctgcaagacggcgatgtcgaacgtgatcatgtcggtggcggtgatgatcacgctgctgttcttgacgccgctgttccactacacgccgctggtggtgctgtcggcgatcatcatgtcggcgatgctggggctgatcgactacccggccgccgtccacctgtggcaggtggacaaggtggacttctgcgtctgcctcggcgcctacctcggcgtcgtcttcggcagcgtcgagatcggcctcgtcgtcgccgtcgggatctccatcctccgcgtgctgctgttcgtggcgcggccgaggacgacggtgctcgggaacatccccaacacgatgatctaccggcggatggaccagtacaccgccgcgcagagggtccccggcgtgctcgtgctccgcgtcgactcgcccatctacttcaccaacgccagctacctgcgtgagaggatcgcgcggtggatcgacgacgaggaggaccagtgcaaggagaagggcgagatgggcattcagtacgtcgtcctcgacatgggtgcggtcggaagcatcgacaccagcgggacgagcatgctggatgaactcaggaagaccctggacaggaggggccttcagattgtgttggcgaacccggggagcgagatcatgaagaagttggacagctccaaggtgcttgaggcgatcggccatgagtggatcttccccacggtgggcgaggcggtggcggagtgcgacttcgtgatgcactcgcagaagccgggaatggtcatgggcagtggagcaccccatgagaacctggtctgattggagaagaacttactgtagtatggttgagtttgatcaacctgaggttgtcaacaagcaaagccgagataaatataagcatctcgagtattgtagtactaagttgtcaaggaagttcaaaggaaaaaaaatcacctttttttttgcaaggcgaaaataatgagcctcagagcctgtacagatgcattggagctacttctttgaagtattgactcaagatcataccttttttccaaaaaaaaaaaaaaaaaaaatgattcttgcatgatgattgtctaaagagaatgagcgcctacatggc

SEQ ID NO: 38185 - DNA, 465 bp, Oryza sativa
  Clone ID: PAT_MRT4530_41846C.1
aaagcataacaaacgttgtttgccaatatatatatatatataatataattatatatccattcactagcaaagcaggagcaacgccatcagtcccagacagcccaggctcagagtaaaaaaaaaatcagaagatcacgatactggcgtatcagctactactatctgctatggtagccagccgtcatgtgacaccaccactgcccaagacattttctggggcctatcacctgtacaactaatctgcgcgttacttatgcgtgcagattaccagcaaaaacaaaacccgtaattagtagtattggatgctcccgctcagtaataaaaggttccttccttccttccgtatggctacctatgatcctttctcctttgtcgcactagtatgctacgagctactactaactaacactgatgacagtacttggcaacaaggagttgctgaagattagtggaatctaatgcgct

SEQ ID NO: 38186 - DNA, 900 bp, Oryza sativa
  Clone ID: PAT_MRT4530_41847C.1
agtgataaaataattgcaaacaaggggttcacattattacttcaaggctgagcatcagttttaaaaagctcgatttttagacatcaaataaatcagtacaaacataatatatcatcatctgctcaacatgtccagaaatatacaatcattaaaacattcaggtgcaggtttgccatgcaatgtggaaaaaaatagtagtgcatggtacaaagaagtactaagaagcaactaagtcattaacccaaaaaggtcagtatttggacaaataattaccaagcattggataggccaaccatcagttttaaaaagctcgattttgttagtcttcaaagaaagactcagcaaaaacatattttagcatcatttggccagcccatcatagaacaataaccacattaaaaacaatattaattcagacagaacaagcataaggtcctaaaagaagatttcatatcagcaattccataccaagtacaaaatcgtagcaatatactcaaacttatcagcatcgccagtaagtttagcagaaaccatgcaataaccataaaaccatccacactacacttgctattacaaggccaagcatcagttttaaaaagctcggttttagagacttcaacgatataacatctcagtagcatctccttgtaacatcacatgctcggcctacaactaacaactcagctctcatctaaaatgctttaatcaaggcaatgctaactcctaacaaacaacacaattgaagatgatgatgatatgctaagcatcagttttaaaaagctcgatttttttagacatcaaagatcaagatctcagtgatcaactagtatttaacatcatctgctcagcagatcatcatcaacatgacaaatcatagacaactgttctacacaacctaac

SEQ ID NO: 38187 - DNA, 375 bp, Oryza sativa
  Clone ID: PAT_MRT4530_41848C.1
atgcgcgggacggagtggggagagcattacggggcgcgaggagctcgggaaaattggggagatggaagagaggaagccggaaggtcgattttatgggttcggggaggagggatcgtgctcgagaaaggcggcaagcaccggcgacgtggggcggcatcgaggggcggagtggtggtggctcagtgccatttttctcggggagagtggggaaataaggggaggatgagggctgcgaccgcgcccatgcacacgcgagagagggggtcacgcgggaggggcggcgacgtgggcggctcgggctggaggttgaaggagagcccgacaggtggggccgacctggcacaaagaatattacaaaatatcctcggccaatga

SEQ ID NO: 38188 - DNA, 705 bp, Oryza sativa
  Clone ID: PAT_MRT4530_41849C.1
atgacgccgtcgccgctaccgccgctgctgccggagccggaagcgatacagcctccgccgggagcaaagccactatactgccattctcgtgcgcagcactatcgccgccgtcgggcccagcaacagccgtccgcttccaggaacttgcttcctgctgcttcggccacctgccggctgtcgctgcccggctgcccttgccgctgcgagctgccgcagttgcgcgccggcagcggcagctttgactgggcgcctatcgactggatcgttgaggacgacgacccgaccaagaatcagcgagacgcgagtggaggcttccctaccgtaggctggttcggctccaacgggatggacgccgttacaaacagcgtcctgatctggacgttctcgggaacaaccgtcagtgccaaggccgaggagcagcacaacgcggcggccatcctcttctacctctcgtcgaataactcggacgcatcccggaggcgatcccgatgctgcctctacgggctgctccagagcacggccatcgccgcgggcgccgtgttagccctcacgaccttgctctccaacgaccgcgacgacctcgcccaggacagcatcgtgttgctggcgaggaaagccgagcaaacatcaggcgccatggccgtcctctcgcagccgggcctcaccgcccacctcgccgaggccctcgccgcgtcgtcatcatag

SEQ ID NO: 38189 - DNA, 737 bp, Oryza sativa
  Clone ID: PAT_MRT4530_4184C.1
aatacaaagcgcaaaacacattttatatgtgacaatgacatgagcaaaatatagactagtgtgcaacattgcacatatatctataactaatataaagaatcgtatttttccgttcgtcaccccccaaatcccagtcggtactgggtgacgcccactcaaaaaaaattcccaatcgaaattcaatcacacaaataaaattagaggaagcattatacacacaaatatatcaaaaaaaaaaggatcgaaggggaggtcgtcgtcgaaccgccgccgctgccgccgccagcgcagggacgccaggccgccgcagcacccctcccgctggatccggcagaggggaggggcgccgccgccgccacctcccctcccgctagatccggcggattgaaaggcatcggtgcccctgtccgccgtgtcccctcccgccggaagggagggcgccgccgctcgcctcgctcgagcactcccggggccccatggcgaggaagaggaggtcggctgctgctccacgccgctgcccgtcgccgctcaaggggagggggaggggggctcgccagtcgctgctccgtgtcgcctcagccactcggggggcgccgctcgccggtcgccactccatgccgccgcagctgctcggggggagggggaggggggtgccactcgccggtcgttgttccgcgccgccgccgccgcatccgtcgctcggggagattgggggcggggagggagggggagaatga

SEQ ID NO: 38190 - DNA, 528 bp, Oryza sativa
  unsure (1)..(528): unsure at all n locations
  Clone ID: PAT_MRT4530_41850C.1
ttcncttcatccagctcactgcataatcacacactaattaacaagctaattagctgcagtaattagctgcattgaattcatggagaggggtcagaagaagaagctggcgacgttggtcgggtgcaactacgccggcacgcccaacgagctgcagggctgcatcaacgacgtcgccgcgatgcgcgacgccctcgtcgcccgcttcggcttcgcgccggccgacgtcaccgtgctcaccgacgaccgcggctcgccggtgctccccaccggcgccaacatcaagcgcgcgctggccgacatggtcgcccgcgcggcgcccggcgacgttctcttcttccactacagcggccacggcacgctcgtcccgccggtgaaggggcgccgccacggccacggcgagtgcgacgaggccatcgtgccctgcgacttcaacctcatcaccgacgtcgacttccgccggctcgtggaccgcgtgccgcgcggcgcgagcttcaccatggtgtccgactcgtgccacagcggcgggct

SEQ ID NO: 38191 - DNA, 334 bp, Oryza sativa
  Clone ID: PAT_MRT4530_41851C.1
gacagggaaaaacaaccaactttttcctccaaaacagcatgtatggggttttgggacaccttttagaaacatttgggggggtaaaacagacaagcgaccgaccgaacgacccctatttttccctatcctaaaggggacgaactttttgttgggtttaagcttacaattgcaatacaattttacaacccattggactgctgtggcaccagatttttttaaatggtctatccaataaaagactctgtgcaaaatttccacggacatacaaattattggcgatggaattgaccctaaaccctcatagtaggggacccgaggggggcggggcctttgg

SEQ ID NO: 38192 - DNA, 495 bp, Oryza sativa
  Clone ID: PAT_MRT4530_41852C.1
atggccaggacgatgacgatgagggtttcttcgctccttgtcgccgtgctcctcctcgccgcgctctcgttccaggcgtgcagcggccatggcggcatcaacgacggcgacgggcaggtcgacgccccggcaacgcctgcgtcgtcgtccggcgtgtggtccaaggggctgatcgccgtgaagttcgccgccggcgtcttcctcggcaccgcgctgatgcacttcctcgccgactccacctccaccttcaagggcctcactaccaaccagtacccgttctccttcatgctcacctgcgtcggcttcctgctcaccatgctcagcgacctcgtcatcgccgccgtcgcgcggaggagcgccgccgccggcgttagcgacaaccaggtcagtgagcagcagcagcggcagcaagccgagggggcggtgatgagccgcaaggaggaggaggcggcggcggtggcgcacccggcaatgctggtgaggactgtgaattag

SEQ ID NO: 38193 - DNA, 237 bp, Oryza sativa
  Clone ID: PAT_MRT4530_41853C.1
ccctattctataccgtcaagattatgtcctgagggaatttatgtttcaaagggcaaaaccaaagacacacttattaacacataaatacagatgaggtctatcaatgcaataacattttgattgctactacatattatcaaccacctccgatatatccatgtttgtcacgcacacgtttcaaaacccatgaatacataaccgattcttgtggcgtaccacctatcaataaagtgagtt

SEQ ID NO: 38194 - DNA, 1606 bp, Oryza sativa
  Clone ID: PAT_MRT4530_41854C.1
atggtgggacccacgttttcccttcttctcgttttcttctcctctcgattcttctctctgctcttcctgtcgatgctgagacagagccggcgctgggcggcgatgggcgtggcgacggcggcagtcggcgcggcgacggcgatggcggccggcgcggcgaccgaaaacggcggcaagctccgctctgccgcctccaccaggacgaccaccaccttcgctacccggcgccgtaccctgcgcagccgcggggcacctcggcggcgtaacgaggcgagggggatcggacgcgcgcgcgcgcgcgaggagaaaggccgggggggatcagcgatgagcttcgcggatctggaggccggcgcggtgcgggcgcccaggagggcgcggggccccgacgccacgcgcgcgctcgtcttccagatcaccaccggcgtggcctcctaccgccgcctcctcaactcgctcgggacgcccaaggacacccccgcccttcgtgagcagctgctcaggagagctcctgacgcagacaaaatcgccgatactggtcccagtgaatttgtcttggacaagactgtttccaactatatgtgtgatcatgcagacaagagggttgctgacatgaagcttgccaaggattttgccacgacgatggaggagtatggaaaacttcaaaatcttgcgattcaaagggagatggcatataagccagttgttccccagacatctcagccaaagtcatataactttgcctatgttattgctccattagcttctcttcctttgaagtatggagatgggtcttattattttgcattctatactacaggtggtatagaagccagggattctggtaaaattcctgaacagcatgcgctactcgcagaatcaaagaggcaagaggtgctgcaattggataatgaaattgttttcaatgaagctatcattgaggaaagggagcaagctattcaagatattcaacaacagattggtgaattaacacgtacatgttttataatcgaggaaatcgatacaaacattgagaattctgcagcagcaaccaaagaggcaaagacagaactcgcgaaagcgtccaagactcagaaatcgaattcatcactgctctgcattcttctggtgatcttcggggttgtcttgctaattgtgataatagttttggcaacttgaggcgcgacgtagagattactggtgcactcggtagcatatttaaaagccatctgcatcggtccttgatcttctcgaagtgcaaagactgtcgctcacgaaactgtacaagtttgttgtttgttataggttttctgaattgtgagttcatttcctgatgtcatgcgtgagtctttttttcatggcttgccttgagtgaacagtgatgctcttttattttgccgacgaactttcactttgtaagtattttcagtgaataaaaacaaaagagcaactaagttctgtcttgtaaacccccgtaaaaaaaacttgtcgttgtatcataaacgccctcacacttcagtggcttgggtttcatacgtggaataaatatggattgtgtttttaaaaaaaaaaaaaaaaaaactcgagactagttctctctctctcc

SEQ ID NO: 38195 - DNA, 138 bp, Oryza sativa
  Clone ID: PAT_MRT4530_41855C.1
tcgtttttccataggcacatgtatgctaatgttactacatacattgctcacgattgcccttcaacttttgtgtgagtgcacactgaaactgttggtgatcctcatctaccaacatgacatgaaccacctgatgttgtt

SEQ ID NO: 38196 - DNA, 1357 bp, Oryza sativa
  Clone ID: PAT_MRT4530_41856C.1
ctggcccagaagtcgatcgatcgatcgtgacggcgacggcgcgagcacgaccatggccaggacgatgacgatgagggtttcttcgctccttgtcgccgtggtcctcctcgccgcgctctcgttccaggcgtgcagcggccatggcggcatcaacgacggcgacgggcaggtcgacgccccggcaacgcctgcgtcgtcgtccggcgtgcggtccaaggggctgatcgccgtgaaggtgtggtgcctggtgatcctgctggtgttcaccttcgccggcggcgtctccccctacttctaccggtggaacgagagcttcctcctcctcggcacccagttcgccgccggcgtcttcctcggcaccgcgctgatgcacttcctcgccgactccacctccaccttcaagggcctcactaccaaccagtacccgttctccttcatgctcacctgcgtcggcttcctgctcaccatgctcagcgacctcgtcatcgccgccgtcgcgcggaggagcgccgccgccggcgttagcgacaaccaggtcagtgagcagcagcagcggcagcaagccgagggggcggtgatgagccgcaaggaggaggaggcggcggcggtggcgcacccggcgatgctggtgcggacatcgtcgttcgaggacgccgtgctgctcatcgtcgcgctctgtttccactccgtctttgaagggatcgccattggtgtctcagcgagcaagagcgaggcgtggaggaacctgtggacgatcgggctgcacaagatattcgcggcggtggcgatgggaatcgcgctgctccggatgatccccaagcgccccttcctcatgaccgtcgtctactccctcgccttcgccgtctccagccccgtcggcgtcggcatcggcatcgccatcgacgccacctcccagggccgcgccgccgactggacctacgccatctccatgggcctcgccaccggcgtcttcatctacgtcgccatcaaccacctcatcgccaagggctaccgcccccaccaccccaccgccgccgacaagccgctcttcaagttcctcgccgtcctcctcggcgtcgccgtcatggctgtcgtcatgatctgggactgatccatccatcctagtattacactgcttcatttcttcaattcctgcgcccatgtatgtatgcttaatttggcttgtttaattaactgtatgtacacatgctgcatgcatgttcgatttctatcaccccattcattaatcgtggccgaaacagttcatgtccactaatgattgctgtatctatctacatatatcaaaccgtgaataaaagttgttataaaacgtactgttggtttaaaaatcacaaaa

SEQ ID NO: 38197 - DNA, 203 bp, Oryza sativa
  unsure (1)..(203): unsure at all n locations
  Clone ID: PAT_MRT4530_41857C.1
ggaatgaggagggtgatgaaccncagcngcaggtggggccagagataaaattggcagtcaccatcactctgaggggaacggggttgacacgagtgccagagccagtagcaccaaccctcggcgctgatgacgccggcatcatggcagtggacctcagcaccaagggagcagagatgcagcagctttgtgcaaaaatgaagtag

SEQ ID NO: 38198 - DNA, 471 bp, Oryza sativa
  Clone ID: PAT_MRT4530_41858C.1
atgacgtcagcggtgacgttaccaccggcggcggctcgagcgtgcaagctcgccggcgaacgacggcgcgacggcacgaacggagggcaccagcacgtagagggcgacgcggcgaactcaccgcgacggcggagggcggacgaggacagcgacacaacggcgaccacggcggtgacctccccgagcgacgaccacgactggagcgacggcggcgcacggggttggaaggtggtggcgaaggcccacggcgaccggcgacgagaaggaaagattagggccatcacagtccaacaagttaagtcggcgctcgcgcacacgctaagtctagatgccatggccgacatgaaagttgttttggttgaagatcaaggtctgccatggatgaagttgcaggagtacagtcatgttgggctgcggatagatcccgagctcacaactgcattacaaaaggaaagcggaagccaggactag

SEQ ID NO: 38199 - DNA, 185 bp, Oryza sativa
  unsure (1)..(185): unsure at all n locations
  Clone ID: PAT_MRT4530_41859C.1
ccccagagttcatcactacactgtcaggttgcgcgtaataattcagacaatgcttctttttcatcatcattcattgcttgttatttcattcatttttcaatctatccattttctcatcctttcaaactcctatctacattcaccatcaaaattatgaataaaatcacccgngtcccagatgaaaa

SEQ ID NO: 38200 - DNA, 1751 bp, Oryza sativa
  Clone ID: PAT_MRT4530_4185C.1
gagaataatcttacaaagggagcagagtagcgtttgatttgcagccgcaaaacgatcgagacgtcagcagcatgggagccgaggttatccagcagcagccggcggtgcttctcgtgccgttccccgcgcagggtcacgtcacgcccatgcttaacctggcgcgcgccctcgccgcgcacggcgtcgcggccacggtcgccgtgccggacttcatccaccgccgcatcgccggcgccgccgccgccggcggccgcgcgagggataatcaggccgtcggcggcggcgtggagctcgcctccattccgagcggcatcccccacctcccggccggcgaaagcggtggcggccggcacgccgacgaccagccgggcttcggcgccatcgtgcacgccatggagcaccacatgcccgagcagctggagcggatgctgctgtcgacggcgggccggggccgcgtcgcgtgcctcgtcgtcgacgtgctggcctcgtgggccgtccccgtggcggagcggtgcggcgtgccggcggccgggttctggccggccatgctcgccagctaccgcgccgtcgccgccatcccggagctcctccgcaagggcgtcatctcagagtccgacggtactcccgctgtctcgtcgaatcagctcgacgacaaggatggtcgggaggaggagcaggtggttcgaggccttggcatcctcccggcgcagctcgagctgagcaccaaggagctcccatggctcgtgggcgactcggctacccagcgatcgaggttcgccttctggctccagacgctgcgccgcgccaggggcttccgctctgtcctcgtcaactccttccccggcgaggccgtcaccggcactgccgccgccgaggacgacgacgggccgcagcggcaggccgcctgccctcgcgttcttcccgtcgggccgctgcttgtgctcgccggatgcaacgtagagcgcgcgaaaggcgccggcgacgacggcggcgtcgcggcaacgaatattaacaaccacccgcagccgtgcagcaagaaccccagcatgtggcaggcggactcgacgtgcatccgctggctggacgcgcagcccgcggcgtcggtggtgtacgtctccttcggcagctgggtggggccgatcggccacgacaagatccgcgagctcgcgctcgggctcgaggccaccggccgccccttcctgtgggcgatcaaggacgacccgtcgtggcgcgccggcctccccgccggctacgcagggagcgtcgccggccgcggcaagctggtggactgggcgccgcaggacgacgtgctcgggcacgcggccgtcgggtgctacctcacgcactgcggctggaactccaccgtggaggccatccagcacggcgtccgcatgctgtgctgccctgtctccggcgaccagttcatcaattgcgcgtacatcaccagggtctgggaggtcgggctcaagctcggcagcgtgcgccgcgacgtcgtacgtgactgcatcgagaggatcatgggaggcgcggaagggacgcgcctgcaggagaagatggacgcgctgaggcagagagccgtgacggccgaggccaggtgcttggcgcaggggaacctcaggtctttcgtcaacgaaatcaagagagaccacccgttgttgacgcagatttacaacatattgcaactaggcaagggtgtcctcccgttcgagcgacatgtcttcgtggatgctcaggatcaagatgagagttga

SEQ ID NO: 38201 - DNA, 427 bp, Oryza sativa
  Clone ID: PAT_MRT4530_41860C.1
atttgtcatgagagagagagaggggaattggtgaggtgatgctgtgtgtgggggatgatcctctcccagctgggaggctcctccgtccgtgctcccctcgctgcgccgccatggctcgccggtggccgccactggtggtcggcctcgctctcctcctcctcctctccgtcgcggactactccgtggtggccaagaccgaccagcctgacgttgctgctctgaacgtgatgtttgagagcatgaacaaaccgtctgaattgttgggttggaaagcgagcggcggcgatccgtgtggtgatgacgaccagtggaaagggatcgaatgcagcgattcatctgtcacagagatcaacttgtccgggcttggaataagcggcacgctaggttatcagctcttcagcttggaatcaggtaccaaattcgatgt

SEQ ID NO: 38202 - DNA, 1347 bp, Oryza sativa
  Clone ID: PAT_MRT4530_41861C.1
atggccactgctgcactgataccccctcgtcaatcagcctcgccatgccttgtgccacatagccatcaccagcctccatgccattaccgcgcgacctcccacgtcatcggcaaggccagcctcccttctgttgcccacgccaacctcccgacaccgtccgtgacggccttccgctgccggtggtgtcacccgcaccgggctacacgcatcaacgacctctcccggcgatgtcaggcgcgcctcttagcgctgccactccggcctaccgccgccaccggccactgccagccgccgcccggcttcctcccatccccaccacctccgccttcctcccgcagacgacaccacttgggtgtgcccactgtcaatggcgcgccgttgtgctcttcctcctcgtccgctctgccacctccacacagccgcacaccacccgcttcgccgctggcggcagctcgtggaccaacctcccatgctggggagactggatccagacgggaaggggccagatctagcagtggacgctgtccacctagttgtcaacgcttcctttctcctattgactccggcagccaggccttcgcgcgccagctccagcccagcgtcgctgcagctgttgttgccccggagctgatcggggttgtgggctccgaccccatgacctctgggaaaaggaaggccctgccaccgccgtctttgcggccacgcagattcctgtggctcgctcaggtggcggtgaggcggaggatggagggaagtgggggtggtggtgcggcagcggaggtcactgccccaagggagcgaagcgggggaccccgattagccaatgctgtgagagtgtctcgactctctaattctgatggcactggcgcaggagggggtgggggtggtggctatctaaacggtggagggtctgggtttggtagtggtgctgggtctgctcagagtgggaatccttttggttcctatgcaactgctgtagctggaggaggtagttctagcactagtcaggatggtggatccggaaacggcgcgggtggcggatctgcttctggagctggggaaaatattgatactgtatccactggttatggtggatccactagcgctgctggtaatggtggcggtggtggaggaggacaagccgggggttcgtatggatcttacggtcaaggaggtggtggtggcaccggatcaggttctggtatggctaacacgtatgtgtttgttccaataactgaggcagaaggaaatgcgaaaggaaatggtggtggtaatggtactgggcaaaatggtgggaatggtaacggtggaggtggtggatctgggtatgctaaagcacatccatag

SEQ ID NO: 38203 - DNA, 336 bp, Oryza sativa
  Clone ID: PAT_MRT4530_41862C.1
atgacgatatggaaacccatgagtcttcatcaatcccaagatatgcctgacggctcagcatttggaggtgctcgtaatgattgggtttgtatgtgtgagtttacaagtcagcgcaggtacatagcggagaaaagccgtgcggcaccaggcccaagctcgcatggccttgcatctgcgccttgcgagatgccaagcccaccctgcaagcacatgcagggtccggttctaatttttatgtttccaaaaccagaccgcggcacaagatatatagggtccaatccgttgtccggatgggaacaggtccaaatgcggactccaactcgcttcatgagctga

SEQ ID NO: 38204 - DNA, 504 bp, Oryza sativa
  Clone ID: PAT_MRT4530_41863C.1
cccacgcgtgcgctgacgcatatcacctgttcatcatgagcacaggctgcctgaaccacagaatgatgcaaaagctgacgtggctgagatgcttatgaatgacttgcatgttgcacttgatgggacctagtgaaaggtgttaggtactggcattgctatctaaacgattagctggaggagatacagcactaaaaggaatcaataccggcctttatttggacggaaagactcaatggtcagatatatgcattgcttgaccgctactacaactgtacatgttcagctaccatccacggtacgaaacttctcaactaggaactatctgtctgatgcatatcttgctgttctcaatatgcagcatgctagcgtgaagatgatctcaagtagttcgatcctgatcatgaaccagatgatgacccagaaagagatagtactacttcagctacaattggttaacagactgtgagattgtagcactgggacaatgtcttcgcaagctatgac

SEQ ID NO: 38205 - DNA, 2112 bp, Oryza sativa
  unsure (1)..(2112): unsure at all n locations
  Clone ID: PAT_MRT4530_41864C.1
atggagggcttgaatattgaagggattcccccagtgcctattgatccaaactctgttgatgtattgtcaagctcaaatattgatccaaactctgnttggacatatttggaagaggagaattatgacaaccagcttgagaggaaggaaatatatcgccataactcagctggaaacattttcagggctgcagagattgctgaacgcttcattcaaaccattgataagagagtcctggtcgacacagcagcaccaattgaatccgttaaagatgctgttagcaaatttggagggatacttgattggaaagagagacggaaacatgtccaagttgagcttgacaagatgcaggaagatgctcctgagtacaagagaagagtggaagtcacagaagttgagaaaagcaaagttcttgaggagctatattgtactagacgaactatagaacgactaaaaatagacctagacaaatcccatactgagacaattcaagcacaacaagacttagagcttgctgagattcggtttgaagagatgcaacaaggcattgcccgcaaagagagatctataacaaaggcaaagattgaggttgccaatgaacgacgtgcaacggccttagaagacttgcagtcagtgaagatggagctagatcaacttcaaaaagaatacacatctctaatttctcaaagggataacactgaaacaaaagcacgtaaggccattgttgcatcacaagaaattgaaaaggttgttcaggatctcaccattaaggttatcacaatgaaagatttgataaccacctcacaagctaaccatgttatagctgaggggaaaaaaataaatgcagctttggcttatcaacaggacatggtgaattggcagaatgagctaaaacagattgatgacgaggttcaaaagctcaatgatgacctatcactcaataaagaccttgagtcaaagctacaaactgcttcaatgtggctgatgaatctaagggacgagtttaaggctcacgtggatggtacattgcctaaagtgccatctgaggctagagaggaagagcggccaatgataattgtttgtgcgaagctagcacgaactaggaaggagcttgaaaatatgaggatagacattgataaggccaaggatgatgtgaagtctttgtggaatgctgctgctacattacaagctaatgtagagatggagaaaacaaacattgcatcattaaggcaaaaagagaatcttgcatttgaatctgctttagctcttcaagaagaattgagcaagattgcttttgagctcagcatggtggaagagagaacaaaagcagcaaaaatgcctttagaactacagcaagcaactaaaaagttggaacatgcaaagttgaatgctgtatttgctaggaatgagatggaaaaagctagagaagaggcagatcaagcccaggcagaggtaaatgttgttcaattgagaatagaagcaacattgagggagatacttgcagttaatgcatcaagagaaattgcagtggcatcagcaaatgcactacaagactataaacaggaaatagaactagaaccactagctaatcgaaaaaacaacaatgtcacattgtcacttgaagagtacaatgtattgtgcaagaaagtgcaagatgccgaggactctgctaagaagcaagttattagagctatagagaagatcaagaaagcaaaggatgcagaggtgaggagtttggataggttagatcaactgatcaagcaaattgatgataggagggttgcactgagagaggctcatgagaaagccaatgtagcatgtgatggaaaattagcaatggagaatgaactaagaaaaaggagagcccatcatgagaaacaacgaaatactggtgaggtatctcttcctattgctcaaatctccaatgtaaagaacacatcaacctcttttgacgcagtaggatcatctaactccaatccttataagtatcgaatgttgctacctagagctgacactatagcaactacaatagctgagtcaaggccacggaagtctttcttcccacggtccttagtggcaatgttcatgtttaggagaaagacacatttgaagtga

SEQ ID NO: 38206 - DNA, 1746 bp, Oryza sativa
  Clone ID: PAT_MRT4530_41865C.1
atgtcgatccgcaaggcgctgggcgccgtcaaggaccagacctccatcggcatcgccaaggtctccgccgccatcgcgccggagcttgacgtcgccatcgtccgcgcgacgtcgcacgaggacgcccccgcggaggaccgccatgtccgcgaggtggtcaccctcaccgcgcactcccgcccctacaccgccgcctgcgccgcctccctctcgcgccgcctctccaggacgcgcgactacgtcgtcgccgccaagtgcctcgcgctcgcccaccgcctcgtcgccgacggcgacccgcacttccgccacgagctcgtccgccccgcgggccgccgcggcgagccgatgctcgcgctcctcgccgagttccgcgacgaagcgcactccgcgtcgtgggaccactccgccttcgtccgcgcctacgcgctctacctcgaccaccgcgcccgcttcctcatatccctcctccccgcgccgcgcaccgtgcgcttcgccgacgagacgggatcgccgccgcgggggtcgacggcggcgacggtgcaagagatggacaccgaggcgctcctgggccgggcgctgcagctccgccagctgctcgaccgcgtcctcgcgtgccgcccatccggcggcgcgaggcaaagccgcgtcgtgctcgccacgctctacccggtggtcaaggagagcacgcagctctgctccgacgtcgccgtcgtgctcgccgtcctccttgaccgcttcttcgacatggactaccccgactgcgtcaaggtcttcgaggcacacgtcagcaccgccaagcaaaccgacgacctcctcgccttctacggctggtgcgacgacgtccgcctcgcccgcccggccgacttcgccgacgtcaagcgcatcgacgacaagctcctcgagacgctcgagcagttcgtgcgagagcgcggcagggcgggtcacagctcgccgcctccatggcagcagcagcagcagcaaactgcccagagcgacgagctcgacatgaacggcatcaaggcgctcccggcgccggagcatcacgccgctgagccatcgcgatcggcgccggagaaagttgcaccagaacaaatggcgccgccgccgccgccgccgcagactggcgacctcgtcgacctcagggaacccgtggtggaagacgagcaggagaacaagctcgcgctggcgctcttctccggcacggagaacggcgggtgggtggccttcccgtcggacgacgcggccgaggtgacgtcggcgtggcagacgccggcggcggaggccggcaaggcggagtgggagctcgccctggtggagacggcgagcaagctgtcgcggcagaaggcgtccatgggcggcgggctggacccgctgctgctgcacgggatgtacgaccagggcgccgtccggcagcaggtgggcgcgcacgaggcggcgacggggagcgcgagcagcgtggcggcgccgcgccgcgcgcccgtgctggcgctgccggcgcccgacggcacggcgcgaaccaccggcggcgacccgttcgcagcgtcgatgggcgtgccgccgccggcgtacgtgcagatggcggagatggagaggaagcagcagctgctggtgcaggagcagcagatgtgggcgcagtacaggcagggcggcatgcagggtcaggtcgccatggacaggctcgccgccggcgccatgccggtgcagtacgggatgcccatggcgtcggcgtacggtggctactactga

SEQ ID NO: 38207 - DNA, 2472 bp, Oryza sativa
  Clone ID: PAT_MRT4530_41866C.1
atggagggcttgaatattgaagggattccccaagtgcctattgatccaaactctgttgatgtattgtcaagctcaaatattgatccaaactctgttgatatattgtcaagctcaaatattgatccaaactctgttgacatattgtcaagctcaaatattgatccaaactccgttaatgtattgtcaagctcaaatattgatccaaactctgttgacatattgtcaagctcaaatattgatccaaactctattgatgtattgtcaagctcaaatgaatcaaagcctactatttcatttgatttgccatcaagtttctcggttggtcatactagacattcaagtgaagatttaagttcccttacaattaataatttacgcataaatcatagagaggacaattaccaaagccagtttgaagagaagcggatacatagccatggtcacacaagacgttttagtgaagatttaagttctttgaagattaatgatctatgtgcaaataaggaagaggagaattatgacaaccagcttgagaggaaggaaatatatcgccataactcagctggaaacattttcagggctgcagagattgctgaacgcttcattcaaaccattgataagagagtcctggtcgacacagcagcaccaattgaatccgttaaagatgctgttagcaaatttggagggatacttgattggaaagagagacggaaacatgtccaagttgagcttgacaagatgcaggaagatgctcctgagtacaagagaagagtggaagtcacagaagttgagaaaagcaaagttcttgaggagctatattgtactagacgaactatagaacgactaaaaatagacctagacaaatcccatactgagacaattcaagcacaacaagacttagagcttgctgagattcggtttgaagagatgcaacaaggcattgcccgcaaagagagatctataacaaaggcaaagattgaggttgccaatgaacgacgtgcaacggccttagaagacttgcagtcagtgaagatggagctagatcaacttcaaaaagaatacacatctctaatttctcaaagggataacactgaaacaaaagcacgtaaggccattgttgcatcacaagaaattgaaaaggttgttcaggatctcaccattaaggttatcacaatgaaagatttgataaccacctcacaagctaaccatgttatagctgaggggaaaaaaataaatgcagctttggcttatcaacaggacatggtgaattggcagaatgagctaaaacagattgatgacgaggttcaaaagctcaatgatgacctatcactcaataaagaccttgagtcaaagctacaaactgcttcaatgtggctgatgaatctaagggacgagtttaaggctcacgtggatggtacattgcctaaagtgccatctgaggctagagaggaagagcggccaatgataattgtttgtgcgaagctagcacgaactaggaaggagcttgaaaatatgaggatagacattgataaggccaaggatgatgtgaagtctttgtggaatgctgctgctacattacaagctaatgcaaaaagagaatcttgcattgaatctgctttagctcttcaagaagaattgagcaagattgcttttgagctcagcatggtggaagagagaacaaaagcagcaaaaatgcctttagaactacagcaagcaactaaaaagttggaacatgcaaagttgaatgctgtatttgctaggaatgagatggaaaaagctagagaagaggcagatcaagcccaggcagaggtaaatgttgttcaattgagaatagaagcaacattgagggagatacttgcagttaatgcatcaagagaaattgcagtggcatcagcaaatgcactacaagactataaacaggaaatagaactagaaccactagctaatcgaaaaaacaacaatgtcacattgtcacttgaagagtacaatgtattgtgcaagaaagtgcaagatgccgaggactctgctaagaagcaagttattagagctatagagaagatcaagaaagcaaaggatgcagaggtgaggagtttggataggttagatcaactgatcaagcaaattgatgataggagggttgcactgagagaggctcatgagaaagccaatgtagcatgtgatggaaaattagcaatggagaatgaactaagaaaaaggagagcccatcatgagaaacaacgaaatactggtgaggtatctcttcctattgctcaaatctccaatgtaaagaacacatcaacctcttttgacgcagtaggatcatctaactccaatccttataagtatcgaatgttgctacctagagctgacactatagcaactacaatagctgagtcaaggccacggaagtctttcttcccacggtccttagtggcaatgttcatgtttaggagaaagacacatttgaagtga

SEQ ID NO: 38208 - DNA, 2508 bp, Oryza sativa
  Clone ID: PAT_MRT4530_41867C.1
atggagggcttgaatattgaagggattccccaagtgcctattgatccaaactctgttgatgtattgtcaagctcaaatattgatccaaactctgttgatatattgtcaagctcaaatattgatccaaactctgttgacatattgtcaagctcaaatattgatccaaactccgttaatgtattgtcaagctcaaatattgatccaaactctgttgacatattgtcaagctcaaatattgatccaaactctattgatgtattgtcaagctcaaatgaatcaaagcctactatttcatttgatttgccatcaagtttctcggttggtcatactagacattcaagtgaagatttaagttcccttacaattaataatttacgcataaatcatagagaggacaattaccaaagccagtttgaagagaagcggatacatagccatggtcacacaagacgttttagtgaagatttaagttctttgaagattaatgatctatgtgcaaataaggaagaggagaattatgacaaccagcttgagaggaaggaaatatatcgccataactcagctggaaacattttcagggctgcagagattgctgaacgcttcattcaaaccattgataagagagtcctggtcgacacagcagcaccaattgaatccgttaaagatgctgttagcaaatttggagggatacttgattggaaagagagacggaaacatgtccaagttgagcttgacaagatgcaggaagatgctcctgagtacaagagaagagtggaagtcacagaagttgagaaaagcaaagttcttgaggagctatattgtactagacgaactatagaacgactaaaaatagacctagacaaatcccatactgagacaattcaagcacaacaagacttagagcttgctgagattcggtttgaagagatgcaacaaggcattgcccgcaaagagagatctataacaaaggcaaagattgaggttgccaatgaacgacgtgcaacggccttagaagacttgcagtcagtgaagatggagctagatcaacttcaaaaagaatacacatctctaatttctcaaagggataacactgaaacaaaagcacgtaaggccattgttgcatcacaagaaattgaaaaggttgttcaggatctcaccattaaggttatcacaatgaaagatttgataaccacctcacaagctaaccatgttatagctgaggggaaaaaaataaatgcagctttggcttatcaacaggacatggtgaattggcagaatgagctaaaacagattgatgacgaggttcaaaagctcaatgatgacctatcactcaataaagaccttgagtcaaagctacaaactgcttcaatgtggctgatgaatctaagggacgagtttaaggctcacgtggatggtacattgcctaaagtgccatctgaggctagagaggaagagcggccaatgataattgtttgtgcgaagctagcacgaactaggaaggagcttgaaaatatgaggatagacattgataaggccaaggatgatgtgaagtctttgtggaatgctgctgctacattacaagctaatgtagagatggagaaaacaaacattgcatcattaaggcaaaaagagaatcttgcatttgaatctgctttagctcttcaagaagaattgagcaagattgcttttgagctcagcatggtggaagagagaacaaaagcagcaaaaatgcctttagaactacagcaagcaactaaaaagttggaacatgcaaagttgaatgctgtatttgctaggaatgagatggaaaaagctagagaagaggcagatcaagcccaggcagaggtaaatgttgttcaattgagaatagaagcaacattgagggagatacttgcagttaatgcatcaagagaaattgcagtggcatcagcaaatgcactacaagactataaacaggaaatagaactagaaccactagctaatcgaaaaaacaacaatgtcacattgtcacttgaagagtacaatgtattgtgcaagaaagtgcaagatgccgaggactctgctaagaagcaagttattagagctatagagaagatcaagaaagcaaaggatgcagaggtgaggagtttggataggttagatcaactgatcaagcaaattgatgataggagggttgcactgagagaggctcatgagaaagccaatgtagcatgtgatggaaaattagcaatggagaatgaactaagaaaaaggagagcccatcatgagaaacaacgaaatactggtgaggtatctcttcctattgctcaaatctccaatgtaaagaacacatcaacctcttttgacgcagtaggatcatctaactccaatccttataagtatcgaatgttgctacctagagctgacactatagcaactacaatagctgagtcaaggccacggaagtctttcttcccacggtccttagtggcaatgttcatgtttaggagaaagacacatttgaagtga

SEQ ID NO: 38209 - DNA, 406 bp, Oryza sativa
  unsure (1)..(406): unsure at all n locations
  Clone ID: PAT_MRT4530_41868C.1
aaatatgaaagataattttatttctatttatatcacctcaagtttcacatgctatatacgatgatacctgagcttatattttcatcttccgaacctataatattgagaaaattcattacaagatatcgccaagggtggtaatgctatcgggtgcattataggaccatatggtagataccatatgtagatggcaagttaaaagccaatagtgctagagcttgagccagatnccggtcaatggatagatagncaaactgntggaggtgtagctggagcgctatggnctggacancgncaatgtcctgnnagggagataggtgcgncnccagcctgagctgttgcnagattnggtngnnttccatccgaatcgcatcctgttgcaagaaggcgctcgccncccagctat

SEQ ID NO: 38210 - DNA, 774 bp, Oryza sativa
  Clone ID: PAT_MRT4530_41869C.1
atggttttcaacagtgagttcggattgagacatccaaggtctcgaatttctcctgcagcttctgcaaaacgccgaactgctccagctaaactggttgccttctcacgtggccgctctcgcggcgctcatggccgccgtggccgcgacggccggcgccgtgacgttcgacgcgacgaacacggcgtcgaacaccgccggcgggcagcggtcgaccgggaggtcggcgtggactacgcgaagcagatgctcgccgacgcgtcgtccttcatctgggacaccttcgagcagcccggcgacggcggcgaccggaagccggtggacgcggtgaccctgaccgtggaggacatcgacggcgtggcgttcaccagcggcgacggcatccacctgagcgctcggtacgtcggcggctacagcgccgccggcgacgtgagggcggaggtgaccggcgtgctgtaccacgaggcgacgcacgtgtggcagtgggacggccgcggcggcgccgacggcgggctgatcgaggggatcgccgacttcgtccgactgcgcgccggctacgcgccgccgcactgggtgcagcccgggcagggcgaccggtgggaccaggggtacgacgtgacggcgaggttcctcgactactgcgactcgccggcggtggtgcaggggttcgtggcgcagctcaacggcaagatgaaggacggatacagcgacgacttcttcgtccagatctccggcaagaccatcgaccagctctggcaagattacaaggccaagtac

SEQ ID NO: 38211 - DNA, 565 bp, Oryza sativa
  unsure (1)..(565): unsure at all n locations
  Clone ID: PAT_MRT4530_4186C.1
ggggggcgtttngggggaacnttcaanngttcggttntnaatttcccggggnaaaatttncaccancccntccaaattccccggnnganacggggggggggggtnntaatttccaaaaaaaccnggttntggggtnttggggantattcccngngagaaaaaagggaanttgngggggaccttnntccantannangaaaatttttgatttttttttaaggtncaannatttntaaatnggnagggnngnnanccaccnaatggnnanngggnaaaattnaanngnnccccnggnaannntntaaanttttttttanaaaatncggnaantnggnccnnggganaaatnccnggnantancccngtttttnttnggggttnngcnantnnanaaaanatttttntanaaaaaaananancngggngggnccccaaaaanaaaaaaaaaaaggtttnttttcccnaaaaaaaaaaaaaaaaaaaaaaaaaaaaaaaaaaaaaaaaaaaaaaaaaaaaaaaaaaaaaaaaaaaaaaaaaaaaaaaaaaaaaaaaaaaaaaaaaaaaa

SEQ ID NO: 38212 - DNA, 850 bp, Oryza sativa
  Clone ID: PAT_MRT4530_41870C.1
atgaagcctttccacatggccactctcgcggcgctcatggccgccgcggccgcggccgcgacggccgctggcgccgtgacgttcgatgcgacgaacacggcgtcgagcaccgccggcgggcagcggttcgaccgggaggtcggcgtggactacgcgaagcaggtgctcgccgacgcgtcgtccttcatctgggacgccttcgagcagcccggcgacggcggcgaccggaagccggtggacgcggtgaccctgaccgtggaggacatcgacggcgtggcgttcaccagcggcgacggcatccacctgagcgcgcggtacgtcggcggctacagctccagctccggcgacgtgaggacggaggtgaccggcgtgctgtaccacgaggcgacgcacgtgtggcagtgggggctgcaggactacgcggcgcactcgtgggtgtacgaggggatcgccgacttcgtgcggctgcgcgccggctacgtcgccgccggctgggtgcagccggggcaagggaacagctgggaggacagctactccgtgacggcgaggttcttcgactactgcgacagcgtcaagccagggttcgtcgccgacatcaatgccaagttgaaggacgggtacaatgtcgactacttcgtgcagatcaccgggaagaccgtgcagcagctgtggcaggattacaaggccaagtacggaaactgatgatcgatcgacgcagagaatgaataagacaagagattaccatcattgattgatatagattgttgtaactcatagctatggagtttacacaattattgtattgcttacggatgatagaataaagggacgctgtctagttttcaatcac

SEQ ID NO: 38213 - DNA, 505 bp, Oryza sativa
  unsure (1)..(505): unsure at all n locations
  Clone ID: PAT_MRT4530_41871C.1
accccttgatttccctaactaacacttcaccgtcncaaagtggaatcgataagaacacccactctttctctgcacgttcctccgatgtttccacactcccccaccctccacccgtcacgccttggagaacccactgaaggagtcacgattcgcctgaatattttcttgaggcactcacacaccgcgaggggaaccgcacccacgatgttttgtttggtaccacgccacaagggacaccactaccacgaaagccacgaccacaccactaagcttaccacgagccctctattttcctgtatcacgtatgaccacgatcggtataaattcactctgtcacaccatagacccgggatgttgtgtgcacccttgtgaaactaatttttggggtcccttgttgttattcgttcacgagctcatgtgtgaagttctttttgtagaaatggaaccctttataaaccnttttataggagtgactttatcatcataaaaaaaaaaaaaaaaaaaa

SEQ ID NO: 38214 - DNA, 408 bp, Oryza sativa
  Clone ID: PAT_MRT4530_41872C.1
atggcttctgctccactcccacaggcagctcaactggggtataagccaaacgtcttctccttctggatcctttatcttcaactgagccacgggtcgggcgacgacctcgccggcgctagggaccttggccgggcgattggagggcacctacgcgtagaggacaacaagacgaactcaaaggtgctcaccgatacgacaaacgacgtcggacgacgaccggcgacgaacttgaacggcggcggcggctcggacctcgccggcgacggagctccggtggccggcgacgaaaggggacgggcggccgggcttcccctcaccacggcgcacctaaatgcggcggcggcaagcggcgacgacgacggaggtggcggcgctacctcgccggagatggccggcggcaaccggtga

SEQ ID NO: 38215 - DNA, 642 bp, Oryza sativa
  Clone ID: PAT_MRT4530_41873C.1
ttattaaatcttataaataaataaataaaattctaccacaccacaagtccactacaccagctacaactttctcctattacaagtgctggtggacatggattggattttgatgcctgtccgagatggcaccgacagacacccgctccaatcagtcccccctctgatcactttctccctttttttttcatcaactccatgatcgatccgtccattttgcccacgtcgtgttcgtgcatgcgacggtacgaataatatatcgctctcctcctttgctggctaatgaatgatttgaggtcactgataaatcgcacatcatgtgtacagtggcttagccaaatgatccatcgcgctggctgaactgagccacaaaaattaacggcaggacgagttgagtttggattgtaattgttgttgcaggtgaatggttacagttgaagaagaagccagcgtcatggggctcttgaattgtgataggagtagcttaccaaaacgaagaatcatcgagcccttaaacacccttttttttttgcgggaaagagagaaattgaacactttgaaagtctcacctcgtgaacaatatgtaacacgcagcaacgtttcttggaaggtggcaatggtgtatgggtgaatcgcatcgattct

SEQ ID NO: 38216 - DNA, 631 bp, Oryza sativa
  Clone ID: PAT_MRT4530_41874C.1
gcacgagggccgacggcggcgacgcttccggcgggtggttcttcgccgcctacgtgctctggatcacggggctgaacctgttgtacgtgctggattatctgatgaactgacgatcgagcactcgcgccgcaacgccggccaactccggccgtctgcttcacatacggtaagccttttcgatcgccggcagccgctaccaattcctcaaccagctaccgcaaccacaatcccaactggtggacgtacgatcgcacttcccatcggcgatcgatcgccgcttaattccttcctccaccaaattaatctgacggatgatcgatcagccagtactcgcgacagattgttgctcccaccccggggctcatctaaagtactagctttgtggtttactccgaccgagttaattatcgatctataccctgtcgacatgcatctatctccacctcgatctcctcaagaagagagagagatccatctaccctctccgatctcttgatcattcattcttggaagcatttctactgaataatcttgtgatacgcatgcaatttcgcgcttgcgtgcgtttctctctacgactatatccagctaattgtctggaagatctctgccctcacgtgtatatgaaaaa

SEQ ID NO: 38217 - DNA, 221 bp, Oryza sativa
  Clone ID: PAT_MRT4530_41875C.1
tcgttaaagaatgatttggagaggtcaacaaagaagggtgacgatatattttcgatgggagggtaagcatgctttttactttgataatgatttattgatgtgtttatacttaactatgtgatttgttttttgatctgatttttttttctactttcttttttattctcttattatcatatactaacattttttttttaactttattatattatatatcttat

SEQ ID NO: 38218 - DNA, 426 bp, Oryza sativa
  Clone ID: PAT_MRT4530_41876C.1
atggcgctcacccgtgcacgtggggagggggttccggcgacgaacctcgacggaggaggggcggacgagacagggcccactgggcagtggctcatgagtgaggaggtggcaccggctttgctcggctcggcttcaagccggatgactatgatggcgatgcggcggcggcgggtcgttgccggcgacggctaccagcgcgagaagcggcggtgggcggcgcgaaaagcagtggcggcggccgaaggcgacgccgcgcgcgcggaggacggcggcgcacacgggagagagggaaagagggaggagagggagttctcaccagcaggcacggcggccggcatgaaggatgaaggcggcggcgatgacctgacaagcggaggggtaggcgggcggaggttgctcctacggaggaaaatggagaggacttag

SEQ ID NO: 38219 - DNA, 215 bp, Oryza sativa
  Clone ID: PAT_MRT4530_41877C.1
atgcagggtgggcgcggcggatccaacatcgtcgtggacggatccggttacgctgcatgtggatctgccgctgccgcactagatctggtcagagcggtcgacagcaaggatctgggcatcgacgtcatctccgttggagctgacggtggtggtggcaccggcaccggcatagctcgagacctcgggcggcggccggattcgacgaggaaggcctg

SEQ ID NO: 38220 - DNA, 1440 bp, Oryza sativa
  Clone ID: PAT_MRT4530_41878C.1
atggaattggcagagcagctgtactcagttttcaggagctatgcgccccctatttgggcttcaatcaccgctggcatttttgtcatcacctcgctttcactatctctgttcttgctgttcaatcatctgtcagcctacaagaacccagaggagcagaagtttcttgtcggtgttattctcatggtcccatgctatgcggtcgagtcgtacatatcattggtgaatccatcaattagtgttgatattgagattctgcgagatggctacgaggcatttgctatgtactgttttgggcggtatctagttgcttgcttaggtggggaagataggacaattgaatttctgaagagggaaggcagttcaggttctgatgtaccacttttagaccatgaaactggacaacgatatgtgaaccatccttttccaatgaactacatgctgaaaccttggcctctaggagaatggttctacttggttattaagtttgggcttgttcaatatgtgataataaagacaatttgtgctattcttgcggtgattcttgaatcctttggagtgtactgtgaaggagagtttaagtggaactgtgggtactcttacactgctgtggttctcaattttagtcagtcatgggccttgtattgtctggttcagttctatgctgccataaaggatgaactagcccatataaagcctcttgcaaagtttctgacattcaagtctatagtcttcttaacatggtggcaaggtgtggtgattgcattgctgtacaattggggcttgctaagaggtcctattgctcaagagttgcagttcaagtccagtattcaggacttcattatctgcatagagatgggagttgcttctattgcccacctgtatgtgttccctgccaagccatatgagatgatgggtgatcgtttcattggaggggtttcagttctcggagactatgcttcagttgattgccctctagatccagatgaagttaaggacagtgagcgaccaaccaagactaggcttccccagccaggcgatcgtgtcagatgctccactggcataaaagaaagtgttcgtgacgtcgtacttggaggaggagaatatattgtgaatgacctgaagttcaccgtcaatcatgctgtggaaccaatcaatgaaaagctgcacaggatatcacagaacatcaaaaagcatgagaaagaaaagaagaaaacaaatgacgatagctgcataaattcacaacaatccttgagcagggtaatcagcggtattgacgatcctctcctgaatgggagcttaagtgataatagtggtcagaagaaatcacggaagcatcgcaggaaatctgggtacgggagcgcagagagtggaggagagagcagtgatcaaggattaggtgggtatgaaatccgagggcacagatggattactagggagtaa

SEQ ID NO: 38221 - DNA, 339 bp, Oryza sativa
  Clone ID: PAT_MRT4530_41879C.1
gggatgcgtctcagattaagttgtatgtaaattttaagttgccaaaataaacaactaaaataaatctgtatgctgccacgccaaaggattcacctggatgctacagtcaacatgctatgacaagcggaacaacgtttattcttctcttttttatatagtaatatgtccttgctatataaaaataaaagcagaactacaatgtcttacagaaaagcaatgaaagaggaacaaaataaaaacaaaaaaaactgaagggaaatgtcaatggaggaaaacagaacgagagggccccgatcgagaacgtggtggtcttcgagaggaaaatcatacatactggtg

SEQ ID NO: 38222 - DNA, 245 bp, Oryza sativa
  unsure (1)..(245): unsure at all n locations
  Clone ID: PAT_MRT4530_4187C.1
cggacgggnctagcntagttntagatcgngagcggccgccctttttttttttttntttttaaagnataaacaaatgatgnattaagcaagcaatctttccctaacctnncacaagagatgtaacggnntcaaaagaaaactaggngtaaaagagacatggctgggccagccggtttntnctatagtcttacactctcatctnntactnctactacttttgccantncctatngnttcttttgggg

SEQ ID NO: 38223 - DNA, 1203 bp, Oryza sativa
  Clone ID: PAT_MRT4530_41880C.1
atggcgaccggcggcagcggcggcggcggcggaggtggaggtggtggtgacgatgtccacgggctcaagttcggcaagaagatctacttcgagcaggacgcggcggcgtcggcgtcggcggcggcggtggagtcgtcgtcgacgtcgtcgggcggaggcggcaagaaggggaagggcgtggcggcggcggcggctcccccgccgccgctgccgccgaggtgccaggtggagggttgcggcgtggatctgagcggcgtcaagccgtactactgccgccacaaggtgtgctacatgcacgccaaggagcccatcgtcgtcgtcgccggcctcgagcagcgcttctgccaacagtgcagcaggtgctctgtccacatggttaggttccaccaattacctgaatttgatcaagaaaaaaaaagctgccgcagacgccttgcaggtcacaatgaacgccggaggaagccgacacctggacctctttcttctcgctatggccggcttgctgcatcctttcatgaagagccaggcaggtccagaagctttgtggtagatttctcatacccaagggttccaagcagtgtgagggatgcgtggcctgctattcagcccagcgatcgcatgtccggttcaatccagtggcaagggggccatgaactccatcctcaccgcagcgcagttgcgggatacagtgatcaccatgcgttcagcagccatggtggctcagcggctggggcaccaatgctccaccacccagcctttgagctcacctcaggtggatgtctcgcgggagtcgccaccgactccagctgtgctctctctcttctgtcaactcagccatgggatactacccaaagcaccagcagccacaaccggtccccgccaatgtcgtcaacggccagcgccttcggaggcggcaacaacccggtgtcgccctcggtcatggcaagcaactacatggcggcgagccccggctggaacagctccagccggggccatgacggcgccaggaacgtgcacctgccgccaccgcacggggttgtgctgaacgaggtccctccgggctctgtccaccacggccatttctccggcgagctcgagctcgcactgcagggaggtgccccgtccaaccggccggaagccgagcatggctccggcagcggcgccttcagccactccaccaatgccatgaactggtctctgtag

SEQ ID NO: 38224 - DNA, 836 bp, Oryza sativa
  Clone ID: PAT_MRT4530_41881C.1
atggccgcggttcggcttccttctcctgcgccggtggctcatcctcctgctctccgcgcgcgctccctatccggcatggaagtgctcgggcggcaagccccagcgaggagggaggctgtgctcctccgaccggggaggagcagcatcagcggaagtccatggggtcctctcgagcgggacggcggcgcgaggaccaatgcggcggctacggcgaatagaaaccgctcgggagcggcggcggcggcggcggcggagcggaggaatccctcaccggcctacgcccgcgtgtgctccgcatccgaccgcacacgtggacaccatcggacggccaaggcgtcgcgaaggggcccagggagcacgagcagcacggacgggtgcccctggaccgtcggatcaggcgctgcagccacgtagatccgatccaacggaggtgatgcgtccacgcagccttcctgtgcgaagttggtgctgcctttgcatttgcgcttttgcttcgcgaatcgcaacaactcgttgcaagagcagcggaattgcggagaggtgaggacttgatctctctcacattctctcctcgtcgtcgtcgtcgtcctcctcctctgctttcctctgctccaagacaacgcgtaagattcctccaccttctcccatggccatgtgattgtgtgactgtattggtggcgctgttggtagctgctcttctcgttcttgttgttccgttgtttgctctccaatgttatctcgtgttcttgcatcggattgtgttgttgttttgctgcttttgaagttgttggtgtggtcttcttcgaggagggagggtgacgagcaccgagagccat

SEQ ID NO: 38225 - DNA, 361 bp, Oryza sativa
  Clone ID: PAT_MRT4530_41882C.1
gcttatcacaataaagactggtcccacatgaaacattcgctttgctctccttgctttgctgtgcacgccttggcagtgagtttaggaagctttgaatatagctgcagcgctgtcctgctcaacaggtgctacccatatatgagtcgaggcacttggatacgagccccttttgcaatcctgcttactgaaaacaccaattgcacagtccctgtggcgcacattactatagacattaacatgtcagcataccacactacaactcacagtgggacttattgatcgattgctagctaagcttgtgcttaacgtgccattaaatggattacctagactatgggccccagaccataccaccctgcgg

SEQ ID NO: 38226 - DNA, 324 bp, Oryza sativa
  Clone ID: PAT_MRT4530_41883C.1
atgtcacgcgtcggtgctgatctcaagctcgatatcgccgacacgatttcatgctcaccggcggttagcgtgggagggaaggtcatagcgacagcaacaagggagggggatctagaacttacgagctctcggaaaggtgaaggaggagctcgagctcatcggctctcagaaggtcgacagggtgggggaagatcaagctcaccggtgctcgggggtgcaacaacagaggtggtgctcgatcccagctactaccaaaagctcctaccatcgccagagccactcgcgcaagattacattatcctcgatcttggggagaaggcttga

SEQ ID NO: 38227 - DNA, 453 bp, Oryza sativa
  Clone ID: PAT_MRT4530_41884C.1
atggtttaccttgcaggaaaggtgagtcaggatggtcggagaaaaggcagagaacgaccttttcaggggactatcatcgccgtgaacgaactcctcccctttgaaggagcaaaactgtcagatctgctccttgatcgttttgcgagatccgaacaacagcgtgccatgcgtccatatgcgttcgacttaagcatagggcccctctcttatcctatcaatatcatcatcgtcttcttcgtcgccgtcatggggcctcctctccttctccccttgtctgcttcctggggcagggctagcactgggggtgaggagaggcgtgcaccgaccgccaccgccacgcagtcttgctccgcaaaaataccagatgagcatgagctgatcaattccagcgccgcagccgcagcaaagagtgcaagacaatcgatcaggccaagaggcaccaaccgtgtgtag

SEQ ID NO: 38228 - DNA, 482 bp, Oryza sativa
  Clone ID: PAT_MRT4530_41885C.1
gcgaccgtgggctgattgatcataaggctagcaggtcgtgttcttcgggcgggctatggcggccatggggcatctcgggccagctgagcgagtcggagatgagttcaggacaggcatgccgcgagagggcagacagccgtggaccgtgccggcggtgctcgaccggcagctcaccgccggagaggttcagccgatgttccgccgccgggcgcgctcagctgctatgcacgctgcagcactgccgacgtgagcccaagtgccgtgcccgacatcccggagggaggactataggagagcatgccatcccctgagcatgctggtgtcgcttcactgatactacgggggagggtcacgcggagctgcgtctactgcaggagtcgtcgagacgctactcggcgagctcacagcagccgtgatgacccggtgagctgaccaggcgaggagacgcggcgcactgccgtcgattgccggttgagccccac

SEQ ID NO: 38229 - DNA, 582 bp, Oryza sativa
  Clone ID: PAT_MRT4530_41886C.1
aaaagcacacacaggagtgttcaccaaagttgctattcgttcaatctactacaccaccatgtatttatgtgtacattttcctctacactaaattaatatttatattgttgatatatatgaaatgacacattttcaatcacgtacatacatacatacatacatacatatatatatatacatatatatatacatatatatatacatatatacacatatatatacatacatatacatacatatatatacatatacatacatatatatatatatatatacatatatatacatatatgggagcgtatcctatgcacacaggacctcgcgtgtgcacgtgtgtacacgtgagggcctgtgtgcactatatatatatacatatacatatatatatatatacatatatatatatatatatatatatatacacaccaccggcatatatatactgaaatgtgttatatatactacgtatatgtccagattcatatgtacatgtatattaagacgcctaccacgagatgcatttacacacacacacacacacatatatatatatatatatgggcttattaggtttgtggcata

SEQ ID NO: 38230 - DNA, 250 bp, Oryza sativa
  Clone ID: PAT_MRT4530_41887C.1
tttgaagcgacgggggggaattaaacccctgggtctcttctctcgttccccgtcaagtccccactgaatggcgcccgcaatcgccgggaacggacgcaccaagcccggccgcctttctttgccgccggtgaacattcaagtcgactatccatcctctctggtgctcagctcgcttccctccgctgtaaaatgcaccccgctagctacgttctatcatgttagccccctgccgcgatataccgtggtccct

SEQ ID NO: 38231 - DNA, 243 bp, Oryza sativa
  Clone ID: PAT_MRT4530_41888C.1
atgacgactaacttccaacttgaaggaaacagccagccagcaggcgtcctctgggtcagctactgctgcggtgggcgtcgcagcgtcgcggaggaggtggcgaacgcctccacaggtccccgtggcggaggcagcagcgaatgcccctacgagcccccacggcggacgagatccccaccacaatggactgcctctgccctccagcgtgatgacactctctctcgtggcccgatcttctggtga

SEQ ID NO: 38232 - DNA, 365 bp, Oryza sativa
  Clone ID: PAT_MRT4530_41889C.1
ggaggacaatacattagcaagcttgattgaacattgatgtagcgaacaaacagttgattgacaacacatagcgaagcatgcaggggtgctcaaccatagcaggagcacacggcgtccaaaccatttacacgaatggcattaacacacgttcaaagactcgggcacaaacaaatagagtgcatgcccctaggagatagggcgaagctcacataacaagacacctttttttataactttcacaatagcaaaccatgttgtccagaccatacggcagactccattttaaaactgttagacttatcgggtttcagaaaaatccctacaggcatttgatctgcaagttgcttgtgactggggggcaaaaa

SEQ ID NO: 38233 - DNA, 542 bp, Oryza sativa
  Clone ID: PAT_MRT4530_4188C.1
ttttgattaggataaattaagccagcacctaaccataaagtaacacagacgcggatgaattgcttaacaaacaggagaactgaatcgcctttttcatgtggcatggtgatgcagagatttgagggatatcacccggccaaaaagatttgagagatatctgtttattaggcactttagttgtctgttccttctgtcaaaagctagtgaagatgcatccaaactatagttctaagagagatcacgcataatatgaaatcaaagatatggttgtttcattttctttagaacacttggttgttccattgcatgcatagtttaatacgtgtgaaatgcacatggtgaaaaaaatattgccactaagactcatggtatcacattgagatctataagcttttaggatcactatgcagtgaggctatcactgctgttgttttcttattgtttttggttcaatgcgaacaaacaaggcacttgtcttagctagagtcgtaaaaataatgcaatagggtaacatggatctagaattgctaccacacatatgt

SEQ ID NO: 38234 - DNA, 3145 bp, Oryza sativa
  Clone ID: PAT_MRT4530_41890C.1
atgccgtcgcctgcggggggtccggtggccgtggcggcggcgtctgcggcggcggcggaggcgctggggatctcgccggagatgtacccgacggaggacgacctggcgtacgaggaggagatcctgcgcgagccgttcaagctcaaggggtggtggcgctacctcgtcgcccgcgccgccgcgccgttcgccaagcgcgccgtcatctacgagcgcgcgctcaaggcgctcccggggagctacaagctgtggcacgcctacctccgcgagcgcctcgaccacgcgcgcccgcaccccatctcccaccacgcctacgcctccctcaacaacaccttcgagcgcgccctcgccaccatgcacaagatgccccgcgtctgggtgctctacctcacctcgctgctcgaccagcgcctgctcacgcgcgcgcgccgcgccttcgaccgcgcgctgcgcgcgctccccgtcacgcagcacgaccgcatctggccgctctacctccgcctcgcctcgctcccggcctgccccgtcgagacctcgctccgcgtcttccgacgatacctccagtacgacccctcccacgctgaggacttcatcgatttcctcatctccgcaaaccgctggcaggaggccgccgaccgcctcgcgtccgtgctcaacgatgacggcttccgctccgtcaagggtaagacccagcaccagctctggcttgagctctgcgaaatcctcaccaagcatgccgatgaggttgcggggctcaaggtggacgctatactgcggggcggcattcgcaagttcaccgatgaggttggcaagctgtggacctccctggccgattactacgtcagaagaaccttgtatgagaaggcgagggatgtcttcgaagagggggttgcttcggtgatgacggtgcaggaattcagcgtggtgtttgaggcgtacacacaattcgagcagagtatgcttgcggcaaagctggaggcagccgaggaggagggtgcggggagtgagggggaagaggaagcgggcaggaagaatgggatggacaagctgtcgaagaaattcctcgcagattgctggctgaatgatgaggatgatactgatttgaggctggcaaggtttgagcggctgttggatcgccggccagagctcctcagcagtgtcctgctgcgacagaatccgcataatgtggaggaatggcacaggagggtgaaactttttgagaaggatcctacaaggcaagtagccacatatgttgaagctgtgaaaaccgtagaccctatgaaggcagctggaaaaccacatactctatgggtggcattcgcaaagatgtatgagaaacataatcgtctagatagtgctgaagagatctttaaaaaagcaacacaggtgaactacaaggcagttgaccacttagccagtatttggtgtgagtgggcagagatggagctgaggcacagtaattttgacaaggctattgagctgatgaggcaagctactgcagaaccctctgttgaggttaagaggcgagctgctgctgagggggatgaacctgtccaattgaaagtacataaatccctgaaactgtggagcttctatgtggacctggaggaaagtcttggaacattggaatcaactcgtgcagtttatgagagaatattggatttacgaattgccactccccaaatagttctcaattatgcatatcttcttgaggaaaacaagtatttcgaagatgcgtttaaagtgtatgagcgtggtgtgaaaatttttaaatatccccatgttaaagacatttgggtgacctacctcacaaagtttgtaagaaggtatcagagaagcaagttagagcgggcaagagaactgttcgatgaagctgtcaaacaggctcctccacaagaaaagaaggtattgtatttgcagtatgctaagctggaggaagactatggccttgcgaaacgtgcaatgaatgtatacgacgaagctgtaagggctgttcctaacagcgaaaagatgagtatgtacgaaatatatattgcacgggctgcggagctatttggtgttccaagaacaagacagatatatgagcaagcaattgaatctggactcccagacagagatgtcatgacaatgtgcatgaaatttgcagaacttgaaagaaaccttggagaaattgatcgtgcccgtgccatttatgtccacgcatccaactatgctgatccaaactctcatcctgaattttggaataaatggaatgaatttgagattcagcatggtaacgaagatacattcagggagatgcttcgcatcaagcgtactgtggctgctagccgcagtcagactcatttcatactcccagagtacttgatgcagagggaccagaggctgaacctcgatgaggcagttgacactctgaaacgagccggtgttcctgaggatgagatggctaacctagaaaggcaactagcgccaggaccttccacggctccaccagctccaagcactgctactgctcctgctaaccggatgatgaactttgtcagtgctggagtgcaggcacaggctgagagcagcagcaggcaacaacaggctgctgctactaacaatgaggacattgagctgcccgatgagagcgacgaggaggaagacgatgtccaaattgcggagaagagtgttcccgctgcggtgtttggagagctcggcaagagagctgcagagaacagggaggaggaaagctctggtgcccaggagaatgagcagcttggcgcccttgagaggattaagcgaaggcgtcaatgatctgccactgtcaagatgcccacaccattagctggtgcccttaacgatgttgtagctgtaacaacttgtaaacatgattttgagtggtgtttttgctcttgtacaagaatttacgggagttattaatccgttgttgatctgcgaccattttttcgtgtactaactattgggtacattccccgctttttattccctcttttaggctagaaggcaatcatgcatgatgcattattcaattctttttcttttttgcgaggaaacattatttgatttcgaaagtgtacactgctactggagtgttgaaccctgaaaaatggaactgggagactgcatttctgttgctgtcccc

SEQ ID NO: 38235 - DNA, 441 bp, Oryza sativa
  Clone ID: PAT_MRT4530_41891C.1
cgcttatccatgatgattaattcacactgtacatttggtatcttcgtagtcaagagtaagattgctagctagctaattcaacccaagatcacccgtcaagagttatagtggagttggttcgcacgcgcacggttgatcttgtaacagcgaccgtcgtcttatcgttgattaaagctgcatcataatttgatttgataattaacacatgaattatattactccgtaggcaagcagcagccagaagctgtttaattactgattttgatgtgttcgtttaatttgtggatcgatgcaggggatgtggtggtgccgtacatggggccacggccgccggtggggatccaccgctacgtgatggtgctgttccagcagaaggcgcgcgtggcggcgccgccgcccgacgaggacgccgcgcgcgccaggttcagcacgcgcgccttc

SEQ ID NO: 38236 - DNA, 1239 bp, Oryza sativa
  Clone ID: PAT_MRT4530_41892C.1
atgtgtctacggatgggcaatggtgcttcgttgtgttctgggtcgtgccccgcacgccatcaatcaaggtccggtgggcgaatctcaagaaccgcctcatgtcaatgtgcccgtcaaattacccaatgactttctaccctgagatcacccagccaggcccctcccagttctaccttctcaagcttttctcagctgatcgcaaagggctattgcacgatgttacgcatatattatcggaactagagcttataatccacagagtgaaggtgtcaaccacgccagatggcagagttattgacctcttcttcatcaccgacggcatggaattattgcacacaaaggaaagacaagaagagacttgttcgatgctgattgctaccttaggtccttccataagctgtgaaatcctattagcagaagggttccagcaaggattctcttctctcccaccgacaatctctgaggagctgttcaggttggaactggctgatggtgacaactgttcaaggtcaatttgtgcggagatgaaaagagtgcagaaagcaaccatcaactttgacaataccctgagccccgcacacacactgctccaaattaactgtgctgatcaaaaggggctcctttatgatattttgagaacaatgaaggactgcagcattcaggtaacatatggccgattctggtcagacaagaaaggttttcgagaggtggatctttttatcaagcaagcggatggaaagaagattattgatcctgagaaacaggatgttctcagctcacgcctgaggtcagagatgctccatcctctcagggtgatgattgtcaaccggggtcccgatgtagaactccttgttgctaaccctgttgagctatccgggaagggacgaccacgtgtattctacgatgctacatttgctctgaaagcgcttgggatctgcattttctctgctgaaattgggaggcaggcagcatcagagcgtcaatgggaggtctacagattcctcctggatgatagcagtgagttcccattgtcaaacagccttgtcaataggaaccgtattgtcgacaggaaagagctggcaatatgtgtaacaaaggagcggatgacatacccagaatatgttatttggagttacatactctgatgatacagtcagtatccaaactgttccagttaattaccaggcgaacgctcagactaggactactccaggtttgtcttggccggtgataaacttg

SEQ ID NO: 38237 - DNA, 325 bp, Oryza sativa
  Clone ID: PAT_MRT4530_41893C.1
taaaatgtgagtatgtattccagcaggtcatccttgcctaagctttttgaaaggatctccattcactactttgccacttacgaggaaatgtgcaaatatctggttaagttggaccactcaatgcatatgccctttttacttgatctctaatttcagatggataatcaatttgtttccgtttccctggatcaccaatgatatccatatgactaaactcttctctaggcctctttgactgacttgcaatctcattattgagtggaggatcgctggtatttgtgttacttgaactagaataatatgtgagcaatgttctttttgacat

SEQ ID NO: 38238 - DNA, 1110 bp, Oryza sativa
  Clone ID: PAT_MRT4530_41894C.1
atggctatgccgctgccgccgccgccgccgcctcgtcctcctcttggacggggacggctcgtcggagtaggaccagctccagcaccagcaacggcctcccaatccaaccgcccagtgccccccctgcagctgcctcgctgccgctgccatcgctcggagggaccctggaggacgacggcggcggcgaacgggaggaggcggtggtggtccgacgaggacatggaggaagaggacgacgaggagggatacggatacgacgacggcggcgcgccaggcgggtcagcgcaggagctgttcggcgagccatggttttccaagctcttccgtgcgtacggctacgtgctgccgctgctgctggcgtccatgctggtggccacggggcccagagctttcctcatggccatggcgctgccgctcgcccagtccgccatctcctgggtcgtctccttcttcaccaccaggagtcgtcggcagcaggaggaggaggagtcgtacggatacgactacgatgacgatcccgccttccaacgccgagaggaagacgacgacgacggcgactactatgatgccggggcatggcaatggcggagcaggagccaccagcaatcgaccgaatccggctccggttttggaggatgggatgacctcctctacgacgatgaggagaagaaggagcaggagagctcagggaagaagaggacgccaccggagcccgacacggcggcggctgctgccgcctccgatctgggactgggattgcgggcgaggagaggtccacgacgcagcaatggcggcatgtcgcgaggaagaagcagcagcagcatgaggaaccaaaccatgaaaattgagatgaaatttctggccttgttgtctactgatagcaagaagcatcagacgctgatgtggacaggcagaagaactgaccttcttctccttctccttctattccttcgccgtgctggcgctgttgttctgcctactctttgtcagtacagcaatagtgcactacagagagagaccgaccggatacggaagaaggacgagaagcatagcagaattaatcgtgacggacaacaagcatccgaaattaggagtgctggcagtgcatga

SEQ ID NO: 38239 - DNA, 153 bp, Oryza sativa
  Clone ID: PAT_MRT4530_41895C.1
atggcttccttctcctcaaggcgtgatagcctggtagtgcgcgatggtgtcgggaaggcgttgaggcaatggggcactgctgaagctatgagaatggaggagcatgatggaggtggcacggaaatcaagaatatgttgataagtgacgattaa

SEQ ID NO: 38240 - DNA, 201 bp, Oryza sativa
  Clone ID: PAT_MRT4530_41896C.1
atggcatggcagttatccaactacaacatccacgagtacacgcgctgccgtgtgcagcggatgccttctgcgagaaccgtgcccttggcgacggcgttcgcggacgggaagaagcagctggatgtggcaaaacggcatgcggtggtgtactctctgtacgccccaaaggccaagagcatcatggagatgaagctacagtga

SEQ ID NO: 38241 - DNA, 3018 bp, Oryza sativa
  Clone ID: PAT_MRT4530_41897C.1
cggcacgagggagaactagtctcgagttttttttttttttttttttttttttttcaagtttcagcactgaaactatcgccaagttgaaacagaggttcaagacacaaataaccaacagatgcactaaatcttgcaaatgaaaagaaaaagtgggttcctagtgtttcctggctatctaaatcctctgcattaggttataggaatgaaaatctgactgtcgcaattctagtcccatgccctcgacaaggaaagatgagaaaatgaagtgggaaatatacatcaatcaattatatttagacacttgcatccctaccatggaagtcaataggtaaacatagctcttcaaaactgtaaagcaatggaagcctccaagtggcagacacatttttccaactaaaactgaacactgaaaagcctgtaagctgttttggtaaaacttttcccttgaccacctctgttgcagcactcatgaaatacacttgtatatcatgagcattgttttgctccttcaagttctgggcagcactctcagtagggaatcctcgcacagcaccaatagtccattgcgaaatgattccggcagcaacagcgaatctcagattcctctccaatgtatcctggtcctcatacatctcaggacaagacgtcaattttctaatagcagcagcaacaacagcatctccagaacctgtccggtcagttgtgtatggagttatgagtgcatcctccgtcccaatcacgcagccatgaaacttgggtgtgtagtagtggatcctaagtgttccgtatgtcacaagcaagagttttatcccatcatgccaaatgggagcaatttcttcgggggtgtaatggtagtactgtggccagttccttgttagatgaaaaccatccagataatactgaggtggattggcacgcttatattgatagtactcgtgatcaaggaggaattccaactcatcccttgacacctctataatatcagcctcattccatgccttgtttatcaactcctttgtttcatcccttgacctccacaaaggcaatggcaagttaagatcaaagaatattttacttccaaatttcttggacagttcaattgctctgaagagtgtgctttccattgagggagtcaataggacctctgaattgaaatggaacactctagcctctttcaaaacatccacattgatctcagccttgctgagggagtcctcggcagcgctcttcaccgtctcagccacaagcctcgttccgccgctgccgtcctcacggtcccggaacccgaccttcatgcgcgcagtggccgtggccgcgccgtcgtcgaacctgatggcgcgcgtctgcactcgctcgcagttcatgcggtacacaagctcgcggccgaagtcgtcgtcaccgaccttgccgagcaccgcggcgcggccgccgagcctggtgagcgcgatggccacgttgctcgccgcgctccccggcgcgcgcgcgaactccggaggctcccactgcagatgcagccacgtggagtatatgtccgggtgcatctgccggtccgacacccgcaccgtcgggacgaactcccaccgcggcgccccgaagcagcacaccagcggcggccagtcgtacggcgaatcctccccgtcttcggagtcgctccccgtcgcctccgcctccccatcctcatcttggaccgctctcttcgaatcctccgttccggggctcgccgcccggacctcatcctccttctccgccgcctcctgctcggcctcttgcttggatttccttgtccgacggccccgccgcttcggcggctcctcctcgccctctgaatcagactcctgcgtattcttcttggtcctgcgcctcgtggtcttcgccttcggcggcgacggggatggggacttcctgcgcccgcggcgtggggcgggttcaggggattccggtacggcggcgccgttcggggagcagcgaatatggcggcctcggaagatgctggggtggatgcgcgcggcgaggatggtgggcttggggaataaggatggcaagatgaggaatggggaggccgccatggccatagccggctctcttttttttttttttgtttttttttttttttcccaagatatgtccattattcgttgatccaaacatacatcagtacagaacaaagtcaaaaggataaagaaatagagaaatagctagggcctaggagtaacaaggacaccctgataaaagtacatgcgcatcagtacatcactagacaccaacaatggagtctcgccgtatcactcgacggggaccatgacctcgttggtgcgcagcggaggcagagtaaacggcgggttgtaccgcgccagcacgaaggggcccttgacggtgaacccgtccttctccagcgcggccttgagccactccgccttctccttcaccaccttgtctccggtcaggccgctgaacctcaccaccccgtacttcctctcccccacctgccgcagcaccacccgctcgtccgtcggccgcggcgcctcctccaccttgctgtacttggacggcagcagaaactgcattgtcatctgacccttcccctggctgcgctcttcggccgtgatcaccggcgcggtcatcgccaccggctcaggctcaccggaggtgatgaccggggccgtcatggcgatactctcgggctcgccggaggtgatgaccggcgcggtcatgtcgatcttctctggcttggtgttctgcgggttgccgagggcgccgatgtagttgccgaggacggtgaacccgccgtcgcggtcgcctttcatctccgcggggtcgtaggtgacctcggcgacgacgcacggcgggtacttgcggacctcgtagccggcgccggtgtggagcacctcgtgcttgggcgtctccaccgtgatcttgcccagcaccatccccatggcggtcgacggccggcgagatcagcgagcaggtgaaaattaaggtcggattcgatctcagcggcgggggtgggtttgttctttg

SEQ ID NO: 38242 - DNA, 610 bp, Oryza sativa
  unsure (1)..(610): unsure at all n locations
  Clone ID: PAT_MRT4530_41898C.1
tctggccacnccgttttcccgcctggatagccggcagtgatgctgcaacgcagtgtattgtgaggttagctcactcattaggcaccccaggctttacactttatgcttccggctcgtatttgtgtggaattgtgacggataactagtgcaccccccgggctgcaggtgaccctgagccccccgtgctcgccgacaggcctctcctttcccgggcgcgcggacgccggcaggtacccgcccgggccccccgggtcagtctccacgcgtgccggtggaagacgtgcgacccgaccgccgaggagtatctgccaggagcaaggccgagtatgaagacttctagatgtttcgtggcctagcgcccaagcctctgcatgtggaaatgaagttgagtgtgcctaggtgtctgttgcctagtggcgtagttgcatttgtgcgctttagtttctctgcagctgttcgctttttgcgcacgtcgcttttatggttttctgtaatgttgtgttgctcatctatgggcactgtccatgatggcaacttatgtaaagactactacccagtgatgtaataaagcagtttactttgattccacaaattaaaaaaaaaaaaaaaa

SEQ ID NO: 38243 - DNA, 377 bp, Oryza sativa
  Clone ID: PAT_MRT4530_41899C.1
gtgttatttatgccgtactaaagaagcctctggcggcgggtattggttacaacaaccggaaggctcaaaaggaggccatcaccattaagacggctaagaatgacaagacgacgaacaagaggcacgaggaagatggcagtgtatgcaattggggtgtgtcggttgatacagacaaagaacctggtgctgtgatcctagaggactcacatgagcatcaggggattttgggggacagagagagggcaccggatgttggaatagctcctgaaagccatgacaacctaaccggcgactgacacagagctgcatataggtagctatgactagatagggattggctgcttgttgagaaaccaaaaatttgtgcaataccctgc

SEQ ID NO: 38244 - DNA, 200 bp, Oryza sativa
  Clone ID: PAT_MRT4530_4189C.1
atcaaagatcccttatattaggagacggagagagtactaattaatgtacactggtttgcttccttactggtagcaatagattcaaaactgcacataggagtataggtcaataccccaactgtaacctgcacaattcggttcttgcctatggaattctacaggttattcaaaataggtttaattaccacaaatcagtatcg

SEQ ID NO: 38245 - DNA, 7701 bp, Oryza sativa
  Clone ID: PAT_MRT4530_418C.1
atggagatggacttcgagtcgatgaagcggcgggagctgcaggcgctctgcaagcgccacggcctctccgccggcggctccaacgccgccctcgtcgcccgcctcgccgcgaccctctcgggtgccgcgacggaggagaaggcggtcggggtggtggtggggaagggatgcatgaagcggtcgggcggcggtagcgagggttttggtgcggccaagacggtgacatttgctttggaggaagaggaggaggtgatggaaacaagggggagggggaggaggggacggaggccccgggtgatgtggtcgccagttgccgcgaagacaagggggaggcagaaggccggggaggtggttactgattcagaagcaggaagtggaggaggggggaagcaacgcaggggtgctcgtgttggtggtgatgctgctgctgaaggagagcctgccgcagaagccccacggaggcggtctaggagaaatgcggtgaattcgagtgatgctgatggtgctgaaggagatggggcgaaggaaggagaagcagttgacaacaagcggaagcagaggcagaagcagaagcaggtggctggggatgttggtgaggagattactgtcagtgtgcaggatggagtttctgttagaagcacgaggtcgagttgtctcctgacggcggtcactgtcgtgcagtctcctgttgttgagaagaagagagggaggaagaggaaaggagatgtgaatgagcagatttgtcttgaggttcaggaacattgtgctgaagttcaagatgatggcagaaagctcaggtcagggtcgacaagtgtcactacggtgtcacctcctgttgttgactgcaggagaagcaggaggaaggcagaggatcctattgtggagaaggctgctaaggtgaatgtatctaccagaagcacaagatcaagttcagttgtaactgatatcgcgtcacccattgtcctcgagaacaaaagacagaagaaagaacatattcacttggatgttgagcctccaacagttccagtggtgcaagcaaatgtggctcctagtaccagatctttgaggaatagggttgttcaggttaaagacaatgtgatgatggagaccgaggtctgcaagaagctggaaaataagagtctgtcctgtcgaccatctactcagtatcaaacttctgcttttgttgaggaagaagatgagcaaatggttcatgatcccagtattggcccaaaattgaggcggtcgagcagacgacaatctgtggctaatgaattgttgttaattaattcaatttcagaaagcaacaatgtgagtagagcacagacagatgccaagggcctgaaaacagcccagccattgatgcacaatgctgctaagactagcatgaaaaatgttgtggtcaggaaagatgagaacgctggtttgacaaagaggaaaacaggaaggggcagggataagatagctaaaagtgttggcaaagtttcactctccgagagcagtggtgaagctttacctacagaaatgcagcaagaagtaattgagcctttgaaaagatctaggcggaaatctgttgtttctaccttgcttgaggaaggaaccaagtgtatgcatggaagtgttagaggagatgtcctggtgaagcaaccaacagaaaatagacctgttaggcgatcaactcggaaatctgttgtctccgctatgcttgacaaagagagtaatggactaactacagaaatgatgcctgaagcacatattaggagatcaaagcgtaaatcttttcttcctaatatgctcaatgatgagaagatggatgactgtgagatggtcagggatgaggaacataagcactctaagggcaacgatcctgggaagaaactagcaataaaggaacctgctagaaggacaacacgaaaatctgttgtgccaataatgtttgacagagagacaaagggtcttgcagcagaaacgaatcctgaagtacatgtcaggagatcaacgcggaaatctgttgttccaaatatgcccaatagtgagaacaagtaccatgatgaattggtcagaactgttgtaggtgtagctgtggcgaaacagctggaagcaaagaaacctgttagaagtaatgggggtggctttaaattgggaaaacggagaagaacttcaatggaaatgtcatgttcatccggtaataatacaaaagtttctgacaggcaaaaatccaggaagcaacagaaggtacaaactccagcttcagaaggaccttgtgcaaaggagagtacgacagatgctttgcaagaaattatctctttcgaagagtcaaatgctgatgctgatgatatggttgttagggaatcaacacaggatggaaatgaaggttgtcatgaatattgcaatgattccagtgccagcacccaagaagttaatcgggataatgccactgtagaagagactcacagagagcagtgggtgaattcagaagtacatgggtcagattctagtgatactgcacatgaatatgttgaccttagaactgaaagtattatccatttatctggaataagttccgaggagttgggccaatcatcaagtatcacagaactagtttcacgtgctggtatttcatcagagaacaaagtattgctggatgatgctgaggctgatttgggtgctgctgtcgcacaaactttgaatgccaattccaatgaagaggttttggaagatttagataatccagcagctattgcagaagaacttagttctgccactgctttaccccttttagatgctgaagatcacacagataaaaatgagatcattactttaccagagcaactccttggggccttgtctaaactctcgagtgtcgatcagttaccgccttgtactagtgatgctgatgcactagttattgtaaatgactccaatgcttgtaatattgcgaactggactgctgtgaagggtaccgatgacattcaaaatgtggatattgctttgtctggtgatggcattgtagcttctaaatcaatgactgttgcagaagttctatcgtgcgctgtggctactgtcttggagcatggcactctggctgagcacgactttgagaggacttgcatgaagaatggtgatgcttctctatctttatttgattctggttcacctggaaatgaaacagataatggttcattcaaagctcttgagttcgaattaaattatttacctactgtgaatgatgagagaggaaaacaagctgaagaagataaatgtccagaagtccacagtgatgctgcttctgaaaaaagcaatcaaggtgatgatttgtgcaaaaacctcagcactgttaagggagagagtccactggcctcaaattttcatgtagaggatgctgctgagcacggaagtatgcttcaaattgaaattaatgctgagcgaggctcttcagatggaatggactcctcatatggtctgaagtctctctttgcagaagagggtaatcaacaacactatatgatagatgatgggaatattgctgcagaagttgacagtggaaacaagttgtcagacgaaaggcattcttcacttggtctgaagtctctctttgcagaagagggcaatcaacaacacaatttgatagatgttcagcatattgctgcaaaagttgatagtggaagcaagtcgtcagatgtaaggcattcttcatttggtctgaagtctctctttgcagaagagggtaatcaacaatgcaatttggtagatgatgagaatattgctgtaaaagttaacagcggaagcaattcgtcagatggaaggcattcttcatttggtctgaattctctctttgtagaagagagtaatcaacaatgcaattttatacatgatgagaatattgctgtaaaagttgacagtggaaacaagtccattggcttcaaaacttctactttctacacgagagtggattgtgatctggaagatgctgctgcacaacttattggagaaggtgacaatgcacttgatgtggagcaaggtgttgcttatgataaaattatgctgtcacccttgaatgacattggtgcctgctcatcatatggaagaaatccctcgattgggcaaagatcactttatgcacaagagcgcggaggaagtaatgtaacaaatggtgcatttgttgctgctgaaactgatggcaaaaaagatttagataacataattgtgggccttcatatggaatcagatggtatccatacagaaatggatgtggggcttgtttcagatagccctgaaaataagctagctctggaaccagttcagcagggtgatgcagaagaaggagtgcattcagaaaacggagttgatgaatcaaatattgatgaccaaactcctgtactagaaccagttgaagatcatggcgctcacgtagattctattttagttactaaaagtggagagggtaatggaaatgaagagtcatcaaaggcaagctgcgaagagcaggttgaatgtggtcagttaggtttattcaaggatgcaaattgcacggagacgactaattgtcagggaattggttatgagggtgaagtctgcaatcgtgtacattctactgatattagtactctctgtgaaaaatcagatgataatggatcttctaaggatgctaagggtaatagtgatgctcttctgagcagctcagtgatagtccctgccaatgacaatgatgtacatgtcagttctaacatatcccagctagaatcaactgattgcttggatgaaccaacattgtttttcaatatgggagtgcatctgggccccaatgagaaatgcaataagcgcatggaagaccaagttccttcaggagtcagtacaattgatatttctgtacctgccactgctaatggtttagaaagtggattgacattgctccctgctaatgaaacattgaatttgcaagatgaccagcataactctgagctagagagcacacaagttggccaatctggcattagctgtgctgaaaaaagtactaacattttggagttagggactgtgaatgttgttgataaaggaaatccatgtgaccatagtttaccacaagattgtcctatggatcattaccagcaacatgagggtttgaatgacattccagtggacaaatctctcgaagcatctgatatgtacttagggaacagtgtttttagaatcgagggtataattgagaagccagccatcaatttagcaactccagattgtaaacttcaaggaactttattggagttttcgctgaagaatggtgctgaaacaccaaattccaagcactcgccttttggtctacagtcgctgttctcagaggaaaacatggatgggtccagacaacaggacaatgctggctttccatgtgctgaaaacaaagtggatgaatcaaatagttcacatggtaaatgccgagttgaaaaacctgtttctgcagaacctgttcgatgcgaaggttcccatgaaaatttagggatcgtcaaagagatcggcagttgtgtttcgtcatgccagcaagttaatgagcaagaagagttttcggaggccagccacaaaaaaagatgggttgcgcctatccagttagatttagcagatgatgtgaatcagacagaaagggagattatttcttccgagttggtttgtgagaaggaagagaaaatagaggtcatgtcttcagatattgatacccccgtcagggaatcacatggcagtgaactttctacacatgcttctccttttagtagacctcagatttgcgatcctcgaagcagccaaatttttgatgatgcacatccaagttctaacccttcacagttggaattaccagatgtgttccatcatgatcatgaagtgctatgcagtgaacgcaatgatcaaatcctcccaggcatcccttcaagtcccttttctgaagctgtatcaattaaattttcagaaaatgaaacaatgttgctagaagctgcagaaacgtcagaattgctagatgaaaagcttaaccctcagccaggatgtgatgaacttgcagagcacgaccttagcggctttaaagacaccgaggactcttcagatactgaatttatgaggtatagtatattccgttttcctgcagatggtcagatagattcttgccaggaaatggaacttccaaatgaccaatctgctaccaaggctcgtgaagaatctgccttttctgagggcgagagtgttgtaggatcttgtgaaacaaatgagcagaggtgtcaagtggactgtaaagaagaaaacgagcacaaggcagatcaagtgacgccatgcattccaacatttgacttgagtggagctgcatcaactaagggatcagaaggtggaattactctgttgccagatgcaaaattgtcagtgtttacagccgtgcagcttaactctaagctggatggagagcacaaccttagcggtggtaaagacactgggaacatttttgataacagatctgtggatgacagttaccatgagcaggagcttctcaatgacctttctgctccaaaatctctagtagaaccttgcagtgcctgtatggattcatgcaatgggcaggcgattctagaagatatgcctggacccaaatctcctgaagattaccaggatgacagcgtttcaggatcagtaggtgacatgtttgaaccttcaccaactgaaagagccgaacaggaaactacgctggtgtctcctgcagaaatgttggtatttaaattcgggcagcataataaccctaacctggtgagcgttggaggacacaacgatagctgtgatgaagacactgctgacatgtttagtactgaacctgtggcgagtaataatcaacatgagcaggagcttccaaatgacgtatctgctcccgtatctctcaaggaatctgcaatttgtcaggaagacatcagtgttcataccgaatcttgccctggaaagtcgcttccagttccagaagatatatctgcacctaaatctcctgaagagcgtgccattcatcaggatgacagcgttccaagatcagcagttttgtgccaaactagcgggcgaaggcgcatagatgaaatcagcaccaagcttctgagcttcaaaatttccagcactgttaaaccaagccacattgctatgaacgcccctagcacgaagcaagtcgacaacctgagtgaatctgcaattgcccttctcaggaacagggagaacacgcttgccatcaaaacagaccggcctgtgaagccgaaccctgatcgctctgtcgcgaagaactcatcaaggcgaccgctgcagccgattggcagaaggcctgagggccactgaggcatgcaaccgatggtacattgctgttcttggtaagcatttaggttcaacgtcgagttgaagaataggagcatatatgatatctgacaacagacaggaaatgcaacacgatatggtgtttgtttccactgtgtgtgctactctctgtcccagtgacgaagtgccgtgtgtgttttggctgttttattgttccacagaaggaactgactcagaaatcatccgcatgatgatctttttccttctttctagactcaatcattgacgtgtgttgggtttttcttatgtactctaattcaagtatttcgaacagaatggtatttatggattgtgctgtgtggtcaacaaaaaaaaaaaaaaaaaaaa

SEQ ID NO: 38246 - DNA, 1257 bp, Oryza sativa
  Clone ID: PAT_MRT4530_41900C.1
atgatgaacacgcacatgaatttgaaacgaacaacgaggctcccgttcaaatccgtggcgcgctccgcctgcgtctccaaggattggcgcgccgccgtctccgacgactacctccgccgcaggctgccgctgctcatgaccaccgtgtacttccccgacgacgacgctgtcgccgccggcggcggaggtggaggtggcccgcggttcgcgtgcgcggcgtccgacggcaacgatggtcaccgcctcgaggactgccacctcgggttcttgccggaacgcggcggcgttgtggtatgcgacggctgcaatggcttgctgctctgtcgatcgcccggcacgccggagttcttcgtcgtcgacccggtgacgaggcggtgggcggcgctcccggcgccggcgaaggcggcgacgctgtccgtgctggcgttcgacccgtccacctcgccggactaccgcgtggtcaacttcaccgggtggcgcgaccgcggcgcggcggtggaggtgttctcatcggcgacgtgggcgtggacggcgcgcgacacggagttcggcggcgtcccggcgagctcgctctccggctcgatgcactaccacgacggcatcctctacatcctcgcctccgaacccgactgcctcgtctccctaaacctcgccgacttctcatccacggcggcggtgatcgacctccccgagccggtggacggcggcgacgcccacgtcgcgcactccggcggccggctgcactacatcttccgcgacggcgagcttctcaaggtctgggagctcgacgacgacgaccaatggcggccgaagcatgccgtcaaggtggaacacctcgcgcatggaggaggcgaggtgaggttcttggcgatgcacccggaggaggaggacgtggtgtacacgtggtcgccatggaaggtggtggagcacgatctgaggaggaagacgacgacctgccattgccaagcttgggagtttggcgacgacggaggctgcgagcgcggcggaggaggcagcggcgaggcggcggcggagaggcggggcggtggagaggcaagcacggcggcgaggatcaaatcaactggcacgctcatacattcgaaggcgagctttggacctgcactggagttaagcagatctcccaggcctcgtgttttctgtcaacagcagcgtgagctcccgccgccgctcgcctcctccgccgcaccctgccgccgccgctccctatcccccgcctactgccgtgcgcctgagtga

SEQ ID NO: 38247 - DNA, 274 bp, Oryza sativa
  Clone ID: PAT_MRT4530_41901C.1
ggatcgggagatctggctgcaagctgcaagctgcttagtgcatggtaacaggggccaatgttgagatatgggtgatgcctcaccactagggtactgatggtcgcaacaccaagtgaccaattaccacccttgcggtggtcttgtcaggagttttaacaacgtatatggttcggaagttaaaataagctcagatatcatcatatgtgacatgtgaaactttgggtgatataaatagcactcaaggtgtcgttcatattaaaaaaaaaaaaaaaaa

SEQ ID NO: 38248 - DNA, 1177 bp, Oryza sativa
  Clone ID: PAT_MRT4530_41902C.1
aggaatcacgaaacttgctcacttctcacagaaacttctaatatgctcagaaataaacaaaggtaataagaaagacgagcagatttgaatgcgtccttcaaatctgcactcagcaaaggcaacgcaactagactgatcgaagcttatcactaaaagaaaattttaagaaaacacaaagcaattgcagagaaaaatacaaccaaagaaagaacggaggaacattggtctggactctggaaagcttaagctcatgctggctgagatcgaggggttgaggcagcttctacttttgtcagggttacagatcgcagtaattccagtgtgctcgataatccaagaaaatgtgagaggatcgtgttggctgaagcctgaacaaggaaaacatctaaagatagaacagggctctggccaggagatattccctggtagtacggcactgcagatgtagtgagggcttttgctaccaatgcccctacagttgcctgcataccaagaattgcagcacccattccaagaacattgagcacaataccatttttgagattttttaccacatcggcacgtggaggagcctttgcaggtttgtttgctgttctcttaagcctttgtgaaagacggatataaccaaaagcccaaaagactgaaataaatgccgcaacaataccaattgaagttgcaaagaatgtaaagggagatgttgcattccctgtagcgactgccgagaatgacaaaattcctgctgagacagttgtgcacactaactgagaccagaatcccagggtgcccaaagtcttgaaatactgtgctgttttttctagcctcttgctaacctgggcgagcatggcgcgctcggcctcgtcctcggcgggggaaggcgcggggtcgggaggaccggcctcagccgccgccgccgcagcagcagcagcagccgggaggcgcgacgcagcgcgtcctccccagcggccggcggcgaaggcgtccaccacacggagagcgggggagcgcggcgccggcgtgaggatcgaggtggctcgagggggtagagacggccgcctcggagcggggaggggcggccgtggcgccgccgccggggagagcaggagcgcctgcatccttgcgtaggtttaggcggtctagaggtttctctgctccggcgaggaggggcagcttcgtactt

SEQ ID NO: 38249 - DNA, 639 bp, Oryza sativa
  Clone ID: PAT_MRT4530_41903C.1
atggaggccgtgacagcgataccagtatttgtcagggcggaaaatgacaccgacactgacaaggcgacggcggccgaagcggcggcgggaatcggcatcaccttggacgtcttctcgtcggagaccaatgaatgggcgaagcgcgatgcggtgttcggcggcgttgaggcctcgttgctgtcccccagtcccccaccatgcactatcgcggcggcatcctccacgtgctcgtcaacctcattcatcactcctttgaaccactcaaatgacaacggctcccgggtaacccaggaaaattgtgcgcagcttgttctgtatgccctcttcttgttgttacttcttgttgacacactgaagctattggcgacgaccgacgacgcccggcaagaaagggaggagcgacgggaggtggccagcgatcgaggagggagccgcggcattcctcagcggtggaagaggtggcggctatggcggaaggcggttgacgaggcagaggaggtgcagccagcagccgccacccctgtggaggaagaagaaaaagatgaagactcgaccgccacgtcggcagcgtctgcacccgacacgagcgaggagccggaggaggaggaggaggccccgacgtcgaggcggaggaagtga

SEQ ID NO: 38250 - DNA, 559 bp, Oryza sativa
  Clone ID: PAT_MRT4530_41904C.1
accaagtttggatgctcttactcaaggttaccggcaatatcagcctgcagccgcagtctctatgctgcaagcatacagatccttagcccatgcggtgagttcgtaagccacagtgcagcacagtgggcaacccccttctgccaatcacccgtgtttcaactgagaaactgccaagtcatgcagcaccagtgctgccaacagctcaggatgatcgcgcaacagtctcactgccagccattacaagtgttcaggcgattgtccagcagctacagctacaaacagtttgctgggcgtcttacttcgatcaggctcaagcttcaagcccaagctatgttgccccttaaactgcccgtcaaatatccggtatctacccaagctacaacacggctccctgtagcattcctaccgtcgttgtatctggtatggaattgtaccgtatagtagtacaggagagaaaaataaagtcatggcatcatcgtgtgtgacaagttgaaacatcggggtgagacaaatcggcaataaaaatggtcagccaaattgaaaaaaaaaaaaaaaaaaa

SEQ ID NO: 38251 - DNA, 816 bp, Oryza sativa
  Clone ID: PAT_MRT4530_41905C.1
atggcggtcgagtcttcatcatcttcttcttcctccacaggggcggcggctgccggctgcacctcctccgcctcgccaaccatcttccgccatagccgccacctcctccaccgccgaggaatgccgcggctccctcctcgatcgccggccacctcccgccgctcctccctttcttgccgggcgctgtcggtcgtcgccaacagcttcaggtgtgtcatagagctgcacaaggatgcgccgtgcgcggacaactctactgtcgatggtgcaagctctgaaaccatgcctcctcattgggactttgggagtgaaaggaagaaggagatagagaggaggctggcaccgaggtccgtaagcacgacgcggtcgggggtacacgagcacgtggaggacgccgccgcgatagtgcatggtaggggactgggggacagcaacaaggcctcaacgttgccgaacaccacatcgcgcttcgcccattcgttggtctccgacgagaagacgtccaagggtggcgcagcgggcggtgtggaggggcgtgacaagaggtacgagggaagggggcggcagccactggcgggaggttacaccgtggaatgggcctacttcgaaatcgagctcctcatcggcgtcgccgcagaccgtgccaccactaacgaggccgagcatgttgatgttcgtagcgccgaggggaagatgccacccccatggcacccagatctgatggctagccgcccatcactgtcgggagctgaggaggtctactgcctggtgctcttcatccagtggccatcactctcgaggaagacgtcgctctag

SEQ ID NO: 38252 - DNA, 606 bp, Oryza sativa
  unsure (1)..(606): unsure at all n locations
  Clone ID: PAT_MRT4530_41906C.1
atctaccagtgggctacccagttcggcgaccgaatcgacgagaccgaggagatgttgaccgataaccgtatctggatcgagcgattgaggggtgttggtgttgttcctgctgccgaggctctgaacctttccttcactggtgtcatgctccgaggttctggagttcccttcgacgtccgcaagaaccagccttacgatgcctacgaccaggtcgagttcgatgtccctgttggaaccaacggtgattgctacgaccgatacctctgccgaatggaggagttccgccaatctctccgcattattcaccagtgtctcaacaagatgcccgctggccccgtccgtgtcgaggactacaaggtttctcctcccccacgagccgccatgaaggagaacatggaggcccttatccaccactttcttctttataccaagggttacgctgtccctcctggggagacttactcccctatcgaggcccccccagggggagatagggtgtttacccccctttccncggccgcgagcgacccttaaccatgccacattggggtctccggttttggtcacttcgcgggatcccctccccccccccagcgctcctttccc

SEQ ID NO: 38253 - DNA, 1060 bp, Oryza sativa
  Clone ID: PAT_MRT4530_41907C.1
gaaaattaatactgaccaatataagtacttgaatattgtctttaggccttaacgaaactaatatgagcttgaatattgtcctcaagcaatatgaaaactactaccgagtaaaagactgccggtactttttgagaactggagtaccataggttcaaactatcaattgacgaacatgggacatgtaacgcgagattcaaagagttgagcgaaaaaggcgagcatttaagcacttcacttcctggctccagcacttggatggaattcacatcaggagcgcacgcaggccattgagcatcatcctggcttcatcatccagctcgtcctcgttgatatcatcatcaaagcattcattctcctccgagaacacgacgcagtgaaggccgggaaccatgtaaccgtcatccatgtcatcagaggaattgcctgaatctgcaaaaacagggctgaaaacctgcaagtcatagtcatcgattgagtcatcggggagcctcagtgctttgattctggcgcacttcgctcgcagggtgtcatccatgaagacattgaagcagtggcgtatgtcgagggattcaagatgggggcagttgtcaaggatggcttccaatccttcattggtgatggtattgccgaaaatctgaagggagcgtagctgagtcatagttgctatccccagggcttcatcatcatcgtgcgagtcttcgaaactgtgaaagccatgttgactcagtctgaagcgcttaagctgtggacatgattttccaacagtcctgaacacatctgtcccaaaaacatttggactgagtgaaagctccagctcctcaagcagagggaacttctttattgcttttccaaaccctttgttagagacatcataacaagagatgaggcgaaggctcttcagacctggtgctgcgcggccgaggaagaggaggaagcggtcgcttccggccgactcgccccagaacgcctcgcaccgccccgcgctgcgcttgacggcggcctgcgccatcccgtggaggttcaccccccgcttggcgtcggcgttggcgtggccgcgcat

SEQ ID NO: 38254 - DNA, 2088 bp, Oryza sativa
  Clone ID: PAT_MRT4530_41908C.1
atggagcagcttgtgggagttcaccaccaccattcttcttcctcctccctctccccgcggactccatctccaacccacccactcccgcatctcctgcgcctcccttccagctccaaccggctccgcccaccggatcacccccactcctctcatcctgtctccaagctcctccgcgtcacccctcccttcttccttgtcctcctcgccgccgtctacctcctcgcctccttcactatcttctcctctcccgctgcctcgctccgccccaccaagaaccgccccaagctcctcctccccatgcccgccccctctccccctccccccgacctctttgagctccacggtggcaggatccgggcctggatcaccaatgtcggcgccaccgtcacctcgctcctggtcccagataacaatggggttcttggtgatgtggtgcttggattcgattccctggatccttatcaggagaaatgcagcacatttaatgatgcatgcctgaataacttgaagctggttactagtactagtaattacggttggagtgtatggggagagatgtactgtgaatattggacgattgtatttagcctcggggtcccgaatggcacttcaccttattttggctgcattgttgggcgagttgcaaataggatcaaggatgggaagtttactttaaatgataagcagtatagtctggctatcaacaaccctccaaacactcttcatggtggatttaaaggttttgacaaaatcatctgggaagttgctgaatatgtcaaaggggagaacccatcaatcaccttcaaatattacagtaaagatggagaggaaggtttcccaggagatgtttctgtcaccgctagatattctattctggcaagtacgacactgaagttggagatggaggctatacctttgaataaggccacacccatcagtttagcacagcacacctactggaacctggcaggccacaactcaggagatgtgcttgcacatactgttcagattttggggtctcagataacaccggtagatgaaacctcaatacccaccggtgagatgatgccagttagtggctcacccttcaatttcctgacagagaccacaattggcagcaggattgatcaagtccctggtggctatgatcacaactttgtgattgattgtggtgaagtgaagtcaggtttgtgccatgtggcgaaagtgacagacccttcaagctccagggtccttgacatttgggcagatgcacctggagtgcagttctacactggaaatttcctcaatggcattgtgggcaaaggaggcgcagtctatgggaagcacgccggcctgtgtcttgagacccaaggtttcccaaacgcagtgaaccaacctaattttccctcggtggtcgttcagcctggtgagaattcttgtaggccattttgttttgttctttctacgagcttgatgctgcagtggttgtatagctttcaaatactgctccacgtgacaatttgctactctgaatttacacgaatcagcagacaaggaatctcgtgtaggacttgcaggcaaggttcttttcaagatgaggttaaggacatagtaggaatggaaacagatggaggcctatgggatggtactgaatacggtggtgaagtgggtgagaacaaccacatgaaccccagaaattcaagggtctttttggtgacaatgtcgcccactcacaccagagttgaccgtaaaatgatgtttcacagcaactttgacttcacaatcacagcgttggctacgtggcgacaaccaccagtcggctcccgtgaagatataagaaaacgaaaagttgtgcttaaagtactctggataataaaacatcactacctcggatacacacaacaatcctctaacggtcattcaaggaccgataacaagagctcgtgcgcgacaattgaatttagaggaacaatgaaggggacaaggagacacttggagaaggacttagagccatggaggatcatcgaggacgtccaaagtcaacgtggaggcccaaaccaagtcaacctcgggtgcaattcggagtctaggaccagtctgtactaa

SEQ ID NO: 38255 - DNA, 429 bp, Oryza sativa
  Clone ID: PAT_MRT4530_41909C.1
cataagattaagatatatgataaatcattcattcattgcaattgcatctgcaccttcttcgcactcaacccctttacattcacagacatgactgtgaagactatggtcagaatgaaggtgatactgcagtagatgaacagcatcacgtagggactcgtcattgagttagtcacgaaagaaaaggctatgatggaggaaccagccagtatccagtttacaactgaggccaccaccacacctttcgtattcatcatgaagcttatgtacggccacacacttgaacccaaagacatgccgaacgtaaacatgaagaacataatggcgatacaggtcaccaatagtatcttatcctttgcatcagtgttcgctggatcttgctgctaatagagatacaggaatatgccgatcattgcatcaaggaaggccagc

SEQ ID NO: 38256 - DNA, 234 bp, Oryza sativa
  Clone ID: PAT_MRT4530_4190C.1
cgatttataactaggccaggggacaggcaagcaacagaggcttgtctaggatgcaagatccagacctagcgacgagaaacttacatgtaccaacataagccattccttatattgtaactctgcacgaaacaaagggatgaacccatccaatgtgcgtacgaacatgtccctgccagcgtaaacatgctgtacaccatcacgggagctccggtaggcacatgctaacagaatgcc

SEQ ID NO: 38257 - DNA, 361 bp, Oryza sativa
  Clone ID: PAT_MRT4530_41910C.1
attaaatacccgaaattgctctttttttaggggaaaacaccaatagtccccacttgggaggggtggaaaaagacaccaagacaattggatctatggtcgggcccccaaaaaaacagaaactagcactactactatttaataaaaagctaggtaccaaaacagccattcaagctggttgggtgaagccaaaaaacttaacctcccgaacgtgactcggtccaaagggggggccacaacccgggcatttggggggggggggcgcaaggaccctggggatacatggggagcaaaaaaaggggaagcctttggcgagcacgacctatttaggggggtcgaaggacaccccacacctgaaaagagc

SEQ ID NO: 38258 - DNA, 503 bp, Oryza sativa
  Clone ID: PAT_MRT4530_41911C.1
agattcttcaatctttcctcaattctatcagatcaaatgaaagaaagatgcagatggctgtaccggatcaagccttcggtgacccacgagcccttccacccccgtcgccccgcccacccccgcctcattggggatttcgaccgcaccaccaccgacaccgtcgtcacgcccacccagctgcgctggcgccccgtcgacgtgcccccccaccatcctcccctcgatttcatcgatggcctctacaccgtctgcggcgctggcagatgcttcctgcgccacggatacgccatccacatgtactctgctaacaagtgcatggacggatgcgccttttgcaacgctgacggctatttcctcattgtcccccagcaaggaaagctgttgatcacaactgaatgtgggaagctgctactcccacctggtgaaattgttgtcattccccagggttctcgctttgctgttgattcgcccgatggtcctttacgcggctatgttgctgagac

SEQ ID NO: 38259 - DNA, 2644 bp, Oryza sativa
  Clone ID: PAT_MRT4530_41912C.1
atggggggccggccgcgcgcgccgccgctccagacctgctcgcaaggaggccgcacacacaggaggatgctagggtggggggtcgccgtgttaacaccgagagccagctcgccgtcaccggccgggagcgcgaggaggcgggagaagtgcaggttggctctgctgatcggagatggaggggagggggaatcgacggggattttcgaccctagacactccgagattcgtgcacattacatcgttctttccactctggcaagctcgttgattttcaacgactgcgaccccgaccggttggctatcagggatgagaggagcaatcctcagcggtgcagggacaccgtttatgttggctgtggtgctggatttgggggtgaccggcccatggctgctctcaagttgctggagagagtcaaggaacttaactaccttgtgctcgagtgtttggccgagcgaactctcgtggatcgctaccaaatcatgatgtcgggaggaaaaggatatgatccccgagttaaggagtggctgtctgtgcttctacccttagccttggatagaggagtttgcataataactaacatgggcgctgtggatccacttggagctcaagaagaagttctggagctggcatctaatttgggattggaaataacagtcgctgtagcttatgaaacatcttcaggaaattctgtattttctaatgaatcaactggggtgcgacagggcggaagcacatatcttggtgtggcctcaattgtacactgcctagaaaatggcaaaccacaagttgttattacttctcgggttgctgatgctgcgctgttcttagcacctatgcttctggatttgtctcttccatatgccgaagtcagttacaaaggagaagtgtttgttggaaaggcagagggcagcggaggtcttctaagctacagcacatgtgcagaacagcttctgtacgaagttggagatcctgcaaactatattactcctgatctggttgtagatttccgtgatgtgaagttccagcaaatatcaaaagacaaggtccagttccggatggatgggctatttgagctggaagaacatgctatcaaatttgttgaagagttcattgcactttatacaaatgggccggctggtggtggcggcataagcactgggcagaagaaggaaataactctgcagaaaatactggttgatcgggagaagatcttttggcaagtaaatatgaagaaatcaagtattccttctccacagaatcaggctacgaatgctgacaagggtcaaatgtgtgatcaacaacaacacaagtgcccaagaagggccggtgataaagggaatgatttgaatttctccatcattccgcatttccctgatgacattggtcggctgagggcagtgatcactcgagattgggtcaagaatgctgtttcaccccttcttgattcctccttgtttcccgctgatcgagcaaatcaggttcggtatgatccgctcgagaatgtaagtattgagatttatgatgtcccaggaatcagctccctgaacgttgtcgtgaggaatatcctcgatggcgggaaaagaaaaattggtggagttctgcaggaaaataatgtcagcctaactggcctcatgattctagctgcctacttgattggcgaatttgccttccatccttgccaagatgagctccagaaatttgaaactgggaagaacaggaatggtaatgaacaggctgtttattcaaggaagaggaagaagacagcttccaagggagaggcgaaaaccggcaccggtaacgatgttactgagaagactggtgtccgagtgattgatacctcagctgaggtgaagaacagcactagtgaaaatacaaaccagaaggacggtgtgccaactctcaatactccaatggacaagaaactttcaggtgcagatgcatttaagcaggaggatgccttgatagctgatgatgctggagctggcctcaaggacagcaatggtgcagctgccagtgctcttgatcagcatgccactggtgccaccaatcctatggagaacaaagcagacaatggtgcagaagcagccctagcatcgatatacggagaccgtccgaatgggacatgtgtatcacatttgctgtcaagctgctgatggatgagatgccacttcctgaggatgccgcagaagttgaagagttcttcagacaaagcatcacaaatattgcaggatcttctgtcccctaggaaagctgcaagaaattacaggatgaagtggagatgcaactcatatctgcttaattagctgggagaaattacttctaaaacaaattagctgggaaaacttaataagatgcacttggcatctgtagtagatttgaaaggagataatttgcctgtgatgtttgttaatttgtgtgatggattgatgcggtaccttgtgggagaacagattgtccctttgtggtaaatgtcttgagtatgtttattgcggtgaactttcctgttttcttaacggttctgggatttggactgaaaggtccgaatttgggcgaatttcgcccatttctgtgaggttcgagacaccatttcactcccctcttcatctgaaattggtttggttttggtccaaaaaaaaaaaaaaa

SEQ ID NO: 38260 - DNA, 427 bp, Oryza sativa
  Clone ID: PAT_MRT4530_41913C.1
aggcatacacctaatttgagggccaccaatgcatcaagaatcccctattggccaaattgtaagtgaagggcgcacactttattgtttaaaatcacaagggcacgaaaccttccattccacccctaaaatacgtgtttaacaatcattatgcctgtaaatactgaggtgacacttattatttttggcaatataaaatgggatttacaccttatttatttttgaccaaagaaaatggaccaggggaatttaggggcatgattttctcttggcttttaagggagggattcattttttaacttgtaccaccagtgtaggagaaaatattatgttgcctacaaagggcacaattccacacattccatcattaaaagcagggtttacaaaaagaattgagacccaatattatttaaggcaccaagacttttta

SEQ ID NO: 38261 - DNA, 173 bp, Oryza sativa
  Clone ID: PAT_MRT4530_41914C.1
gtgaatccgcagaaagagcagcaagcgacgctgtaacgagatcatgcaaaaggggttgcaagagaaaaggggctggagcaagagaggccacgcagaatggaggaagatgagatggaagaagaagggaaatctggaaacagataaatagccagaactcatgacaaggtggatga

SEQ ID NO: 38262 - DNA, 846 bp, Oryza sativa
  Clone ID: PAT_MRT4530_41915C.1
atgacgtcaccaccggcggcggcggctcggcggctcggacggcgcacgcttgccggcgaacggcggcgcgaggacgcaaacggagggcaccaacgggtagagcgcgacgcggcgaactcaccggtgaccaaaagagcggcggaagaccaacggacggcgacgacgacgaggttgaaacggcggcggagatcgggtcgacggcggcgacggtgctccggcggtctccgacggctacgaagaggcggacgaggacggcgacgacttggcgatcccgacggcggtcttcccgagcgacgacgatgactggaacggaggcggcgcacggctggagcgacggcggtgacggcagcgctagggcacacggcgctagagcgctacgggcgacgagaggcgaaggcgagagaggcggcgggtagaggagagctcgggggtccttttaaaggggctaggaggcggcggcgaaggcccacggcgaccggcaacggcgaaggaaacttcgggaagaacgaatccgaaacaaactcgaatccatcgatttccaaaccgaagtagaggatgattccaaaagagaaaaggtggaggagatcccggagattgtttcccctctataaattcggccggaaacggaaagggagcggccggatttggaaggaaacggcggcggcggctcgctagggtttcgggcggcggccgacgcgaggaagacgacgactgacaagtgggacccacctgtcagcgacagcaagcgcgcgcgcgcggctgcggcctgggctgggccgactgggccgagggagagagagaggaggttttgggccgactttcggcccaaagccaaaagaagacttt

SEQ ID NO: 38263 - DNA, 207 bp, Oryza sativa
  Clone ID: PAT_MRT4530_41916C.1
tttccagctactacttccggtgtacatccttttttattatgagacacttcagatttggtctttgttcaaacctgcctataatatcaacaagaactaaaactgaaagatttcaacaagaatcatgtacttgcaaaaccattgttcaaaatccaagatttcatccctgaagtgttcgtttaaagtcggcatttctgtcggattagcttc

SEQ ID NO: 38264 - DNA, 432 bp, Oryza sativa
  Clone ID: PAT_MRT4530_41917C.1
atggtgcggcctccccttgccctccagatctggcgagtctccttcctccttcctcctcgtcgagctgccgcatcgaccggcgcgagagaggcgccggcggcaaatccggccgccagagggccgcaggcggcaaatccggtcgcgggagaggcgcgggcgtcggatctgtccgccagacagcagcgggaagcggtggtggtcgcgtgcacgcgcttcggctcgggcgtgggcttcggcgggtggcgacgatggcggcggcggtggtctcgcgggcgggcttcggcgggcagcgacaacagcgaccgcgcggcgaccacgacggcggccctgggctgccttgagcgggagctcgacgacggcaacttggctccctcaccgatggcaacctgttgttgttttgggattgtgactgtgatttacttctgcagctaa

SEQ ID NO: 38265 - DNA, 131 bp, Oryza sativa
  Clone ID: PAT_MRT4530_41918C.1
gttacgcgtgtgtgtgcaaggaacaaactgggggtgctttttgaagattgaggaggaaggtagctgcaccaccagaatggaactacagagttttcattggaggcttcctactggcttcacttagaaccttt

SEQ ID NO: 38266 - DNA, 627 bp, Oryza sativa
  Clone ID: PAT_MRT4530_41919C.1
aagtaaatcacagtcacaatcccaaaacaacaacaggttgccatcggtgagggagccaagttgccgtcgtcgagctcccgctcaaggcagcccagggccgccgtcgtggtcgccgcgcggtcgctgttgtcgctgcccgccgaagcccgcccgcgagaccaccgccgccgccatcgtcgccacccgccgaagcccacgcccgagccgaagcgcgtgcacgcgaccaccaccgcctgccgaagcccgcaccctcaccacgttgaatccgtcgtccgcgccactcccgccgcccgagcacttcccgctgctgtctggcggacagatccgacgcccgcgcctctcccgcgaccggatttgccgcctgcggccctctggcggccggatttgccgccggcgcctctctcgcgccggtcgatgcggcagctcgacgaggaggaaggaggaaggagactcgccagatctggagggcaaggggaggccgcaccatccacggtcagctccgcgccccgtgcaccatgtgcgtatcgctggcgtcgccgtcgcaggctgccggctgccgagaggagggggagaggcgtgggtgtgggaatggggaagaggcgcgggcgtggaggaggaggaggcacg

SEQ ID NO: 38267 - DNA, 735 bp, Oryza sativa
  unsure (1)..(735): unsure at all n locations
  Clone ID: PAT_MRT4530_4191C.1
ccacgcgtccgggcggtggcggcggcgaaggaggcgacgaagcggacgagggccaggtggtcgtgcgtggacagctgctgctggctggtggggtgcgtgtgctcggcgtggtggctgctgctcttcctgtacaacgcgatgccggcgtcgttcccgcagtacgtcacggaggcgatcacggggccgctcccggaccctcccggggtcaagctgcagaaggaggggctgcgggcgaagcaccccgtcgtgttcgtcccgggcatcgtcaccggcggcctcgagctctgggaggggcaccagtgcgccgaggggctcttccgcaagcgcctctggggcggcacgttcggcgacgtgtacaagaggcctttatgctgggttgaacatatgtcactggacaatgaaactggattagataaaccaggaataagagttcggccagtcacaggcctagtggcagcagactattttgttcctgggtattttgtttgggctgttttgattgcaaatttagctcgtattggatatgaagaaaagaccatgtacatggctgcatatgattggaggttatctttccagaacactgaggttcgtgatcaaactttgagcaggataaaaagtaacattgaactcctggtagcaactaatggtggaaatagggtgggtggtgatcccacattctatnggnggttctctattttctgcattttatgaagtgggttgaggctcctcctccat

SEQ ID NO: 38268 - DNA, 700 bp, Oryza sativa
  Clone ID: PAT_MRT4530_41920C.1
ccggccgatggcagttgcaggtcttgtacttgtacctgcattatcaccctgtgcaacaactcttccagtgtttcttgctgttggcaattcatcctccatgatgatccttgcgatcattgtgctcctctttagtaccatcacagtgatgacatccttggtggccctctcattctacggtgctagccagattaagttccactgggtggaacgttacgacaagatccttgtcggctcggtcctgtgcctcgttggggttttgacatacgtattccatcaccatgacggcgacgaacactctctccatgaacacgtgcaccggaaactcgtgggtctttagagtatagtataagattgcggatgaaactttcctacacttgcgagagaaaattgtgttgttccctaaccactgtaacgggtttgctgtatacagatctgattattaatccatctgaagtcagctagccggttttctggcaatgcaaaggttgtgctgacttgtgttgtagttgcctgtacataaaggtattctatcgtttgcttatgctgttatgcacccccaaaatcagaatactacttgcaaatgggaaacatacttgaactgcatccgttgaatttggagtatttggtggtaatgcagaactggaaatcagatttgattattgcgagtgatttactgtaacaaaaaaaaataaaaacacaa

SEQ ID NO: 38269 - DNA, 237 bp, Oryza sativa
  Clone ID: PAT_MRT4530_41921C.1
atggcctgtcactccaacagcaactcaaggacggtgaggcagatgaggaggctgtggtggcaaatgagtgggcagctctgtcgaatcaggcctaattgcctgccacatgagcagcgcgagcagcgcaggggctcaatcgtcgacatgagtggcttactcgctagcttcgtctccacctctcaccttgacgatgggaatcacgcctaccataccgtgctcaacctccacctctcttaa

SEQ ID NO: 38270 - DNA, 1946 bp, Oryza sativa
  unsure (1)..(1946): unsure at all n locations
  Clone ID: PAT_MRT4530_41922C.1
ggattcgtgcgtgatgacggcggcgccgctaatgccggtcgaggtcgtcgtggaatcgtcgccgacggcgaggatggcgtaccacttgccgccgccgtttgcgcgggaggtggtggcggcggcgtgcacctcgtaggcggcgatggcgttggcgaggccagggagtgccgggaagacgcgctgcgccgcccgggcggcgcggagggcaggagatgcgacgcggccctggcggcggcggcggcggcggtggcggacagcttaccgaaggagacgcggcggaggaggtcgtcgcggatgaatcgtcgccgacggcgaggatggcgtaccacttgtcgccggcgtctgcncgggaggcggcggcgtggtggacctcgtaggcggcgacggcgctggcgacgccagggagtggcgggaacagccgccgcgcctccgaactgcggctgcggcggcggcgacggcgacggtgtctccctctgatgaggcggcggcggcggcggcggcggtggctgaggcggaggcggaggtgcgggcccgctcgccggtggtggtggtggcggcggtagtgcgcccgccggctgcggcggcgaagccggaggtgtatccctctccctctgatgaggcggcggcggcgatggctgaggcggtggcggaggcgcatccctctccgtctgacgaggcggcggcggtgatgactgaggcggtggcggaggcggaggcggaggcggtggagctcggcctgcggtggccggcggttcgggtacctgatggccttgcctgcccgggcgccgcggcggcgccggcggcgcgcggcgggtggcgaagggagagctcgtcccacgccttctggagcagcctgaacgcgccggcggcggcggcggagcggttcttgtccgggtgcacgacgaggcagaggcggtggtactgccgcttgagggactcgtgcgtgacgccgccgccgccgctcgaggtcttcgccgatcggtcgccgacggcgaggacggcgtaccagttcctgccgcctgcgcgggtggtggcggcgggggcgtggatggtgagtgagttaattgcttcttggttttgatgcaaaaagaaataggtatcagatttttgaaaggagggctcggtggtggtggcggtgcgcgcgtgccgctcgtgcgccggagcactcgagtggtaggtggagactcacactggagaggtaggaggtgcgaggggccaacattcgcctaccgttggatgcgcgacacgtggcacccgttttgatgggccaagacttcctcgtaaatgggccgaagttaaattgggctttcggggaccgcctcggcgccggggccgcgccggcggcggcggagccagcaccggcagcggcagcttgtagatggacgaggcagaaggacaagttactggagacgctggtggcgcgatgcgccatgaaccggcagtgcgtgggcggctgggacgccatcgccgccgccttcggggacgacaggacggcggcgcaggtggagcagcggtacggggagatagccgcggaggtgagacgcgtcatggaggagccctgggatgcggaagaccctgcaattgcagcagcagccgccgccgtgccggcggcgccggtgaagcatgcagcggcggggccggggagcgatggcggcggcgaggaggggaaggtggtcgtggagaagaagtcagggatatggagtgaggaagagcaccggcagtgcctacgagggattgaagagatcgggcacggtcgttggacacagatatcgatagagtatgttccatcaaggacaccgatacaaattgccagccatacccagaagtattttctccggatggccaagcccaaggaggatcgcaagaggaagagcatacacgacaccccctatcatcttcatctgcctaatgctgctgatgctcacgctcaccaacaacaacaataa

SEQ ID NO: 38271 - DNA, 366 bp, Oryza sativa
  Clone ID: PAT_MRT4530_41923C.1
atggagctcgacgctgaggcacctacggcggtcgaggacatggagcgggaggcgaaaggaaggaggggtgatacagctccgccgcctcactgctcaacggggagggcctcgggagcggcggcggggcacggcctccacctctccgccgcgggccacgcgacgacgagggaggccggatccggccgccgcgacgacgggggaggccggatcagcctcctcgacgacggggcaggccggcgggcgacgacgacgaaggggcctgacggcggcggttgggggaggccggatccgcctcctcgacgacgggggaggccggcgggcgacgacgacgaaggggcctggaggtggcggctgggggaggcctga

SEQ ID NO: 38272 - DNA, 260 bp, Oryza sativa
  unsure (1)..(260): unsure at all n locations
  Clone ID: PAT_MRT4530_41924C.1
gcgtagtgaaccaagtgtagtntacgcccacagcgtctgtaagtaacgagcgtcacgtaatagggaaagcgtgggtacgccgtgtcaggttaccgggtccggaagtgtcaccggggtngaccctcagcgcggtccgcgtagtngtgaagtacncgtccgtagtcgttatggacattggtgtaaaataataatggaataatatgagggacatatccatgggtactcacttaacccacgcttaaaaaaaaaaaaaaaaaaaa

SEQ ID NO: 38273 - DNA, 692 bp, Oryza sativa
  Clone ID: PAT_MRT4530_41925C.1
atgatgaataagagcaatattggcttcggtcaacaggatgtaagtctcgcgtataccctagtaccaacaatccccatactatgcaaataccggaatcacgacatcaaacgtcgacagtggcacgccagtacgtctcccgacgagatcggaaccatcatcatcagcaatttgatccatcaagatcgctcaagcctcgagacgtcgttgcgggagatatctgttcgctatttttaaattagtctaataatttcgtacatacatccggcatgtatctacaaagaaaatatttttcagaaacaattgagcactcgagtaggttgtggtcgagtataccgcattatcgagaacgatctcgacaaatgcagagtcgtcacgccaacctaccaacgaatactgacgacctatctcatagcaccggccgtggctggactatttgagaaaagtggtcgagttacgactactatctggtcctcgaccagcggtgtagcgattctcccactatctccacttctagtgtattgatttcaggaaaattctattcgacattaacgaagactccatgtctctatggttctacacaccaagatcgactaaggcgagtacgacaaatattgacaaggcttcgtcgcaggctcacggtcgatggatctcgacaaggaatacggaatgaagagatggtgtacccgctgaga

SEQ ID NO: 38274 - DNA, 2088 bp, Oryza sativa
  Clone ID: PAT_MRT4530_41926C.1
tcaatgtactcccctaatcttggagtacaacaccacgacaacaatcacaatgtaaggccagaattgcatcagcaaggtggccatgatggcgaacggcagccgccaccacgcccgtgcaatcccgagcctcttgagcagcatcacctcgccggcggccaccacaaagacgaaccacgcgacgtcggccagcgcgagccccgtgatgacgcaggcggcgatggccgtcgtgcgtgccacgggggccagcacgacgtacatcccgaacgcgaacgccacgccgaggctcctcgccgagcacgccatgaacgacgccgagaagacgaaggagatcatgcgggtgcgcatgtcgacggcggccaccccggcgtacgtgaggctgatgacggacagccccgcgcagatgaacgccagcgtgttggcgatgatgaacacgtcgaaggcgtagcggccggccagcctcggcgcgccatcgtcgccgtagtcgcccggcggcgcgaacgccgccgcgaacgccaccgtggcgatcagcaccgagccgacgccgatggtttgggtggattccgtcagcttcttcccttcaacctcctcgtctaccttcttgttgtgttttttgagaaagagatcccatcggtgattaccttgcttggcgttggcatctttcagcaacttgtatatcttgacccgttgattcaatccgaaataaacaccaactggtttctcgatccaagaaatatcaagcggggtttctcccttattgttcgtcaagttgagctcgacctggcgtctctccatgagagggttgaagatccacatgttgccggccttgacggcgaggtgcagcgccgtgttgccgtcgtcgtcctgcatgttcatcaccgccggcgagaggttcccgagcttgcaggcgtacgcgaccacggactgccgctgctcctcgacggcgacgtggaggaagctccgcccgcggccgtcacggagctcggcgcagcctcttaggtctcgacgcctgcgctcccccgagcacagcccggcgcacttgcggtggttgtcgagcccgagcaggatggagacggccctgacctggccgtcgtaggcggcgacatggatcgggaacgcgccgtcgtggtcaggctggtacgccgccgatgggtcggcatcgagcagcaagctgatgacgtcgtggtgcccccatgacgccgcgacgtggagaggcgtgctccctctgtgccggtcggcttgcttgatgagatccttgttccatcctagtatcattttcgtcgtctctgaaatcgataaatcattgaactcatatcgttctttgcctttctgaacagcggcgtgcaaggcgttattcccgtccggtccagcgtacgagagccccctgtcgtgctcatgcagcagccgtgcaatgtcgtcgcggcgccccagcgagacggccaggtacaacggcgagccgccgtcggccgccacgacgcgggcgagctcagggtcggcggacatcagcgcctccaccatcgccttgctgcccagacggacggcctcgtggagcgctgtctctcccttgctgttccgcctcctcgcgaacgccctcgccgccgcgtcgcccgcgacgccgccgccgccgcccctcctcgccaggtccaggagatgggagaccatcctgaccatgccggccctggcggcgcagtgcagcggcgtgtcgcccttcccgttgccggcgtcgaggaggtggctggccctggcgtggaccgccgtcgcgctctccaggaacgcgggctcgtcgccgctggacgccaccacgtggaggacggagtccagcgcgacggtgaccgcctccgccgatgttaccaccgcagctgtaggctcggcgtcgtcgtcgtcgtcgacacccacaccgacggtttcaacgtcctcgacatggaggacgacctccccaaccggcaatgccaccggcggcgacaccgtgccaagaagacgtttcagccggtcgcgatcgccgtggcgggcggccatgagcagctcgggacgatgcggcgcctgcaccccatcgttcggctcgctctgcgtcgtcgtcttcttggaatccat

SEQ ID NO: 38275 - DNA, 1368 bp, Oryza sativa
  Clone ID: PAT_MRT4530_41927C.1
gcacgaggcctcgtgccgaattcggcacgaggaaactcccgaaaaatctagccatggttctcctcgccgccgccgccgtcgggccacacaaaaccctaaaccctaccctgagcccgccgagctccggcggccgccgcccccgcctccgcttcccgctgccccttccgcggggcggccacctccgctgctccgcggggtaccgcgaggcggcggcggcagcggcgtcgacgtcgtcgacgacgacgacgccgcggccgacggagatcccgtggagcagggagctctgcaactccgttcggctcatcgggacggtgggcaccgaggtggagctgcggcagctgcccagcggcggctccgtcgcgcgggggcgcctcgccatctggaagtcggccaccgagaccacatgggtgactctagcattttgggatgacctagcggttgtggcttctgagcatgtgaagaagggtgaccgaatatttgtttctggacgccttgtgtcggacactgttgatgagggccctgagaaacgacaggtttattataaggttgtggttcaacagttcaatttcattgagtcctttcagcaagtgcagttatatgagccagaggcaggcctggataccttaggtggaaagcatggagattatgttggttctacctctggctcgagtgagggtaaaagtagggaccatgttgactcatcctcccgttcaactgaacagttgtggcaagccttctttgctaatccttttgactggtgggataacaggacaaataagaagaacccgaggtatccagacttcaagcacaaacacaccggtgaagcattgtgggttgatgggaggaacaatccaaattgggttatctcccagttggcaattctggactcgagaatgggttctcttcaaggcaatgataggaaaccagttgcctttatgtatgctgatgacttcatgacacctgacaccgacactgaagcccatatgtgaaaggaaacctcccattcaccgatttatcatagcactatgtattagatagaaaatgtactactgcgatagtgcacctgcgctccttcaattttgttgtacataggtagaatcgtgaagtttaccatagaggcgtgcggccatctgttgtagtcagtagtaatgacaaatgcagatgtagtaaagaatcggatggccttcccttaaatttgcctgagaaacggtgtacatcacttggtgtgtttgcatcagctgagcctcaactgacaagtgacttaattacattggcatgctcattggcttagatggtgcaacaatgcaatcatcatcatatctgccatgagttgtgacctgtaaaaaactatgagctctcttttgtttc

SEQ ID NO: 38276 - DNA, 1009 bp, Oryza sativa
  Clone ID: PAT_MRT4530_41928C.1
cccacccacgcgtccgcggacgcgggcacagctaccggcggcgcagccacacagcagcagcaggtgaggaggagaggagacccgccgccgccgccgccatgggtatctcgcgtgattccatgcacaagcgccgcgccacgggcggcaagcagaaggcatggcgcaagaagcgaaagtatgagctcggaaggcagcctgccaacaccaagctgtcaagcaacaagacagtgaggagggtgcgtgtccgtggaggtaatgtgaaatggagggccctccgtttggatactggcaactactcatggggaagtgaggccgtgacccgcaagacccgtatccttgatgtggtctacaatgcatccaacaatgagcttgtcaggactcagacccttgtaaagagtgctattgtgcaagttgatgctgcccccttcaagcagtggtacctcactcactatggagtggatattggtagaaagaagaaggctcctgcagccaagaaggatgctgaggggcaggatgctgaagctaccacagaggaagcgaagaaaagcaaccatgttgtcaggaagcttgagaagcgccaacagggacgcacacttgacgcccacatcgaagaacagtttggcagtgggaggttgctggcctgcatttcttcccgccctgggcagtgtggccgagcagatggctatatccttgagggcaaagagctggaattctacatgaagaagctccagaggaagaagggcaagggtgcctcagcttagagcaagtctttctttgttgctggttctacactgaaagaactacccttttttgttccctgagagctcctatgttatgtttgcagacgcatagctgtttttttaggattaaacaactttagcatgatgacatgagaatgggttatgtactctggatgttattaagttaaaatatttactttctgccagctaaaaaaaaaaaaaaaaaaaaaaaaaaaaaaaaaagggggccgctcgcgatctagaactag

SEQ ID NO: 38277 - DNA, 717 bp, Oryza sativa
  Clone ID: PAT_MRT4530_41929C.1
atgggtatctcgcgtgattccatgcacaagcgccgcgccacgggcggcaagcagaaggcatggcgcaagaagcgaaagtatgagctcggaaggcagcctgccaacaccaagctgtcaagcaacaagacagtgaggagggtgcgtgtccgtggaggtaatgtgaaatggagggccctccgtttggatactggcaactactcatggggaagtgaggccgtgacccgcaagacccgtatccttgatgtggtctacaatgcatccaacaatgagcttgtcaggactcagacccttgtaaagagtgctattgtgcaagttgatgctgcccccttcaagcagtggtacctcactcactatggagtggatattggtagaaagaagaaggctcctgcagccaagaaggatgctgagcatgcacttggtaaaatccggtgcttatttataggattatatgttatgcttaaggggcaggatgctgaagctaccacagaggaagcgaagaaaagcaaccatgttgtcaggaagcttgagaagcgccaacagggacgcacacttgacgcccacatcgaagaacagtttggcagtgggaggttgctggcctgcatttcttcccgccctgggcagtgtggccgagcagatggctatatccttgagggcaaagagctggaattctacatgaagaagctccagaggaagaagggcaagggtgcctcagcttag

SEQ ID NO: 38278 - DNA, 2395 bp, Oryza sativa
  Clone ID: PAT_MRT4530_4192C.1
ggggatccagtcccgcgcttttctctttttttttcttttcaagtcagccgctcctgtttttagaccttgccgctcaggtcacaaaattcttcttaccatgtcggcccctaccgcattaagagcttaagggaaaggtaaaaaaaatcatattacaatatcgaatcaaaactcataaaattttggccaggaaacattaataccgtgtaaagagcaaatatgcctgatattttgtaatgtggggagtactcaacttcaaatcgtaacacaattcccatgaatacatctggtcaccgccaagctcttcaccagttgccccagcagcaatcctgataatatcctcgattaaagcaaaattccccatgatatcaacgtgcgcaccactctgggtgcccctgccttcgaggagatttgagggtggagaatggctgtattctctgacgtaggtcttgctgccagaagggttgaagcgtgtttttcctcgccagccttttgcgcacatatatcctgcactaagaactggtacggtctcatcaccattagacaggtaaacgccgcctttcagacagctattctcatccccaccctcagctgaagcgtctatctgaaaaggtatatagcactctgcttgtggggctaatttatagacatatgctctctccgtcggaatgccaactccatacattgaaaatatttccatttcaggtgcatttggtaattttgtttccaagggatttgaccagtatttgtagtggccgtactttggatcatccaagttgtcagcaatcccatacgaaaagtgaacacttccacgctgcatcatccttggagcaacaaaacgaagaagatctataatggagccagcagtgtaaaccttgtagtctgcaactgcctttattccgccccatcctaattcatgatactctgtccatatatcccggcatgatgtatttgagtgggcaatattattgcctttgacagcatcctgcaaatagatgtgaaatagctgcaccagacgaaattctatctgctcaatttctgaagatggagcctctgctacatctttaccgaaagagacaattcttccatacttaacaggttctggatgaacctcattcttcccgttagcatccttagaaacctcagaatcattgattttctgattcttagctttacactcaaaaccatcttctggagaccaatccaaatctccccaaatggtgtcaccgcccttaggaatcattgacattgttgaatcccatgtgcgggtcatacgcatcaaatggcgtaaggtctgaagtccaaggaagtcagagtctaggacttctggtgcaatggctctagcaacagcaacatctttggcttcagatgagaaaagtcctgcaacagccttaggaactcctaagaaaggtccgccaatattcattacagatttgatgtgctttgcacaccaatttggaccaccaccaccacccatgggaggaggagcctcaacccacttcataaaatgcagaaaatagagaacccccatagaatgtgggatcaccaccaccctatttccaccattagttgctaccaggagttcaatgttactttttatcctgctcaaagtttgatcacgaacctcagtgttctggaaagataacctccaatcatatgcagccatgtacatggtcttttcttcatatccaatacgagctaaatttgcaatcaaaacagcccaaacaaaatacccaggaacaaaatagtctgctgccactaggcctgtgactggccgaactcttattcctggtttatctaatccagtttcattgtccagtgacatatgttcaacccagcataaaggcccatatatcattgtagttttgtaaccatcaacaaaaacatcaaagcaacgaaaattgctcttgtacacgtcgccgaacgtgccgccccagaggcgcttgcggaagagcccctcggcgcactggtgcccctcccagagctcgaggccgccggtgacgatgcccgggacgaacacgacggggtgcttcgcccgcagcccctccttctgcagcttgaccccgggagggtccgggagcggccccgtgatcgcctccgtgacgtactgcgggaacgacgccggcatcgcgttgtacaggaagagcagcagccaccacgccgagcacacgcaccccaccagccagcagcagctgtccacgcacgaccacctggccctcgtccgcttcgtcgcctccttcgccgccgccgccgccgcctccggaggaggcgccgccgaggaggacgacgatcccggcttcttcttccccttctcgtcgaggtcggagccgttgctgctgtcctcgttcggctgctccggcggcggctgcggctgcttccggcgccgcagcagcgacat

SEQ ID NO: 38279 - DNA, 171 bp, Oryza sativa
  Clone ID: PAT_MRT4530_41930C.1
atgtcgccagcaccagcgcccttctccatcaaagttgcttgctgcctgacccctcagtgtaggaggttgatggagagcatgttggcggtggaaggaaagggcatcctcttcactgagccggcggtcgaggcatcaccggatcttggagaggtggaggtcatgcgcgactag

SEQ ID NO: 38280 - DNA, 1991 bp, Oryza sativa
  Clone ID: PAT_MRT4530_41931C.1
gtcctaccaacaatggaggtcgccgccatggagatctctacctcattgctcctcaccaccgtggctctctccgtcatcgtgtgctacgccctggtcttctcccgcgccgggaaggcgcgtgcgccgctgccgctgccgcctggccccaggggatggccggtgctgggcaacctgccgcagctgggcgggaagacgcaccagacgctgcacgagatgaccaaggtgtacggcccgctgatccggctccggttcgggagctccgacgtggtggtcgccggctcggcgccggtggcggcgcagttcctccgcacccacgatgccaacttcagcagccggccacgcaactccggcggcgagcacatggcgtacaacggccgggacgtcgtgttcgggccgtacgggccgcggtggcgcgccatgcggaagatttgcgccgtcaacctcttctccgcgcgcgcgctcgacgacctgcgcgctttccgggagcgggaggccgtgctgatggttaggtcgctggcggaggcgagcgccgcccctgggtcgtcgtctccagcggcggtggtcctgggaaaggaggtgaatgtctgcacgacgaacgcgctgtcgcgcgccgcggtcgggcgccgcgtgttcgccgccggcgcgggcgagggcgcgagggagttcaaagagatcgtgctggaggtgatggaggtgggtggtgtgctgaacgtcggcgacttcgtgccggcgctccggtggctggacccgcagggcgtggtagcgaggatgaaaaagctgcaccgccggttcgacgacatgatgaacgcgatcatcgcggagaggagggccggatcactactcaaaccaaccgacagtcgtgaggaaggtaaggacttgcttggcttgctcctggctatggtgcaggagcaggagtggctcgccgccggcgaggacgacaggatcaccgacacggaaatcaaggcccttatcctgaatctattcgtggcgggcacagacacaacatcaaccatagttgagtggacaatggcagagctgattcgacacccagatatcctcaagcaggcccaagaggagctagatgttgttgtgggtcgtgataggctcctctcagagtcggatctatcacatctcaccttcttccatgctatcatcaaggagacattccgtctacatccatcaacaccgctctcgctgccacgcatggcatctgaggagtgtgagatcgcaggctaccgtatccccaagggtgcagagttgctggtcaatgtgtgggggatcgcccgtgacccagccatatggcctgacccactagagtacaagccctctcggttcctccccggtgggacgcacactgatgtggatgtcaagggaaatgatttcggacttataccattcggtgcagggcgaaggatatgcgccggcctcagttggggcctgcggatggtcaccatgacagcggccacgctggtgcatgcattcgactggcagctaccagcggaccagacgccagacaagctcaatatggatgaggcgtttaccctcctgctgcaaagggcagagccattggtggttcacccggtaccaaggcttctcccatccgcttacaatattgcataaagatttacgagttgaatataattaacgaaaagttatttccgtgtgtgtggcatcaaataaatagagggtatgaacttttgtcatggtgttgcatcattgttgtatgttggtagattggtttttcacgagtatctatactccttataaaaaggagtagtggtgatgattctgctaccaccccactaccaactcttatctttttttaaggacatctaggattagtgggcccacatgtcattactctcaccaacttttattcttgtgaaaggttattaccgtgcgaataaatagtgggtttgaactgtcgttgtgttatatcaatcgatgtatgttgattggttttgtttttcacaaggaaaaaaaaaaaaaaa

SEQ ID NO: 38281 - DNA, 209 bp, Oryza sativa
  Clone ID: PAT_MRT4530_41932C.1
ggttgtcatataggcatatcatcttaaatgtatttacctgccgtaccatgttcaatatcattacacgttgatctggcattatgtgccactccacttcttttctgtgtaactttcatgtattcactcttgagccagtttctctgtcaacttggttactgtggccccttctgccacacattgtttggcactctttattccccttgggagtt

SEQ ID NO: 38282 - DNA, 1271 bp, Oryza sativa
  Clone ID: PAT_MRT4530_41933C.1
gcaccacgccgcgcctcgccatgctcacctcgccctcgtctccgatccactcctcctcctcctccacccgccgcgccatgagcccgtagcttacgtggcagcagcgagaaaccatgggcaggtcaagaggcaaggatggcggcgggaggtcgttcccgtcgccggcgtcgtcgtcgtcggcgtcgtcgtcggagttcgagttcacggtcacgctgtcgccggcgtcgaagcagaggtcggcggcgcagctgtgcccggcggacgagctgttctacaagggccagctcctgccgctgcagctgtcgccgcgcatctccatggtgcgcacgctgctgctctcgtcggcgtcgacctcctccgcgtcggcctccgactccacctccaactcgtcctcctcccgcgactccaacggcagcacgtcgtcgtccttctccgccgactgcgccgcgctgctgctcccggactctgccgcctcctcctcccgccccagctccgccaccgaggacgaccgccacctcgccccgccgccgccgccgccgggtgtcgctgcctcgttcgccgccaagcgcaccggcaagcagtacctctcgtcgttcgccacccgcttctcctccgtcttccaccgcggcggcgcccccgcccccgccgccgccgccgccaacgccaagaagccgccgtccaagtcgctcgccaaggaggtgatcaagaagtacgccaagaaggtgaagccgctgtacgagaagctctcccagatccccaagaatcagagcaacagcagcggccagccgctgcagcagcagcagcagcaggggttgaagaagccgttcagcttctcgatgcgcaagaagcgcggcgacgacgaccacgccgcagcggccccggccgcggcggccgccgtggccgcggaggtgggcggcggcggcaagtacgcgcactccaactccttctccgggaacctccggttcccgcgccagaagcggtgcgcggcgagctgcccgtcctcgatgcgctcctcgccgagccactccggcctgctcaccttcggcggcgcgggcggcgtcggcttccccgacgtgccagccgccgccgcggcggcgatgtccggcggcattagcgtgggccccgtgtcgctgtccacggcgtcgtcgatggaggagctccagagcgccatcgagggcgccatcgcgcactgcaagagcacaatgggcggcgccgtgaccatgtgctcgcgcaaggcggcggcggccgccgacgagatctgcgcgttctga

SEQ ID NO: 38283 - DNA, 495 bp, Oryza sativa
  Clone ID: PAT_MRT4530_41934C.1
atggtgatagtatttgccgggtgttacacgagcggtggccgagtcgcggcggctagcggagctcaacaaccatgcgacgtctcgggtgcacggagctacgtgactaccgacgacgacgcgcccgagccggtcaaccccgccgtccgcagcctcgcctcctactcgggccacgccatcgccgctaagaggtcccgccgtatcgtcggctgcgatggcgagtaccaccgccggcacccgatccgcggcatctcaaccccgccgcccgcgcgccgtcgtcatctcccctcgagccccgcccgtgccgcgcgccgtcgtccgtcgccccccgccaaccgcctcgccgccgctgccgcctcgcctcctccgccgcaccccgccgccgccgcctcgcctcctccaccgccgcagtcttgcctcgcctcctccgccgcaccccgcggccgcgcgccgccccatcccccgcttgccgtctcctctgctgccgtgcgcatgtga

SEQ ID NO: 38284 - DNA, 261 bp, Oryza sativa
  Clone ID: PAT_MRT4530_41935C.1
atggcgcgggcgagaaacggggaagattgggaggggaaagaggaagggagggcgcctgggattaaagggcggcaatgtcggtttggaaaccgaccttgggcggtcaaggcgcgagctggcgctcggcgctcgcggccaaaacggcaacagaggcagatgacgccggcggggaagagaaaaggaaaaagggggggagagaaagggggcttgcctccttgctactttggggaaaaggaggagggagagggggcgatgcggtag

SEQ ID NO: 38285 - DNA, 1458 bp, Oryza sativa
  Clone ID: PAT_MRT4530_41936C.1
atggcggaggaatcttcgcccttcgatgaggtccccgcctacgtcctgtacgagatcgctcgccacatcccctgcaaggtcgaccgcgtccgcgcgctggtcgtgaactgctcgtggcgcacgtcgcttcaggcgctcccgccaccgcccctgcctccacagctcccgtggctactccgcccatccgccggtggccctaccttctcctgcctcctcagcggcgccgacgagctcagcgtccaccgcgtccgcgtccccgccgaccttcgcggcgcgcgctacttcggatcgtacgacggcggctggctcttccttgcttctggacaaactttcggccacatgctcttcaacatccgcaccgagcaacgcctcttcctccccgacactgtcacccagccgtggagatcagatgacttccccatgatcatgctcgccgccaccgtctcctcccctccgagtgccaaggacgacctatgcttcggcgcagccatcgtctctgatgttgggcagaagcttgcccagcgatgcaatgttttctgggagttgggggattgcagagccgtatcgttcgtgccaccacaggatccgtttaatctgttcttcgaaatggaggacgtgatctactaccagggggcgtttaactttctgagcatatggagaaacgttctggagtgcaggctgacattgcaccaaggagtcctgcaagtacatcaaaagtggaggttgtttttaccacaagaggaacttagcctttgccgcaatgcggctgctcgctatcttgtagagtcccgcgggcagctgctcatggtcatcagggagcggcctgcttacaatcagtcgcgggagtttttcatttttgatatgacaaagacagaagaagcagtcgacgaggcggagtacatctggaggaggatgccagagctcgatggacggatgctgttcgttggacatggctgctccagatcctacgaagtgggtgacttccccggctttcaggagggcatctacttcttcgacgaccaggattcatacagtgtatccagtattgctgaggataatgagtacacctgcttcgacaatgggaagtggtccgccgggccgcctctaatggaaacgtactgcttctggccggatcaagtcaactcgaactactcttcaccggtttggcttctccctggagaatacttgtttgatgtaagtcggtgctttcatcttttgctgttccacggccatggccttcgccctgatggtcatgttcggggcctcgccggcggaggacaggggccgcggaccggcgcacgcctaacccccgtgatcccggtgaccgtcaaagcaaaagcggttgtagcgggcccaggaaagctgtttacccagaatggcaacctgaatgcggctaaaattcatcaggcctctgcttcaggcccaggaagctgctttaacagaaagcagtccgaatag

SEQ ID NO: 38286 - DNA, 1286 bp, Oryza sativa
  Clone ID: PAT_MRT4530_41937C.1
cggaattcccgggtcgagcgtccgcattgattcatctccatcgacaaagctagctaagcccagtcatggccgcctctcccgcaatgccgtcactcctcctcctcctcctcctagccgttctcgtctcggcggccgatgcctacgactccgccgccagcgccaacaccaacgccggcgccatccccgaccccaacatcttgaacatggaggccatgtgccccaagacgacggacgtgaaggcgtgccagcaactggtgaagaacatgccgtccaacatcgtcgcggggaagaaggacgccaggagcatcgcccgggggtgcatcgccaccgcctggttcgtggcgagggacggcgccaaggactgcaccgccgccgtggacgagtgcaaggacaaggtcgaccagtgcctcgacagctgccgccacgccttcgccgccgtgaacgacgccctggagccccagggcaccggcgacgacgccgtcaaggtccccgaggacgagaagctcctcgccatccacgccagcctcacgcagctgctccgcggccccaccggcacgcgccgcccgcccctctgcaacacctgctgccaggacggctcgtgcacggaggagaagaagcgcaacgtcgtcgcgctgttcgtgcaattgtggagcttgctggatttcgccgacgcggtgctcgaggacctgtatcctctgacgaagctgccaggggacaaggccgcgggatcagatacctctgcggcggcggccggatcaaccgccgacaaggagacctctgcggcggctggatcaaccgccgacacggcgacctctgcggcggccggatcaacctccgcaaaggagacatctccagtagccggatcaaccgccgataagacctatgcagcggccggatcagctcctcctgtcgtcgacactgcgcctgctcctcccgtgacaacttatgattaattacaaacattcggtatttcatattttggaggatgctataggaactttaaataactcttccaaaatttttaggacaccaacgaaaatccttacaaaattttgactaatcaacgtttctaaggagtttaacaaatttctatacgtgtaactttttcttacatatctgagtaggtgcattgctgagggcagggtgcgccttccgtggttgtcattcgaaattgtctttgtaacctcgtcaatttaatgaagtttagaatcaaaatgatgagccttttatctcaaaaaaaaaaaaaaaggccggcccctttaaaggatccaagcttacggtcgggg

SEQ ID NO: 38287 - DNA, 184 bp, Oryza sativa
  Clone ID: PAT_MRT4530_41938C.1
gccccctttttttttttttaagggggggtatgaatagcatagcggagacccacaacaatacaatcaagtttcccgctcccagatagcccagaaaggagcacacactaacagctacgaacacaaccaaacacagctgcatacggaaaaaacaacaccttgccagccgggcaaaaccacgaaccca

SEQ ID NO: 38288 - DNA, 1431 bp, Oryza sativa
  Clone ID: PAT_MRT4530_41939C.1
tttttttttttttttttggtttctgaccacaaactttgaattctttatagctgtatgaacttttgaaggaacagccaatattcaaaactggctaaattgtagataaaaccatgaaaattttgtcaatcgtgtatacacaagatacttttcttcatgtcttaatactgtaatccaaaatttcaaaaagtagggaaagtgacctatactcaatggagaactcaatgctccactttcagagttaacacgtttagctaaatggggcactaagccactaactcaacatctactgaatttagtatgcactgctctcatcatgcatactaaaaatgtatggaaccgagtgacaaatctgaaatctgtcatgataagtaggctagaggctgggaactaacccaacaagtcattcaagtatttgatctttctccatggctccatgctacgcagtagcaatcgctttgtagccagactcatcaatgtagttggctaaagctctgtcacccgtcttcactatcttgcccttttccatgatgtgaacatagctgggcttaataagatccaagagacgttggtagtgtgtaatcatcattagagagctgtttggtgtcaagatcccattcactgctttagctacatattcgagtgcatcaacatctaatcccgaatcaatctcgtcaagaagagctaaatcagccccaaggacagagagttgcagaatctcattgcgcttcctttcaccaccactaaacccttcattgacagcacggttaaggatctctgcattcatattcaaggcattaaccttttcctctataattggataaacctggagaggctctaatgctggtaaacccttcttctctctgcgagcatttaatgccatgagcagaaaatcgtaattgttcactccaggaatctcaacaggtgcttggaaactcataaaaaggcccgcaagagatctttcctctggctccatatcaatcaaattctcacccttaaagagcacggtaccaccagttacctcatactctggatgcccagccagaaccttcatgagagtgctcttgccggagccattttgacccatgagcgcatgaatctcgccctcccgaatggtgaggttgacgccgctgaggatctcctgcccgttctccttcacgcaggcgacgagatcgcgcgcctcgagaagcggcctcccggcggactcgacagcagcggaggccgcggcgatcgagcggcgccgcggccggagggagacggagctcgggggcagatggcggcgggggagggggcgggacgaagaggaggaaaagagaggggaggaggaggatacggccgcggcggcggcggcggcggcggccaagggcggcgccatgggaggagggagggtgaggtgcgtgcgcctccagatgcttcttcctccctcgtcgcggc

SEQ ID NO: 38289 - DNA, 301 bp, Oryza sativa
  Clone ID: PAT_MRT4530_4193C.1
ggttatctttaacagacactccgtgccttaaaaatgcggggttctaatgctctagggcgcccttaaacacttgaatgtgttaatctcctcatcagatcttttcataacctaacatctgctaggaggaacctccgactctttgacgatcataagggggtgactggcacaattgatgatcatgctggagcctactatgagaatctaatgcacacttctttaaccaactcgtcactatttatgggcatccctgcaatagatcactcaagcgatatccatgacaaaacgcttcctaccttactat

SEQ ID NO: 38290 - DNA, 519 bp, Oryza sativa
  Clone ID: PAT_MRT4530_41940C.1
gcattagagcctctccaggtttatccaattatagaggaaaaggttaatgccttgaatatgaatgcagagatccttaaccgtgctgtcaatgaagggtttagtggtggtgaaaggaagcgcaatgagattctgcaactctctgtcttaccgtgggcggcggcgtgaaactgtggtccaaaatgcaattcactgatatatttatgaccaataaatataggcaaaagtttcctgaaaaaagtgctagaagataatattttatgagacagtgcttccttgaacatttttacctgtcagaagaatttgtttgactatctagttatgtacttcgataaatttgtgcctcttatttgttttctcattatcaattataggtccttggggctgatttagctcttcttgacgagattgattcgggattagatgttgatgcactcgaatatgtagctaaagcagtgaatgggatcttgacacccaacagctctctaatgatgattacacactaccaacgtctcttggatc

SEQ ID NO: 38291 - DNA, 222 bp, Oryza sativa
  Clone ID: PAT_MRT4530_41941C.1
ggtactgtactatgcttgtatctgaaatcctgaacaattgtgtgggagcaggaaaaaccttaccacaaggcaaaccacacaaatacacgtacgaaaaataaaactggaaaaatcaatgtaccctgcaaagtatacatgcatatccttcatcacaacattagaatcttagagaactgggatgatacgtaaacaagcatcatgtctgaaaacacagacattttt

SEQ ID NO: 38292 - DNA, 345 bp, Oryza sativa
  Clone ID: PAT_MRT4530_41942C.1
tcgtccccccgagcacccagctgttcggtcggtggctgtggtggcgcgaactagaatctctgctgaccccttccaccagcgtcccctcacaggagatgctgcgctgccacacgccgccggaaagccgactgggcgcggtcggagcgggcgcgggggtgctgctgaggcagccggacgaggtggcggtgcggtgccgagcgcatcatgtgtacggggtcgaggcgacggcggggacaccagcagcgcgcacggcggtggatggtggggagaggaccagcctgacggaacggctgcagctgatgagcctgctggaggacggactgtcctacaaggagagcttcatcg

SEQ ID NO: 38293 - DNA, 489 bp, Oryza sativa
  Clone ID: PAT_MRT4530_41943C.1
tcacgaccgtcgcacttcatcatctccgatatcggtctgccggtcgccggcgaagagaagaagagccaccatcagcagctgtggtggaatggaatcgatatgggggcgtgtacacccagcgattacacaccccgggcttgttccacgtcggctcggggtggggccggccaaggctggaggctcggcgcccaccgagccgcaagacaactggagacagcctcgcttcgcctcctcctccgcctccgccgccgccagggcctcgccctcccaccccagcagcgccgccgccgccgccgccgccgccgcggccggatcccacgcgcggctcgccgcgccgccccgttcgaccccccgaatcgccggatcccgtcgccggcgccgccgccgcgccatttggtggggagtaggggagattgtcagattgagcttcttgaagagaaagttgttctccagcatattattgcagaagggtgtatgcgacgcgtacat

SEQ ID NO: 38294 - DNA, 1798 bp, Oryza sativa
  Clone ID: PAT_MRT4530_41944C.1
gggctgcaggaatcgcacgaggctactctctctctctctctctcctccccttctccccctctctcccgcgcccctctctccccccattccccacctcgcttcgcctcctcctccgcctccgccgccgccgccagggcctcgccctcccaccccagcagcgccgccgccgccgccgccgcggccggatcccacgcgcggctcgccgcgccgccccgttcgaccccccgaatcgccggatcccgtcgccggcgccgccgccgcgcctgggggggagtgcccaccagcgtgggccccgctatcctcctccgtgtgtccgccgagtgctgtagaagctggtcacagttgaaacctggaaggcagctgagtctatggtttttgtgggccattgtgctatcgatgcgagtagagagcatgcgtggcagctgttcttcgggtgatgcccctgaccagagaagctgccgatgcattcggtgtggcaacaattacactgtttgcaatcttcgctgttctgggcctcttctgcattttccagtcaatctatttccggtttcggattcggagaggggccttcattccgctcggatactttaacggcccttgggtgactcgcattgttttgattctgatcaccatttggtggggagtaggggagattgtcagattgagcttcttgaagagaaagttgttctccagcatattattgcagaagggtgtatgcgacgcgtacatcctttccaatctagggtttgcggagccaagcatcttctttgcgtttgctttccttcttcacggctcgttacagaagagggagttgggcactttgaaccaaagatggaattggaagaccataggctacatgttggttttctgcgttccggtgttcttcgtgcaggctcttctcgtgtttgttgggccaacatttgttaaggatgagaacaatacacatggaaggaaaaagattgctaaatacttcatccggacatccatgccagttggggacacaaatatttgcacctatccgttgtttggcaccattttcctgggacttatagacgccatcctgatgagctatgtctcctatgttggatctcgggttttgtccttggtcatcaacaaggcactgcgaaggagggtttccttgctgatgttatcggtgcttttcttccttcctatcagggtgcttctacttgggttttctgtcctgccccaaccaggagatgtagcatttgaagtgatcatcttcttgtcattcttgatgatgatatcctgcacaaccgttggtgttctcttgctggtgtactatcctgtagcagattcattggctctccgagagataggtcagagggaaataacagagatggttccttatgatgattactactatgaaggtgcatcgcttgtagccaaccagagctttcgagaaattgaacggaactcagatacttcaacgaagcgtggttccatatctttccgcactatgatcagggaagaccaacttcagcaggatggtgttgatgaaattggattctcctctcgtagtggtgctcatattggatcaccctcaccttcaggttcatccccaagtgctgcaatgcccatgctccctctcaaggaagtacctagatactaagaagtattcacctgttccttttgcccttctactatgttctcccttttcttcttcctctttcttcctcttactaccttaatgataacagttttgtggcaatcaaaggtttttgtaaagtttccaagtagcttgactcatcattagtttagtactcaaatctcatttaac

SEQ ID NO: 38295 - DNA, 4879 bp, Oryza sativa
  Clone ID: PAT_MRT4530_41945C.1
accttcccccccccccagaataatcatcaattttgcaatttcactgtaataactgtgaaattaacaatgaacatttgtatacatacatgtactgtaggcctcacttgccccccatcgacttgcctaaaatctgcaaacttctctggggttgccaaaatcaattagtgagtgaggccctcctatgtacaccattttacaaaatgaaaaaaaaaaagccaagtagcaacaggataggattcaacaactgtcagagaagtcatttatacaactgtctcagcctcaattggatgctgaagcagattgtcatcactatggacttctaccaacatgttattgctatgcccaaacgatttgcttggtccggaagaattctctgaactccatgtatctggaactgtgaggaagtgcttcgccatgaacttccggaaccttttcttgtactccttgggtgaaactacagttggtgaaacattctttggcactactagggaacttttcacccatgtttccagctgcttgtcccaagtgtactgcctcagataatcaatgatgccaaatacaagctcatgcttttctttgtccactcccacaagcagagaatagtccataacgttgaccgaagtgaggaatgatgtgtcgttccagattgcacgggaactgtgaggaagtgcttggccatgaacttccggaaccttttcttgcatgtcctcgacgtagttttgatccaagtaaacagtattacggtcattggagtgtgcaacgtgtcgtgaaaagatagcacctttaagatcataaatccgtgaaatattgtgcccgaagagaaggttttccatcttttctttttccactcccacaagcagagaatagtccttaacgttgaccgataaattcccaatattttggcaaggcaagtttggcttccagtgtctagagaatggtaaacatgcttgaagtaatcaggggcaaattttatgaaggactcaaactctgtcttctttatttgctttatgatgaacctgtcatccactgtctttgcaaagaaagctttactttttccaccctgagcatcccacttcttgcagcgacttagggaagtaatatatgcaagctcagatgggcagcacttctttcgaagatcttggaattgtttagcatatatgctagtaacagaatatttgcctctgagagctacttttccatttacagcgacttctggatgtattgaagagaacaaaggcaagctatcataaccagataggtcatctgatgaaactgatgaaccaagagacaaaaaacttgcttcggaatctaaagatccgatagatgaccatggtgatgagtcaagagaacttccagacataaagctatatgatttttccattgttttagcatgctccaacctggcaccctctgtttcattctccactaaatggcggtgttccccagatacagcaagagcacgggctattatactagatatctcatcctccagtacagataaaatattaccacctggaccaacagtgaactgtggagagctcacttcttcatgttgctcaaacaagggagacatatgagacggagaataacggttgacaatttcaaatttatccaaaatttcattttgtatgtcctttctgtaagccaattgacattcatggaaagaattccaaatccacccttcccctgtatcccagtctggaatttttctgaaatgattgggagcgtttgaaggctcctggtccaaagaaattggatgaacaactatcccatcaccctgaacctctgaaatttcaaatgaaggaacttctttggtttgtgccatgctatctacctctagttgacaaggagcagtgtaagagtcttcatcatttctacctccagtggaagaaaattgagcacacccagccccctgattttcagtaagcacgggtgcttcaatgtcaactgattggaggtcaatgtaatttctattacttggacactcagtcaaaccaactgcgctcaaaactgatgtagttctatcacatgtcaattcgtcagctttattttcaatctcctgatttaccctaatattcttgacaacagtatcaaaaggatctttgcaactaacaacacgctcttgtccagctgaaacacacttagtaagttgatccagtcgacggtcccacaaataaagttcaagtagaagatcctggtaggaccaattgatatcaacaagttcatgcacagatgcagatagattctcattctgattaattgtcttttctagagaatcctcaaaaaaggccttttctttgatcaacaactcttcaagttcagagaagtctttaacagggagagagccggtgcaattggttgttgtcacatcaagaagctgatcctttaagggttgtagcatgcttgcaacctcagaaaaaagctttatacctctagcaagaacatatctcctctcttctttaaaccaatcctgcctgcagggattatcaaactggagagtggtttgtggtttgcaggttgtataaatttcaactgatgagtaccggaacattgcaactttcgagcccaacctgattctgcaaaaccggattctgcaaaatgtcttgcaaatatcgccctgctttgttatgcattgactggacatcaaaattaatatgctgtgagtatcaagggcatcatccgcttgatcttcgttagtagttttctctttgctaatgatatcaatggtgctatgttgttccccatcttctaccataacaggtgattcttcacgtttgtcgtgcgtagaatttgttggcattatatcttgaattctttcttgtctctggtgatcttgtgagcaatccacatttgcagtagaaactgcaggctcttccacctttgacccaacatgaaaaccattactgacaatttctttaccagattcaacctcgccttctatctgggtagcagatgtttcttgcaaggatgtgacaggtaaataaatattctgatgagataacatgccaacgtatttccttagcgttcctgggactggtgatggtaacctttgagaatgaagtggtggctttgagtcgtatcggatacttgcatcttctccaacactcgaggagctgtttgttattgaacttggagcatctacttttgttgatgaactgagggatttcttcacatcagtgtagccattagaagtggcatggtacagtctaagtgctggagagtcatctcgtgaaggaaagtcagaggcacaaagaacagatggatcgtaaccatttgctgatggccctgccatggcagtaacagaattctctcttgaagcattttgatcattcaaaaatatcctctgatcttcaaagaatgatgtttcaagaatcaagtggtacgctgcaaatactgtgtagtgcatgacttgcttgacttttttcagttcttcactatttgcaccccttagcaatatcgtacaacccaacggtttggggaagccttccaagaacattaatgttttcgatagcctttttccaccatcactggcactgttatgctcctcaataaatttttctatgtggaacgagtcacaacgtttcagctttggtttatccaagacttctgagaatgagattatgggagaacccgtacagcgagcaattctttccaaccgattgagcttcatatcgaaaattagagtaacaccttctttcagaagaagttcttgtatatcccgtgaaacagttttctcaaccaaaataacattaggactacatatttccatcattttactaatagccctctccagatggtctttttcctgatccattgaattgaatgatgacaaaccaacatcagaatgcccaaggactcctttgagaagcagcagtctaggattgtggcaactggtcggcatgtgcttgtgagcagcatttttcttgaagactaaccccttgatcacctcactttgccgacgagtaccagatgctatgcacttgaccttgatgtaagatccagggtccatttcctttcccttgctagcatctggtttgatcagtagtgcagcttcccacgatagggaggtaaggatatcaagccaactctcaccgctctctcctttggaaaaggagataccagcagaggccaggaaccgacttacaagtatctttaactgcccattcatggcatctagcatcgcgctttctcgctcatccctagtattgtggctgacctcctgctcctcattagtggctgggaaacttgaccggccccacttgatcccatcactgtaatcatcgtcgtcgtcagcgtaagcaatctttccagaaacactgtcagcctcatattccttgtctgcagcttcaggtggtatccagatgctatcattttcagtgcatgttgagtcaatactgccacttttgccactggtactctcagccccatcggattcatcaccagacttaaccgagcggtcatctatagaaagagcatcacggttcatatgttcatgtttgctctgcaaagcactagaggagaaattgtcatctgtggatagatcgctgctgcttgtacgctttttggtatccccaattccgttctgtccagaatgctctgcatcatacacgctgtgatcgctgcgattaccatctaaagcctcagacaaagcgtcccttgttggtggatccatgtcttgctgggcacatgacatggcctgcaataagtagagagctacaaaagagaatttgcaaaacaaatttgacacagatgataagtggcaatgtgaaaagaggggaggagattgaacttgaatccggaggaggaagaagaagaagaagacaaagaggaaacttgcagcaattggggggaaaaacaaccgagagtccaggctggccat

SEQ ID NO: 38296 - DNA, 975 bp, Oryza sativa
  Clone ID: PAT_MRT4530_41946C.1
atgccgcgcgcgaagaccccgatgggcctcatcccgttcccgaagaagcgcgccgcgacgttcgcgaggaggaaggagaccgtgatgaaaatggcgaaggagctctcggtgctctgcgacgcccaagtcgcggtcgtcgtcggcaaccccggcggtggcgcggcggagaaggcggcgtgggagtcggaggagggcagggccaagctggccaaggtccgggaggaaggcgcgttcaagccgtgggacgacgcgctcgacggcatcgcggaggaggagacgcggaagctgcacaagtacctcagcgacaagatcgaggccgcgagggcgagaatggaggcgatgggtctgcagctgggcgacgtcgacgacaacggcgtgaacggcgacgacggcggcggactcgatctgcagcagcacgtcccgccgagcgcttccgacgccaaggagttcgagtccgtgcctgtcgtccatggcggccaatacatcggcagcagcagcggcggcgggggcggtgacatccagatgcagacgacgccggccgcagatggcatcagcttcgccgagcactttctcgtcgcgccgcgcgctcagcccctcgccttcagcaccgccggcgccgacttcatcaacgcaccgaacaacttcctcaccacgggcgtcagcgtcagcgactactcggtgcagagctcgggctacgggatcggaaaccagatcgacaacgccaagcaactcctctatcagatgcaaatgcaatacccagtcggtggcacgggtggcgccgagcccagcaacacgcagacgcagtccccggatttgcggagcttcagcaacgtcgtcggcgactactcgtacacggcggcgcagagctcggccaaccgcctcgatcagatgcatcacccagtcggtggccgtggcagcacgggtggcgccgccgccgatcccagcgacacgcagtccaagaatcgggggagctga

SEQ ID NO: 38297 - DNA, 3437 bp, Oryza sativa
  Clone ID: PAT_MRT4530_41947C.1
ttagttgagcaccatatatatatgtttgtgtattgctatgcatgcatgcatgcttccggcgagggagacgtagcggagcctgggcgtgaggccagggaggttgggcttggaggcgatggtccatccgagcgcgaggaggtggtacttgatcttggtccggagctcgtcgtcccggcggcggaggagggagagcaagggtgcgcggtggtcggagaggagccggctatgcagctccggcgacagcagcccgccggctctccgcccgccgcctgcgtccacgcttgcccgccggctctccgcctgctgtcggcaggtaaggatccgattccgctcatgagcatccaccttttgtgacctaagatagtagagtaggtgcacgccgatagatggtgattgagattttagaggcacacttctggcgttgccgccgtcgagccagtttctgatggcattggcttcgtacgtgtacccgtctgctgcgatgtgaggatcagtcatcacctcctgcaagatcgggcagataaagtaggatggtgcttgtgtgtcatctgatagagcttcaaatgcttgtttgcatccaaaattctgggaagcatccttcagcagaggcttgatcaccccccacacctcccccgtgagatctggccggtgccttccactcaaattggcgcatctcagtccgagatgcgcaagctggttggcctgcacgaagggccagctccctgcggaggtgtccatgattgaatgcagctgccttttctccatagcatcttctactattgttgtgatgttctgtggtgattttcctgtcagtagatgtaggatgataatgccgaaggagtacacgtcgcagcgtggggcgagttctccggtggacaagaattcagggtcaatgtaggaggatgttcctgaagtgttatttccggtgttgtattttctgagaagctggcagacgtgcaacttgcttacaaagttggcatcaagaagaatgttcatggggttcagattaccatgaacaaccgggtgaggcttctgtgagtggatgaaggtcaaggctgaacatatctccccaatgatcctggtacgcatcttccatgtcagtggtggtgtgtttttcttgcacgagagctggtcctcgaggctcccatttgggaggaattcatacaccatgccaaaagcttccggacatgcacctattagcatcatgacgttaggatgcctcagtctactgagaacaacaacctcttgatggaattctaactgcccttgcaggccctgaggatgaagcaacattacagttatagccgtgttccgtatgaaccctttgtacacattcataaatctgcctgtgccaatcttgagtgccgtatcaaagtcttgggttgcttgccgcagctcaaaaaaagagaagtcggcgatctgggtggttgctatcattgaagctccatccctgttcatttggcgcaatttttcagattctgctatggcagtgtctctctcatgtagtgttttgtcatactttgcttgaatcttttggataaagcggatgctttctgcaagcttttcttcatgagctttgatctctgtcatatgtctgctacgtatcttgtttagctctcttttcgtttcttgaatttcctctttttgccgtgcaaatgtctcctccaccgcttcccgccttttcaactcattcagatactgatgctccaggtcatgaaccttcttaagagcggagagcatctcgctctcagcttttcttctcctcttagtttctttagatgaatcaagtcgttccagacagagcttctgttcctttacatcttttaactcatggtataattcatctcgctgcctttttgtttcttcaatctccatcctctgtcttgcaatcttttcctccatatctttcctctgcatcttttcatttcggtttaaattctccacatctttaactctttgaagcatcgcaagcagatccatcttgatcttttggaatttcttggcttcctcacatgattcttgtataaaatattcagtaatctcttgtacataatcttttgcagcagatttaatctcagatatatgttgctccagcagaagcttctgtttctttgtatcctgtagttcatcatataatgtattgtgtcgccttttcatttcatcgatctccagcctctgtcttgcaagtgtcctctcagtttctttccgctggttcacctcctgtagatatgatttttctgactcttgaactctctgaagagctataagtagatccatttcagctttgcgacgcttgctagattcaccatcaacttctttcttgagtagttcagctcgagtgcatgcctcattaagtatatcatgcatgtcttcatctaaatttggttcttcttcttcttgttggggatcacaagctggtgatgagaaattgacactgtcagattcctgaggagagtgcatcactgatctttgtttgtttgtatcgtcaacaatcgcagctagagttgtggcttcaggaatacttattgcatcatcagtccttaatgaaccataccctgtccttccccaatctctggtcatgaatatttgacgtttagggcaagatcggttaaacttcttgtgcatatcagatggccattgcaggtaaaccatatcttgcatgatggggatgcagtctccatcagcttgagggctatcttggaatttggttctttcatttccattaggcagatgtggtccatactctgagtagtgttggtctgcggctgctcccatgacaagcctggtgatgccatgaagggtaataagttcctcgagtccttttgcgacatcgtccatgtcaattagtactttctgacaatcagtcttcatatcttttcctgtgcttttcgctatcagagcatattcatctaggttcttctcggcctcttccttcgccaacatcaggtactcgctgatctcttcaggcttcattctggtacagtgaactttactgagagtttgtgcagggctgtggacatgagcaactacaatattggccccgtccgtggacaggttctgcagcgcccaaaggaatgtgctcttgccgtgctcgacgtcctcgtcgacggccacgaacaccttgtcctcgccggcggccaggctctgctcgtcccactggtcgccggcgtcctgcagagagccggccgacgagctgacgctgcaccgagcgctccacatcgcgtcgtactcttcgccgtcgctatccattgctgcttcctgacgttgagaaatgagaagcacagaccatgcagctgcagagtaactgcccagccgtttatgaatggaaatttcgagatcaagtaccagaagaaagcagaagtagtcagcaccgaatatatttttcatttcatgcattgactcacaaagttaataacgcaaagttgtttttttctttg

SEQ ID NO: 38298 - DNA, 144 bp, Oryza sativa
  Clone ID: PAT_MRT4530_41948C.1
ttgtttgctgctgaaacacaagtctacattcctcgacggctgtaacacactggcgggacacacacatggtgctcgaggcgatgatgatcagcatagacaactcagatgtgtacgaccgaacgagtattactgccacacgctgat

SEQ ID NO: 38299 - DNA, 621 bp, Oryza sativa
  Clone ID: PAT_MRT4530_41949C.1
atgatcgcatccgcggatcccgtcgacggcgcggctctccacgtcgctgcgccgttggctcccggtcctgcctcctctgttgccgtcctctccgtcgacctctctcctctaccgaggctgctgatgccgggggacaggagccacgtcctcgccgatcatccatgccgtggatctggcggccactccaggccaccgtttcgtccgtcgccccctggtcttctccaacctccgcgccagccgtcgtcgacctcgccgcccttctcaaccccggcgcacagggggagggagtgctcatcactgtcgcttccacacggcaattttctgccggcccctgcagctctgctgctgtgccgctgcctgtggtccacacctccactggttgttacagtgttgagacctgagaggcaccctcctcagtgtggcctcaccaccggtggacttctcgccgctgcatcgacatcgagctgcgttggtcccactacttcgccttcgtcttcgtccagcatgattcatcgccagtgtcgccgtatcttcctcgactatacttcgctcttctccggcaactgcgtgctgctccggcaattctccctctacgccgttctcgcgccgcgaccatcctag

SEQ ID NO: 38300 - DNA, 2754 bp, Oryza sativa
  Clone ID: PAT_MRT4530_4194C.1
atggcaagtgacaggacatcatcagatgatgaatgttcatcaaatagcaagtcggacaacaaggtggcagattctgattatgccaactctatttcagaagaggaagaaaccagtgattctgacaaatacataacaaaaaaagatctcgtcagcacattaaaagatctgttttcaggatcgatcaaaaggaaaagagctaggacagacaaaccagtaaggagacaaaaacaaaagcgcacaaaacttgaatatgaccaagataaatctggaagtgcagagtccccaaaaccaagaagcagactaaacatcacatacttttccaatttgattgaagggcttagcaacgagcaaaggtcaattattgagaattctgcttttggttctcttctaaactttcaaaggtgtgctataccactatcttttgtcaaatggatagctagtcacactgatgtcagctgctcagatatagttgtcaatgggagatccataccaatcaacccaaacaccaccaacttcatacttggtatcccaaatggaggtttagagatcaagaatgacaatgatgcaggaaaacatttttttcatcagcattttgggagcacaaaacccttaatttccttctttggcactaagttgcttagcgacaagggtgtgaacaaactatcagaagatgatgtcctacgttgtttcatggtggttgcactatcaacctttctttgccccaactcagacactcaccccagcccaaaataccttgaacctctgagtgatatcaagtccagctcaaagtggaactggtcaaagtttgtttatgaatggcttatgacatacatagccaagttccaaaaggagagtaaatcaaaggaacaaacatcaaaaacccttggtggctgcggacacttacttgctattaattatcttgatttcaaagattttggaattagaaatatcccaattggtccaccacctagaatctctgtttggaaaggcggaatgataaaagagtattcaaaaatagatgaatgcaaaacaggagattttggaaagcgaccactcattgatgacatttccacagtttgcaagtggttcacaagagaacattctgacacaacatacggaaaaaatgcacaactagctgccaaggttttggattgcgtctacatgtcaaaagcaagcctattcacacaaaaagataccaccacaacaagagaagagaagagtggagaagagaagagcaaggggggaagcaagcagggtggcaacaatgtagcacataatggtaatgccccacccctagaacaaaaccacccaaacaacactgatgtatgttcccaactaccaaaaacaccacaaacaaaatcaactgcagagcataaaacaaagtctaacatcaacaacactagcactagcaaaggagcaccccctacagataaaaaagcatccagtaaggactttgtttgtagtcagcaatcaaacaactctgtggcatccaggactagagctaagagattacattcagcatcccctttgtcggttgtatcaattagcccatcgaaaaaatattcttctgaccaaaagattcgcaaagcagtaaggaaacagcccttgaaagcaacagaacctatcaatactcaaccagacagggaagaatcaaacaaggatgctcttttcgtggaacctatatgtactataccagccaaaaaggaggaggtgcagcccaccaagaatcttgaaagcagctctacagagtttgttattgatatagagggtccatatgatgctgaagacataacaggtcacacaacggataagacgaagttcattcttgtgaattattcaaactcttcagaagaacataatagccaagatcctacacaagatgaatcagacaacattccaaacaagagcacaaatcaacccaaatttgaatgcttacatcattttgatgataaatcaaaaacaaacaaaagtgccagccttgggcacttcttgtcccaaacaacatcaggcacaaacatcatggacattgaacatagcagcatgcagagttcacaatcatcacctgatataggtatgaattctccaagaatagcacaaatgagggaaccaaatcaacatgctcaagcagaagaaagacaatattcaatgataagaatcatcgactcactaaatgcttctgccaactgctctggtaccagacacaatctttatcgccctaaaagaattgtccatccaattctaatggacaatgtaaaagtcacatggtcatcattgtctaaatctctatcaccaaggggagtggtggatacatatgtcctcaatgcatatgccaagaagattgccaacgaccagaataacaaagaaaatgaatacaggaatttttacttcttccacagaactagtgtttatttcttgaagaattgggaaggtactggaaaagaggaagactatgaaaattgtgcaagacaagcctttacatttgctaggaacaagaaacctctgcactactatgaattgcttattttcccatgcctgtatgacaatcattggtttgtgtttactgtggacatcaaggggcatcactttgtcttcctggactccatttatgatgaaaacaacaaatatcataagaaaattcaagggctactgataccaggattaattgcaatgtgggaagaattctcaaatgtggagaaaaactttagtaaatttgatatccaatacccaccaattacttgccaaaacaatgggtag

SEQ ID NO: 38301 - DNA, 109 bp, Oryza sativa
  Clone ID: PAT_MRT4530_41950C.1
ttcgtgtcccacggggctaggagacggattagggggggctgcataaatgacggcttgggtatataacaaaccgtctgccggtaaatacaatctatgatggaggccttgg

SEQ ID NO: 38302 - DNA, 393 bp, Oryza sativa
  Clone ID: PAT_MRT4530_41951C.1
gttgttaagaataaccattattctttttgagaagcccccagaaaaatgagcggacacaggagggcggcgcccaaaggggtatcgctgtgcacaatattaaaccaaagctgcaagctggcggccaaggcgacccttacttgggccaccgtgggaagtgacaactaaaaaacggatagaaaaaagattgctgacaggcattggccaggaccgtgggcacggaaactggggggtgaaaaaccaaccctgccattcattaggggggggccgggggcgatcggcaaggaaaagccatatgggttagctacagggtggactgctggggggaacaagaaatgtatccaagggtccggggggatctgagaccgaccctgagagcaacaggcattccagggg

SEQ ID NO: 38303 - DNA, 1976 bp, Oryza sativa
  Clone ID: PAT_MRT4530_41952C.1
gcaggagaagctctacgccgagatcaacgccacctgcggcggcgacgacgagctcctggagcggaacgtgagggacaaggacaacaagatgccgtacctcaacgccgtggtcaaggaaggccagcgggcgatctagtgccgctctcacgcttccgccaccgctgcccccgggagtagcgatctcccgagggcggccacatttttttttctttctctgaggtcgtcctgttcgtcgtcagatcgatctaaagccatcttcagatcgttcgtgcgtcttcgcgtcatcagcatgcagcagtagcagatcgcatccgcggatcccgtcgacggcgcggctctccacgtcgctgcgccgttggctcccggtcctgcctcctctgttgccgtcctctccgtcgacctctctcctctaccgaggctgctgatgccgggggacaggagccacgtcctcgccgatcatccatgccgtggatctggcggccactccaggccaccgtttcgtccgtcgccccctggtcttctccaacctccgcgccagccgtcgtcgacctcgccgcccttctcaaccccggcgcacagggggagggagtgctcatcactgtcgcttccacacggcaattttctgccggcccctgcagctctgcccgacatcggcatcgattctgcttcaacttcatcgttctgcctcgcgcatcttcggcttgatcacccattccagcgcccagctacaacgacttgtacaaccgatcatcatcgagcacgcgtctacgccatcaagcttcgggttgccgctgcgtcgcccccctcgggccacagtgccgctgcctgtggtccacacctccactggttgttacagtgttgagacctgagaggcaccctcctcagtgtggcctcaccaccggtggacttctcgccgctgcatcgacatcgagctgcgttggtcccactacttcgccttcgtcttcgtccagcatgattcatcgccagtgtcgccgtatcttcctcgactatacttcgctcttctccggcaactgcgtgctgctccggcaattctccctctacgccgttctcgctcgtccccgggtctggcaaacctggtgtgacgtcttgtccttcatggttcgactatatcggctcttcgacgtcatcttcctcaacgaccgtcgcgatcgtgtccccgtcatcatctcccgcgcgtcctcgcgcacctcggttcacaacgctctcccatgcgtccacgaccactctacggcgtcctatgtgcgctccgcggctcggctacctcgacatcatcggctccccgacttcggctacatcgaccacggctactctacgcacggcttcagcgaccacggctctcccggctccttcgctttggctacatcgactatggcacaaagggctattatccgtgttgagcactcttgccggtttattctccagtccaagtgtccgcgctgctcacgcttggactgaggggggatgttagagtatatgtactcctatatatatcggccccctgaggctcaatacaatgtgtccaatattcgcagtatcctctctttctatactatccaacagagatccccctcgtcgttctcgtcgaactggtcgacgccgaacgacgacacacacggcttgatccctcccgttcccagcgcgatcaggtacagcgccaagaacaccacccccgtctgcgcttggtgcggactgcggagcatctcatagcgcgcggcgaggaggcgctccaatgagccgaagcgctcccgccgcccgtcgccggccgccgtttctgcctcgccctgccagccggcccgcacgaggggggcggggaggccggcgagctcgcgccccccgagcccgcgcgccgccacctgggagtagctaagagcccccgggagccgccgtccccggccgcaccaccctccggccccgcgcgccgccatgggtgctagccctagcatcggcatccccat

SEQ ID NO: 38304 - DNA, 384 bp, Oryza sativa
  unsure (1)..(384): unsure at all n locations
  Clone ID: PAT_MRT4530_41953C.1
ccacagtgccgctgcctgtggtccacacctccactggttgttacagtgttgagacctgagaggcaccctcctcagtgtggcctcaccaccggtggacttctcgccgctgcatcgacatcgagctgcgttggtcccactacttcgccttcgtcttcgtccagcatgattcatcgccagtgtcgccgtatcttcctcgactatacttcgctcttctccggcaactgcgtgctgctccggcaattctccctctacggcgttctcgcgncgcgaccatcctagaggccttctctgctagtcttctccgacaattggcgtataatttctggtgggtcccctaactagnccggaacggtatttggtaacaaccgttgtgcggcgttttgt

SEQ ID NO: 38305 - DNA, 634 bp, Oryza sativa
  Clone ID: PAT_MRT4530_41954C.1
gtggatccccgggctgcaggttttttttttttttaaaattggacagaaactcttttattttatcaataaagggcggccgagtaggaattatatggcccatatcatgctcaataacagagcgacaactcttatcaaatcgattcgcgagttcggtgcttgccctgtttgctatctgcctgtcatgatcttcagagttgccaaagcaatgaagcgaggggagcttaattggctcaccgtcaaaatcacttatgatcggtgctggataaccagagcagaatatcccaaacctgaatttgagggagccacaagtcttctgctgctgtctgcagaacaaggctgccattgctgcgccctgggagaaaccaagaatgccgtcaatgttccccatctgagagatagcatgttcaaggtatgcgtatgattcctcgaatccatcagtttgttgctgatactgaagagggtcgaatggtgcatctgcaatcttccagtcatgctcagcgtaaaaaattgagtttggagcaactagccatgcgtattttctctttggtgtgccagatggcagtgaagatctgccagagcagtgatctggatttggtttgtacaccaaacgaaagctcatgtggagcatctataa

SEQ ID NO: 38306 - DNA, 541 bp, Oryza sativa
  unsure (1)..(541): unsure at all n locations
  Clone ID: PAT_MRT4530_41955C.1
atggttcgactatatcggctcttcgacgtcatcttcctcaacgaccgtcgcgatcgtgtccccgtcatcatctcccgcgcgtcctcgcgcacctcggttcacaacgctctcccatgcgtccacgaccactctacggcgtcctatgtgcgctccgcggctcggctacctcgacatcatcggctccccgacttcggctacatcgaccacggctactctacgcacggcttcagcgaccacggctctcccggctccttcgctttggctacatcgactatggcacaaagggctattatccgtgttgagcactcttgccggtttattctccagtccaagtgtccgcgctgctcacgcttggactgaggggggatgttagagtatatggtagttagagtcatattaggataggattggtttgtttggatttcttccatanctgtaatatttccttatctcttccccatgtactcctatatatatcggccccctgaggctcaatacaatgtgtccaatattcgcagtaaaaaaaaaaaaaaaaaaaaaa

SEQ ID NO: 38307 - DNA, 589 bp, Oryza sativa
  Clone ID: PAT_MRT4530_41956C.1
tttttttttttttttgctctggccgatccgggcctttccggtttttaaaattgtatagggacagttcttgacttgatatcgataaggttccgtaaaccagcacaatactcaactggtcccaacacagtaggaaaataggactggagagacgtacacagccaaaactcaaagatgatacgtgcataaccagcactaatccacagcatacatcctcccagaggggcatcatccatctacctatacctaccaatgcagagccaatcagccaagcagatccaggaacatcagtacaaatcacaacagcctgtaggtcggtgtcatgtatcatgtagtaggatcacatctccttctagctggaaggctccacatggcttttgtagttttacaaatcctctccctatcgccatgtgccacattgcatctaagatttgccgacttaattcatgtggttgacgacctgttctgttccctctctccccatcccctccgcccctttcccccagggcctgcccgttgcacccgagggcccgcggtcgcaggggcaaccggggcccgggatggggcccccgtcccgcctccagcaaacaca

SEQ ID NO: 38308 - DNA, 442 bp, Oryza sativa
  Clone ID: PAT_MRT4530_41957C.1
actaggctaaccacacgaatacactatagattaattacacttacaatagggcgggtcctttacatcacacaaattcataccttactacacgcatagacacaaaacgaccaactgcttaattaatcgatcacacacgggttaaattcaacactaataaccacatacacacaccacactcatatgggtagacattattgaatactaaataacgaatgagactcgctatctatgactattacggttcatttggacttaaattgctgcaattccagtcgctgcaagagcatgaagctgcctgacttgccctcgcctgacttctcgaaggcggtgacctccacgaaggcattatggtacgctctaactatcaccacgacctacctgagccctttcttcacgcactggctcttgaacatacacacgtagcagatggactagtaccaca

SEQ ID NO: 38309 - DNA, 1179 bp, Oryza sativa
  Clone ID: PAT_MRT4530_41958C.1
atggggcgccacgacgtctctgtattcgacgatgaagaaattgggcgcgtgatggatttattcttcaccgatggcgtactggggttggacggcggcgtatcgccggaggaggaggaggaggaggaggaggtggaggtggacctcgagcccttgttctacgacgaggctgcgacggtggcggagtcggtggcggcggcggaaaggcggcgggtgcgggaagaggatcgcgcgcgggtggtggagcagcagaccaaggtgaggaaggcgaaggaggcctatttcaagaagaaccgcaagttcaatcccaagactggccttcactacttcaccagaatattcttcattaaccccctcaccttcgacctcaacgaggagtctcctcttggtccaatgcgatacactgacagaatctacaatgagcatgaggcactgcggatgcgcaactctgtaaacattctttcagtgaagatactaagctcagatgtaggcttcccgattaatgtttatggcactgtaattgctagagacagcctcgatgagaagtgcatttatctcttccgtcgccctagagatgattgccaactcatcaactcaaaggacgattcgttgatcttgactggcccaactcgaggactcgtgttacaagacgctgtatattttgaggttgatctcagaattaaggatgaccgattaagagggaagaaaaaagagcatagcaagggattgcttatgattgatggcatccgaagaacaataaaggtcaaaactgaggtcgaaaatgacacttttgtcggtaagctcggcaccgtggagttgagatatgcagttattaaagacgcagtggaggctactgttgaaatcaaggttgtggagggatatttctgtggagaagtcgcagcttgcaccaccaacattcaagataaagttgttcttcttgatagcagaacatgctgtgtgatggccgacaatcttgatgtccagttatctcgacgtgtcatggctgtccacaacaaggagaagcttctgttgaccgttgttaatcaggatgacgaagttccaactggctgtgttacgcaaaccattgattttactccaaaattcaatggttcagatgtgactgaagttacttgtggtagtgttaagatgcttgtgaaggttacttggtctcttatggtctga

SEQ ID NO: 38310 - DNA, 1875 bp, Oryza sativa
  Clone ID: PAT_MRT4530_41959C.1
atggtgaccgacgccgaggaggtctccccgacggcgtcctcgtcggaattggagcaggaggacgatgacgatgactgctacctgagcgatcaggaggacgacgccttggaggagtccgtcctccaggtgctggaggacgaacgcgacgaggattgccattggtcctccacctccgtatgcccccccactatccatcgttttatcctcgtcgtatttgttgtccgagtcccaatcgcttcggttgttgatgggttccttcgattgcaggtgatcaccaaggaatccctcttggcggcgcagagggaggatcttaggaaggtgatggagttgctagggttgagagagcaccacgcgcggacgctgctcatccactacaggtgggatgtcgaaaggattttcgagctgcttgatcagaaggggagggacaggctcttctcggaggctggtatccctctccaacctgctaataatcccggctcgccctcctcaacggaggtaacctgcaatgtttgctatgacgatgtgcccctctcggacgcctccaagatggactgcggccacaactactgcaatgaatgctggacaggatatttcattgtgaagataaatgagggacaaagccgccgtatcaagtgcatggctctgaagtgcaatactatctgtgacgaagcaatagttcgtaagctagtaaatgcaaagcggccagatattgcagagcgctttgaaaggttcttgttggaatcttatattgaggacaatgatacagtcaagtggtgcccaagcacaccgcattgtggaaatgctatacgcgtcaaaggtgatattcactgtgaggtggaatgtacatgtggacgccagttttgttttaattgctcctcagaagcacattcaccatgttcctgtgtgatgtgggagctctggatcaagaaatgccgtgacgagtcagagaccgtgaattggataacagtaaatactaagccctgtcccaagtgccacaaacctgttgagaagaacggtggctgcaatctggttgcatgtatatgtgggcaagcattctgctggttatgcggtggtgctactggcagagatcacacatggtcaagtattagtggccacagttgtggtcgattcactgaagatcagtcaaagaagacagagcaagctaggagaaacctttatcggtacatgcactaccacaacagatacaaagctcacactgattctcttaagcaggaagcaaagcttaagggcgacatccaggggaagatttccatttctgaaaacaaggattccaagataaaagattactcttgggtgataaatggattaaacagacttttcaggtcaaggcgggttctttcatattcttatccttttgcattctacatgtttggtgatgagattttcaaggatgagatgacttctgatgaaagagaactaaagcaaaacctatttgaggaccaacaacaacaattagaattcaacgttgaaagactatctggtttccttgagagggattttcaaaattttagtgatgatgaggttatggatacaatgaagcatgtcatcaatctttccaatgtggttgatagactctgcaagcaaatgtatcagtgcattgagaatgatttgttgtatccactgcgtacgcctcataatattgctccatacaaatccaagggccttgacagggcctcagagctcaatgtttgttgggattcttctgaacaaggttcatctatttttggaaagcggcaacttggctcaagttctaataacaatgggcggcctcacaagcgagaaagaaatgatgcccatggtggggctgccctttttgacctcaatgtgccagctgaagtggcagacaagatatga

SEQ ID NO: 38311 - DNA, 641 bp, Oryza sativa
  unsure (1)..(641): unsure at all n locations
  Clone ID: PAT_MRT4530_4195C.1
aaaaaaaaagacattatctaaaatataaaacattgagttcgatccaggtatttacaattcgaaacattgagttgttcaaccactgccacacaacaagcaatatgtgcccaagcaatatgtgccggttgggaacctcacaaaggtgccgaattttccaaccggcaccacgaaggcagcacagattagaaacactcaaaaccagcacctttgagatatacgaattgaaaaaaataataataaaaataagaataataaaattcagctcggctcaaattgaaccgagccgatgcatcaaagcaaccaaaaaaaaatccaaaaatctcaaaaaacaaatccgctgctggcaccactgccgctgcacactgttgcatgccgccgccactcatgctccgcccgctgccaggactctgcgccaccgtcgtcgctgccgagaccaccgcgccaccgccatcgccactggatcttgacgacgtgaagagaggccagcgataacgcccaacgatgatgaaggggtggtgcattgacaacgccatgatcaatgaggcactgacatggccgacgcagtccgtcgacacccttcattgaccttccatgcccgacgacgtggaaaagggncggcgtggcgcggcgcggacgcgtgg

SEQ ID NO: 38312 - DNA, 667 bp, Oryza sativa
  Clone ID: PAT_MRT4530_41960C.1
aaaaactacgttattacacttattgcatcaaccacaaagtctaattttagttactggccccaccgacttttgcaaaagtatcacattgtatagtgcattaagtcatctgaatcaaccggataagcatattttaacggcagaagatccaatagaaattgagatcgaaggaatcattcaaacacaagttaatcgagcgattcagctagattttagccatctattacgaacatttttgcgccaagatcctgatattattatgttaggtgagattcgtgatccggagagtgccgaaattgcattacgcgctgcacaaacagggcatcttgtgctttctacattacatactaatgatgcgccctctgcaattgaacggctattacaattaggtattaaagaatatgagcttaaaaacgccttattattagtcattgcacaacggcttgtccgcaagctatgcacgcaatgttttggtaaaggctgtcaggcttgctatcagggctatagaggacgcattggcatttatcaattattaagccgtacgggaaaaatctttgaaaaagagaccgcttaccttgattttgctagtttacatcatagtgcgaagcataagttagaggctgatattacgtccttagcagaaattaacagagtattaggcgatgctgaa

SEQ ID NO: 38313 - DNA, 596 bp, Oryza sativa
  Clone ID: PAT_MRT4530_41961C.1
ggcatcagatacccaggcaaacagagggaggattccagttccagccctgactccgggctggatggaaacagagaaaatatgctgttgctaacaatccattgtaaatgaaaatacgatcccagtaattgattttaaatagattttttaacgaatccttggccgcatttcatcaagaatacagagtttcaaaagcgttcattccagggttggattcccccccccccctttcttctggcttaaaccccaaatggccaagattcaagtctgaataaacagtgtgggtggtgactgttctgtgaggcccagtagaggatgcaaccactttcttattcggttcagcattaaatcatgtgaaacgagcctgatgactccacagaacttttcctcagtaatggagggcagcataacatgtcctgtttctctgcttctcagggaggggaaaaaaattaattctcctcactgcgaaggtttaattatgtataaagttcattgacctcacaggcggctgtcagatgatcttgcaaaggcctgtgaaaggcatcctaggaatgcagagatgtgggcagacacccagtggattcatgccaccgagggct

SEQ ID NO: 38314 - DNA, 795 bp, Oryza sativa
  Clone ID: PAT_MRT4530_41962C.1
aataaaaggtgcttccatcttccgtcaaaaaaacggacaaaaaaggaaaaaaaaccaaatatgtccgattcaaaaaaggcgaaaaaaccggaaaaagaaaaaccaaacgtaaaaaaaagggcgataaaaaggaaaaaaaaccagatcggtacgataaaaaaaccggaaaaagaaaaagaaaaaccaaacgtaaaaaaaagggcgataaataaaaagaaaaaaaaacagatcggtccgataaaaaaaacccgggcgaaaaaaccggaaaaaggaaagaaaaaacaaatatgtccaatccagaagaagggcaaaaataagggaaaagaatccgactccgtctacacggtaaaaaaagggggaaaaatataaaaaatctaaaaaaaaggtgcttccgtcgtccgtaaaaaaaaccagcgaaaaaaaatcgggcgagcgaaaaaactgggagaaaaaaaaacgggcgaaaaaaataatccaattccgtgaaaagaagggcgaaaaaaataataaaaaaaaaagaatcggtccgattctaaacaaacgaaatcgggtgaaaaaaccgggaaaaaaatcaagcaaaaaaaaggaatccgattttgtgtaaaaaagggcgaaaaaaataaaatgaatcggtccgattaaaaaaaagaaattggtcgaaaaaaaactacgcgaaaaaaatcgggtgaaaaaaccggccaaaaaaacgaattatgtagacacggtaaacaaagggcgaaaaaaataaaaatgaatctgtctaatttgatcaaacaatgtggctctgatttttta

SEQ ID NO: 38315 - DNA, 893 bp, Oryza sativa
  Clone ID: PAT_MRT4530_41963C.1
ccacgcgtccgtaaaaataaaaacgcgcggagagatagcgtcgtagcgtgcggtgcgcaggtggggtctcgtctcgtcgccggtgaagccgccgccatggagctcaccggcgccgccatccgggggtcgctggcgacggccgcgtccccggtggtgctgagggggagggggaggaggtgcgcggccagggtttcctgcgtcgggcgcggaggcgggggatttggcgatgaggggcacctcaggtactacgaggcgccgccgcggaaggcggtggaggcggtggcgagggacctggccaagctccgccccatggggatcgccgccggggacgcggccaaggagaaggtcctctcggaagccacagagctactgctggaggagttgaatcgaatgagggatgaggagggcgaactgaagaagaagatgaaggaggacaaggatgcaatgaaagcactcaagaagcagcagaaggaagcaatgaaggctgccacgacgatgaaatgcaatgatgatgactcctctgaatcaagtgaatcaagtgagagtgagtgtgaggagcagatgatgacaatgagctgcgttgccactgttaccatgccgcaaattggggaaggcgttgcgatctcaacgacagttccccaagttgctgcatccgatgtcgcaacagcaccagcaatggagtatgacaaggctgcaatgaaggccatgaagaagagagaaaaggaagagaagaaagccgcaaagatggctatgaagatgaagaagaaggaaaagaagatggccacattgactctctgcaaggatgaagacagcacctcatgctcctcagaatctagcgacagcgagtgcgaggaggttgtcagaatgagccgctgtgctacgataaccacacc

SEQ ID NO: 38316 - DNA, 213 bp, Oryza sativa
  unsure (1)..(213): unsure at all n locations
  Clone ID: PAT_MRT4530_41964C.1
ccacaaggaaaaaccatattcgggcgaatggcataatattataccgattgtaaagaacaaaccaccacctttacactatatacacacnaagtctcgatcaagcaactttaattaatttcttccacatttacaacatgcatcctctcctaactccgtgatcaattaaagaagattctttgcagctccagcttgaccacgatccatccgaattaa

SEQ ID NO: 38317 - DNA, 2445 bp, Oryza sativa
  Clone ID: PAT_MRT4530_41965C.1
atgagccccgacgcggccggggcgggcccaccgtcgtcggagctcgcccgcgtcggcagcctcggggggaggctcgtggccgccgacgaggcccgcgcgtgcctcgcccgccgcctccacgccgcgctccaggtgagggaggagtcgcggcggcagggcgcggcgctggacgagatgcgggcgcgggtggagctccggcgggcgcgggtgggggagttgctggtcgccaggagggacgcggcccggggcgtcgaccgccgcagggagcagctccaggcgcagatcgaccgcgtgctgcgcctctccggcgccgtcgccgccgcgagccggcggctgcaggatgcgaaagaagcgttgtctggagagaaggcgcggcttggggatttgcagaggctgttaaggatgaggcagcagagtatgattggccaggttgctgcattgtaccctgtgaagattggtaaagactacaagagaccaagatatcttctggatgttgtatctattgttattttccagatttgtgctgtcaagttgatagaggacaaggccatgggtgtcgaggcagatcatggtacgccatgtataaggacgatcttgaggtgttcaatcaggatgagctacagatatgcttctgaaaactgggttctcctcttcccggtcctgctgctctacctgctattcagatcttcgccgggtttcttcgctttccttctgtcccactctcctgtaatcatatgtgccgctcttatccttggtgtgctgataagccatggcagcacaaacgttgctgagatcaaggaagaacggaaatctgtcgccgaggtttcggatcccaagtatgcagatttgtccaggaatatccatttggaagcaaacaagggattttcggcaaaagagaacacggcgagcttaaatgacggtgaaatcaaagatggcttgaattcttccagagaacatgctatcgaagttgttgagatggtgggcaagataagtcatgatagaggatcaacagattcacagagtgatgagatgaaagtagattcagaagataaaccggctggtacctgtaaatggggccgtgccttttctgttcgtcgcaggaagaagctttctgatattaaggtagagcctatcaatgctgctgtggacagtccattagactcatctttggattcaccatttggtagagttggctgccatgatggttcaccaggttttgatcatgatcagacagagggtaccactcctggtactcctagaacacgcattgcttctgtcctggacgagattgaccctctttccagtgctgattccccccatcctgatcccatccaaaatgatgactcggacaaccacatgtcccttcaggattctagaactgtgagagataataattatgaatctgacaagagcaaggccaacaaaaacgatgacaagaatgtcagcactgatcctgcatttcttggaaccgtagatgatgataagaatgtcatggatcttgggtactctgaggtggaaaggcatcgtaggttagagatcttgatggttaagagaagatcaaggaagaacatagtatttgatcctgacagtaacttagacatcgataatgataaggtttgcaagagaaacccatctgatattctttcttgttctgatgagacagaatttcctggctcagctccatccgttctgcatacatggaggaatccgtttgatcatccttttgagcaatcagatgaaagtgatctacatgaacatgtcgcaataccccaccaggacatgttcttcacaaggcatgaaagcttcagcattggcagccaggggagacgtccctcaagatttaagccaccttttatcatcgaagcaatggacattgatgagccaagtgcaagtgatttccagagacaattcagtgacaaaaagaacgtgcttgtagtgatggtgaaagttaagacgatcctgtcgcaagcaggtcgtaccgtcttatgccgtcatgtccatttcaatcctgagcgcccacagctccctccctcctcctccatctcgacgctgcccgagcggccacgggcaaagccacgcggccacaaggatggtggcggcggagcttcgctccgtctcactgcacaagggcaggggggactgcctagcatcgggaggcggaaaccgcccagatccgcgccgactggccggatctggcggggaggtagccggcggcgtggtagtgtgttcgagcagtggcgtttggcgagggtggtgacgaagtttagaggcgctgcggaggacgaggccaccagatctgcgccggatctggcggggaggcatccggcgacgctcggcgccggcgggaaggatgtcattgtctgttgtgggacggcgacggcaacggcggcaccgatgccatggcggccggatctggtggtggtggagccaaacgacgactgctag

SEQ ID NO: 38318 - DNA, 397 bp, Oryza sativa
  Clone ID: PAT_MRT4530_41966C.1
accataatactaaagtgtttttctgctttcataaagtttaatccctgcagaggacgcacactcacttgtaagatcattgcacatggagcaaacagcgcaaccatgaatcgcccaatgcaaagcaacccatcccaaggacgtgagaaccaacggcaaaacttatggcatggtcgagcactccaggtactatactaggcgagatggacactgatccggagcagcgtctcggcgccgtcggtgacatgctgcccggtggcgatcagcgggcgcacctcgtggaagccgtaggcgcccttgaacttgccagtgccgccggagatggacagcttgcacatggtggatcccaccttgttgaccccgaataagttgatcgtgtcgccgtactcgccgaccttca

SEQ ID NO: 38319 - DNA, 231 bp, Oryza sativa
  Clone ID: PAT_MRT4530_41967C.1
cccggcgccaccggcacgagccatggcgaaggggaggacgtcgaggtggtggtggtgcacggcgacgccgggacggacgtggagaagtactacgcgcacagcctcacgttcgcgggattcgtgatcgacggcgacgtcgccgccggcgactggaaccccgaggtgttccaggtgtccaccgccgttccagccgccgccggcgccacagcgatgaaatgcaactcatattga

SEQ ID NO: 38320 - DNA, 2520 bp, Oryza sativa
  Clone ID: PAT_MRT4530_41968C.1
ttactgagatagatagtgctggatggccgatattgctctttgcctaatttgttctacttcttcaatagcttgggcatcttgagcattagttcctgggataacttttaaagctttggtcatgtcagcgacattcttgatagccgatttcagtttggctttctgtttttcaacagcttgtgggagatcatctagcttcttgtgttctaagtccagctcggcattgcattcttgtagctgtgccaagagttcaatcttgcgagcttcaagccgatcaatattggacttgatcggaccttcggacagttgatcaagcttggatttttcttcatgcacaagttgccgattgacttggatagtggcttcaatgttttttcgttcacatcgattggctatccgttgcttagctttctccagcttgaattgatgttgctcaagataaacagctggagtgatgatgtttgccaagtcatctgggactaaggcttggatttcagcaaatcgtgcccggattgaaccacagtcggccactagactgtctagtgatgatcctaaccgatgagatatgtcttcaaggattttcttgacatcttcatttacaggggccagagatttgcttgatgtttcttcttctgtttcttcatctaagtagtctttgatgtcaaaagaaaacagatcggctaagacttggatagcaggagcagctggttgttcttcttcttcaacattataactaccagcagccgatggagggcgatggcttgattctggtggtggagctggtttagatgttgttgcagccgatttcttcttcacagcggtcttctttttttcggctgcaacttggtcaacatcttccccaatttcttcttcatccagagcttgttcaatggatgaatctagagcaggcagatcatcagttggcttggttttctttgtcttggttttcttctttggagttggagctaaaatatttgcagccaacgatctggttttcctcttcttgctggcatcggctggttctctgataagcccttgaagaagagctgaagtcttgggggcattgtagccgatggcgggaggagatagcccacctccattaggaattaaacctggggcatatctgatatccctgccgctgttactttgacgaggaggagaagattctgttgtttgagggataacatcagggaagagctctgtcatgtacattgaagcaagttgatggaacagatgcaacttccattcaccccaccatctgtcaaagtttctgctcctgaatcttgccaactctatgcttccaatgctgcccaatggaggtccttgaagattgagtagccgatccatcattagggttgacgaaatttctcctcggcattggatcttatcggcgcagaataagccgattgggagttggcccattccatgctgtctggctgaactcattgggtgatagaactcgtaagaagcttggatgtttcttccttgatggatgccgaccggaagaatgcatgggctgattgcagccgagaagatttccctggacgattggtatatctcatgattgatgtcctcaaatctaaagtccgatgggagctcaaggtctgctgaatcttcatagagaaaccaagttcgagcatctttttgaaagccctcatagaagctgcagaaccagtctttgagcagttcggctgataactttgctccagcatcggctgatgtggatgcatactccccatatgaccatggtccacctaccccgactattgagccgacagctaacttagccgatgcattgtttagcatttggtacaagtagccgaggaggatttttcctaaaggaaattgtttctttgcctctaaggcttcggctataaattgccagttggttgtaggaccacagcttgatccacagaagagaaatttctctagccacatcatcaagaaagccacgtgttcccgaggggtgactgaaccctggcccatgtatgttgccacatagcctgaccagccgcctatgctcttggtcttaaagtcatattggttctttatgttcaacctcatagggttagccgatgaggtgacgtccaagcccgtaatcatgatgatatctatgagagttggggtcattggcccttggttgaacaagaaggcgttgatggtgttggaccagaaataagaggcagccgccattaagggttcgtccttagctgagttggctatggtaaggtcaagtgcttggccaattccgatttcgtcccagtgaacccttttgacagccgatatacgcttgaaccatgttgcccaacttttctcgggtgaagttttctctagatctgggttggttaatctgaaaggaatcctattggtttcaccaatgatgaactcggtgggatcaatgttgccgactgggccgagaaagtagtggttttcatgtgataggcttggaattgcaactagattggagagatgctctgcgtactcagctggtggtgcggcagatgggctggcggaagacgacat

SEQ ID NO: 38321 - DNA, 213 bp, Oryza sativa
  Clone ID: PAT_MRT4530_41969C.1
aaaagagaccggttttagtcctttttttttccacttgtcatttgcaaagtttctatcaacaaaagggtttaagcatagaagaaggggacaaaaaaacaatacgatatcctgcagccatgtcgattgttttcgcacctatcacccactcgagtcgctaaagccaactttgagttttgtgcatgcatgtacattacgacagatgggtttgccttt

SEQ ID NO: 38322 - DNA, 3099 bp, Oryza sativa
  Clone ID: PAT_MRT4530_4196C.1
atggcaagtgacaggacatcatcagatgacgacagttcatcaaatagcaagtcggacaacaaggtggcagattccgattatgccaactctatttcagaagaggaagaaaccagcgactctgacaaatacatcacaaaaaaagatctcgtcagcacattaaaagatctgttttcaggatcgatcaaaaggaaaagaggtaggacagacaaaccagtgaggagacaaaaacaaaagcgcacaaaacttgaatatgaccaagatcaatctggaagtgcagagtccccaaaaccaagaagcagactaaacatcacatacttttccaatttgattgaagggctcagcaacgagcaaaggtcaattattgagaaatctgcttttggttcacttctaaactttcaaaggtgtgctataccactatcttttgtcaaatggatagctagtcacactgacgtcagctgctcagatatagttgtcaatgggagatccataccaatcaatccaaacaccaccaacttcatccttggtatcccaaatggaggtttagagatcaagcatgacaatgatgcaggaaaacatttttttcatcagcattatgggagcacaaaacccttaatttccttctttggcactaagttgcttagcgacaagggtgtgaacaaactatcagaagatgatgtcctacgttgtttcatgattaattatcttgatttcaaagattttggaattagaaatattccaattggtccaccaccaagaatctctgtttggaaaggcggaatgataaaagagtattcaaaaatgaatgaatgcaaaacaggagattttggaaagcgaccaatcaaagcaatggagaaattaagttatgacgcaatatgttcaggggcccgctgcattgagcaacagggcaacaatagcaacatgtcatgcggcgatgctctccagcaataccatagcaaatcatttagcccaaggctcattgatgacatttccacagcttgcaagtggttcacaagagaacattctgacacaacatatgaaaaaaatacacaactagctgccaaggttttggattgcgtctacatgtcaaaagcaagcctattcacacaaaaagatagcaccacaacaagggaagagaagagtggagaagagaagagcaaggggggaagcaagcagggtggcagcaatgtagcacataatggtaatgccccacccctagaacaaaaaaaccaaaacaacactgatgtctgttcccaactacccaagacaccacaaacaaaatcaactgcagagcataaaacaaaatctaacataacaaagtctaacatcaacaacaccagcactagcaaaggagcaccccctacagataaaaaagcatccagtaaggactttgtttgtagtcagcaatcaaacaactctgtggcatacaagactagagctaagagattacattcagcatcccctttgtcggttgtatcaattagcccatcgaaaaaaaattcttctgaccaaaagattcgcaaagcagtaaggaaacagcccttgaaagcaacacaacctaccagtactcaaccagacaaggaagaatcaaacaaggatggtattttcgtggaacctatctgtactataccagccaaaaaggaggaggtgcagcccaccaaggatcttgaaagcaactctacagagtttgttatcgatataaagggtccatatgatgttgaagacataacaggtcacacaatggataagacgaagttcattcttgtgaattattcaaactcttcagaagatcataagagccaagatcctacacaagatgaatcagacaacattccacacaagagcacaaatcaacccaaatttgaatgcttacatcattttgatgataaatcaaaaacaaacaaaagtgccagccttggacacttcttgtcccaaacaacatcaggcacaaacatcatggacattgaacatagcagcatgcaggtgacgcagggggagagaccaaacttcactgcaaacatggggaataggaggcttgagggacaacactgtgatgaaaacgagtaccaagatgactttgcagaattcttatatgaagaggaaccatcagataacatcgatatggttgaacaacgtgcgagttcacaatcatcacctgatataggtatgaattctccaagaatagcacaaatgagggaaccaaatcaacatgttcaaacagaagaaagacaatattcaatgacaagaatcatcgactcactaaatgcttctggcaactgttctggtactagacacaatctttatcgccctaaaagaattgtacatccaagtaaatacaagagctcaccatatgacaactacacacggcaccaaacaatctcggcagctgaactcaatcactacaacaacatactcagcattggtgagacgcaacaatataaatataaatttgcagttctgatggacaatgtaaaagtcacatggtcatcattgtctaaatctttatcgccaaggggagtggtggatacatatgtcctcaacgcttatgccaagaagattgccaacgaccagaataacaaagaaaatgaataccggaatttttacttcttccatagaactagtgtttatttcttgaagaattgggaaggtgctggaaaagaggaagactatgaaaattgcgcaagacaagcttttacatttgccaggaacaagaaacctctgcactactatgacttgcttattttcccatgtctgtatgacaatcattggtttgtgtttactgtggacatcatggggcatcactttatcttcctggactccatttatgatgaaaatagcaaatatcataagaaaattcaagggctattgataccaggattcattgcaatgtgggaagaattctcagatgtggagaaagactttagtaaatttgatatccaatacccaccaattactcgccaaaacaatggggaactacctatcaacccaacaaaccaattactcgccaaaacaatggggaactacctatcaacccaacaatcatccgcaaattacatatcattttcttttttgtccaaaacccctccctttttttttccatga

SEQ ID NO: 38323 - DNA, 506 bp, Oryza sativa
  Clone ID: PAT_MRT4530_41970C.1
ccgagggcgtgggagacggctgcatctggtcggcgcggcatcgtttggtggaggggtcggagaccggcttggtgcagagaagcgcagccgatggcagctgaggccggcttggcgcgagaggcgcagccgatggagggaggccggatcggctcgagaggcgcgtccggtggaggaggctggcttggggcagagaggcgcggtcggcggtggaggaggcgacctaggtgtgaggaggagctgccggtgggtgtggtggtcttcggcgcacgaaggctggccagcgggggacgccggtgcaggggtctcacatgtcggcaaagcttgtgtggtggtggagcatcggtgcctcagacgtggatttccctaggtggcggtcggtcacgcttagcggcggccggtccggtgttagccttctcctgggcttgtgtgttagcgatgtcggcgtgtgggtggtggtatagttttttcctttttcctggttacaaccctcctgggttgtaatcttg

SEQ ID NO: 38324 - DNA, 188 bp, Oryza sativa
  Clone ID: PAT_MRT4530_41971C.1
acctcgtgcccaagtggctcgtcaccgtcgtgctgcggagacgcgacgacgacgcctccgatgacggctgtgacggcgagtcggctaaggccttgttcggcacgcatgtttccaatccaggccaggaattgatcaaggccaggtttcagtggatccgggtggattcactggaaccacctgtggattga

SEQ ID NO: 38325 - DNA, 366 bp, Oryza sativa
  Clone ID: PAT_MRT4530_41972C.1
gggttggttgaacgggacacagttacttattacttaacgtactaatactgagacaaagttaaaagcacttggataaccgggcaaatgtttggggtttatgttaaagctatgtttggcccaaacccaatcaccccctcaggggtctgtgcacactcacacaggcttgaccagttggcctggggggccttgttatttattcaacatgtaaacgggctgggccattggcaatccagccattgatcgctttggcctttgaagtgggagggttggcccctgtagttgaagccagatttgcagctttgggcagccctgccaaatttaattgctttgccaacccccttagagggccccttttaaggtgcaaca

SEQ ID NO: 38326 - DNA, 200 bp, Oryza sativa
  unsure (1)..(200): unsure at all n locations
  Clone ID: PAT_MRT4530_41973C.1
ccgccgncnccgcgaagtcatccntatccggcgncncccatngcggggtcgntntcnctgcgttttnntgtccntacggtangtcnttcgggggtnccnancaaggggcccaacgccatnnncatgttnctcnactaccttngnancctgnnggctgtgggnatgtaccagtgttggncagggggaacaagngnnnggng

SEQ ID NO: 38327 - DNA, 277 bp, Oryza sativa
  Clone ID: PAT_MRT4530_41974C.1
aggcatcgagtactatggtcgcaccagtcacaggtcaagattctgcccagtcgggatcgacatggcgcacaagctgaggtcaggtgttgtcggcgcacggagacgggggacctggtcggcacactcaccgagtcgtacaagggcggcacactgatggtcggcgtcgacgacgtcgacctgttcaagggaatcgggctcaagttcctggcgatggacagctgctggtggaccacccggagctgcgcgccgctttagagatccaagcttagacgcggga

SEQ ID NO: 38328 - DNA, 189 bp, Oryza sativa
  unsure (1)..(189): unsure at all n locations
  Clone ID: PAT_MRT4530_41975C.1
atggttgggggaggtgagatcgctttgtcagaggggaggggggtggaaggagatgaaaaggagggaaaaagnaaggnaaaaggnnngggttgggggagtgggaggtgctggcccgccgcgacgttgactcatgagatgagaaacccatgccctatttgcaatcccgaggatgtcgcggctattagctaa

SEQ ID NO: 38329 - DNA, 627 bp, Oryza sativa
  unsure (1)..(627): unsure at all n locations
  Clone ID: PAT_MRT4530_41976C.1
ggttccaccaacaaatcgttcgtgttaatcgcaggtagatgatacagcctggtgtacaaatgtgataaactataaagtgttacacctgtgacttgtctaacataacagaactaaaattttacagtcaggagcaccttcagcaaaatcaccagaacaagaagagtatctgaagatcctgaacaatctcatctcagcactccttatcagattgcttgccgctgcccggcaagtcatctgacttaaatcttggtctttttgtactgcatccctcatcctctaaggatttcaacttgtgctttatggcagctatcttcgcggcacggtcagtctgtaccgatttgcttcctgaaccacctgccagtttcttgggaaaaaagagctttgagttgactgacatggccgtgcttttctttttcttccaatggcctcctccacccaccgttccgtttcctcgccgccgcctccgccagtagcggcagcagctactcgattccccatgcgcgcctccgccttgccgtcactactccgtcgaggctaccttcccccatctaatnctcgcccgacccaccgnccgacgtngcccacgacgaagacgaacaggaaggtcagcaccacaaggaggagcgg

SEQ ID NO: 38330 - DNA, 975 bp, Oryza sativa
  Clone ID: PAT_MRT4530_41977C.1
cggcagtggcggagcaaactcgcggtggtggcggcactgcggagctcgcggcgacgtcgtcggcgacaacagcgcgggagcacggggcgacggcgacggtggcaacggcgcagatttcatagcgatggtggcagcagcggcttgtcggcggcgacagcacggtggctggtcgacggcattggcggctgtggcattggggctctcgcggcgcaggcagcgacgcggaactcgtggcgacggttgcagtagcggctggacgacggcgatggggctgcggctggctggcggcgaggtggccgttggcagcagcggccgtggtggtggtgggaggtggcctcggtcggctagccgaggacgtagcagacggctgcatctggccggtgcgggagagtacggaggaggggtcggagaccggcttggtgcagagaggtacagccgatggcagcagaggccggctcggcgcgagaggcgcgggcggcggagatggaggccggcttggcgcgagaggcgcggccaatggagggaggccggatcggtgcgagaggcgcgtccggtggaggaggccggttcggtgcgagaggcacggccgacagaggaggaggtgaccctggtgcgaggaggagatgccggtgggcgtggcacgatcttcggcgctcgaaggctggccggcggggggcgccggtgcgggggtcccacatgtcggtagaggttgtgtggtggtggagcatcgctgtagggcgatctcgtctgtgttcctttgttggtttagcggcggccggtcacgcttagcggcggccggtccggtgctagcctcctcctggtcgtgtgtgttggtgctgtcggtgtgtgggggggtatattttttcttttttcctggttatgaccctccagggttataatcttgtaattctttcctgctctatcaatagaacttcgcaccgtctcgtgcgagtcgttcaaaaaaatttgcctcat

SEQ ID NO: 38331 - DNA, 396 bp, Oryza sativa
  Clone ID: PAT_MRT4530_41978C.1
ctagatgcagccgtcggccacgtcctcggctagccgaccgaggccaccatgccacctcccaccaccaccagggccgctgctgccgacggccacctcgccgccagccagccgcagccccatcgacgtcgtccagccgctaccgcaaccgtcgccacgagttccgcgtcgctgcctccgtcgcgagagccccaatgccacagcagccaacaaccgccaatgccgtcgaccagccaccgtgctgtcgccgccgacaagccgctgctgccaccatcgccatggaatccgcgccgtttccaccgccgccgtcgccccgtggtcccgtgctgttgccgccgccgacgtcgcccgcgagctccgcggtgccgccaccgccacgagcttgccccgcgtcgccat

SEQ ID NO: 38332 - DNA, 2751 bp, Oryza sativa
  Clone ID: PAT_MRT4530_41979C.1
gaacgactcgcacgagacggtgcgaagttctatggatagaccaggaaagaattacacgattataaccctggagggtcataaccaggaaaaaagaaaaaatatacccccccacacaccgacagcaccaacacacacgaccaggaggaggctagcaccggaccggccgccgctaagcgtgaccggccgccgttaaaccaacaaaggaacacagacgagatcgccctacagctagggggtgccaaaacgacgtcttcaagaagaaaagcgacgaaaaaaccgtcgccgccgtccgttcgggctcaaaggagccaggactgggctttcgcccggcaaccggccttgagaggtgagacagcatgacaatgccctcaggaggaagaattaaccatcgttgtcggcccggcaaggccggactgggttttcacctaccgcacaccacctgcaaatccacggctgacgcaccgatgctccaccaccacacaacctctaccgacatgtgggacccccgcaccggcgccccccgccggccagccttcgagcgccgaagatcgtgccacgcccaccggcatctcctcctcgcaccagggtcacctcctcctctgtcggccgtgcctctcgcaccgaaccggcctcctccaccggacgcgcctctcgcaccgatccggcctccctccattggccgcgcctctcgcgccaagccggcctccatctccgccgcccgcgcctctcgcgccgagccggcctctgctgccatcggctgtacctctctgcaccaagccggtctccgacccctcctccgtactctcccgcaccggccagatgcagccgtctgctacgtcctcggctagccgaccgaggccacctcccaccaccaccacggccgctgctgccaacggccacctcgccgccagccagccgcagccccatcgccgtcgtccagccgctactgcaaccgtcgccacgagttccgcgtcgctgcctgcgccgcgagagccccaatgccacagccgccaatgccgtcgaccagccaccgtgctgtcgccgccgacaagccgctgctgccaccatcgctatgaaatctgcgccgttgccaccgtcgccgtcgccccgtgctcccgcgctgttgtcgccgacgacgtcgccgcgagctccgcagtgccgccaccaccgcgagtttgctccgccactgccgggtacagatatccaaaatacagccctcgctgttactatttggcacattgggaggcgaggaacaatgcaaagaataacaatgaatccattcacccaaagcgtgttgcccagaaattttttgcttatgtcgacatgattgttcaacattgctacaaagcacaggctgctcccaggggtgattcctctccttcaattccacgatggactcccccaccagtaggtactgtgatgatcaattgtgacgctgctctgtttcaatcttcttgtcaaatgggcattgggttcctcatacgcgaccatgatggaagatgtctactggctctcaatgaacgagtccagaatgtaactcagccggagttggctgaagctgtggcgatccggcgcgccctgtcacttgcaaaagaggaaggttaccagaagcgcgacgcgatcaagaggtccctcctcgactcgctcgcggcgctcaagaagcccgcgctggcgctgctcctcgccggggcgctgctcgcggcagcggggccacaccacggcgccgcgctggcggcatcgggcggccgcgtcggcgggtcggcgttctcgtcgcggtcgtcgtcgccgccgtcgtcctacgggtacaccgcgccggcgccgaggggcgggtactcggccgcgcccttctactcgccctcgccgttcgtgtccgtcggcccggcggtcggcatcgggttcgggggatccagcttctttttcgtccttatggggttcgccgcgttcctttacctcgccgggttcctctccgattcctccggcggtagcgtgctcaccgagacggacaagaccaccgttctcaagctgcaggttggtttgctgggcatggccagatcatttcagaaagagcttgatcagatagctgagaaggcagatacttctaccccggcagggctgagctatgtgctaactgagacaacattggcattacttcggcatccagattgctgcatctcagcttactcatcagttgatgtgaaaagaagtatagatgatggggagaaacgttttaatcaactatcaattgaggaaagaggcaaatttgatgaagagacacttgtgaatgtgaacagcatcaagaggcagaaagcaggcagccaaagatcgagcggttttagcaacgagtacattgtgataaccatattggttgctgctgagggtgtacataagctacccagtataaatggcagcggtgacttgaagacagctctacagaagcttggtgccataccatcaagaaaaatactggcagttgaggtactatggactccacaaaatgagaatgacacattgtcagaacgagagctgctcgaagattacccgcttttaagacccctatgaaggatgcattttagattcatttttgccgtatttcagcttattaactatagctcaggttgtgttgtaaagataggtaacgtaaaaaaaattggcctacatcattctcgcaacaaaattgtacggtagtctttcctgacagtctttgtaaatagaatgccgacacatagttgaataccaattctgctcggtgca

SEQ ID NO: 38333 - DNA, 531 bp, Oryza sativa
  Clone ID: PAT_MRT4530_4197C.1
atggcaagtgacaggacatcatcagatgatgaatgttcatcaaatagcaagtcggacaacaaagtggcagattctgattatgccaactctatttcagaagaggaagaaaccagtgattctgacaaatacataacaaaaaaagatctcgtcagcacattaaaagatctggatcgatcaaaaggaaaagagctaggacagacaaaccacacacaaaacatgaataaatctagaagtgcagagtccccaaaaccaagaagcagactaaacatcacatacttttccaatttgattgaagggctcagcaacgagcaaaggttaattattgagaattctgcttttggttctcttctaaactttcaaaggtgtgctataccactatcttttgtcaaatggatagctagtcacactgatgtcagctgctcagatatagttgtcaatgggagatccataccaatcaacccaaacaccaccaacttcatacttggtatcccaaatggaggtttagagatcaagaatgacaaggttgcttag

SEQ ID NO: 38334 - DNA, 257 bp, Oryza sativa
  Clone ID: PAT_MRT4530_41980C.1
aagtaaatagatcatatattccattatatatatatatataataggagacaggatacatacattagaacttaaaatcaccggaagcgaccatcacaagctcaacacaagcagaagccgcatcagccaggagcaaacgacatgatcacccacgcttttggatggagaacaagaagaccgagaagaagatgacgaaggctgaacaccttgaccgagctaaacactggcgatcgatcaccagtcacctacttggtgaacag

SEQ ID NO: 38335 - DNA, 1101 bp, Oryza sativa
  Clone ID: PAT_MRT4530_41981C.1
atgcctgtcaccgccaccgtcgccgttcaccactgtgctcccagcttcggcggcaaacctcagcccatctgcctgggagccgaggaaaaagccccatcaccaccgtccttccactgcgcgcactcccggcagccagctcaagcaggggcgagacgggcggatgcgagcggaggggaagaatcggttgagggagatttggtggggctgacgccgggcgacggcgggcggcagggaagcaggcgtgctggcagcggggaagaggcggcgacggttgcgcgggcggcgcagctgaggtcgtgggcgacgcggtcaggcgcgtgtgagcgtcaccaacggcggttgaggccgtttgcccgaaggccggtgaggatggcgacgcggggcaagctcacggcggtggcggagcaagctcgcggcggtggcggcaccgcggagctcgcggcgacgtcggcggcggcaacggtgcgggagcacggggcgacggcgacggtggtaacggcgtggatttcatggcgatggtggcatcagcggcttgtcggcggcgacagcacggtggctggtcgacggctttggcggctgttggtggctgtggcattggggctctcgcggcggaggcagcagcgcggaactcgtggcgacggttgcggtagcggctggacgacggcgatggggctgcggctggttggcagcgaggtggccgtcggcagcagcggccgtggtggtggtgggagttggcatggtggcctcggtcggctagccgaggaggtggcagacggctgcatctggccggtgcgggagagtacggaagaggggtcggagaccggcttggcgcagaaaggcgcagccgatggcagtggaggccggctcggcgcgagaggcgcgggcggcggagatggagggcggcttggcgcgagaggcgcggccgatggagggaggccggattggcgcgagaggcgcgtccggtggaggaggccggttcggcgcggccggcagaggaggaggcgaccctggtgcgaggaggagatgccggtgggcgtggcacgatcttcggcgctcgaaggctggccggcgggggcgccagtgcgggggtcccacatgtag

SEQ ID NO: 38336 - DNA, 162 bp, Oryza sativa
  Clone ID: PAT_MRT4530_41982C.1
gatatatccaacacacgctgtctggactgtgtcggagaatttaatcgtcgagggttgctaaggaaacggaaacgggcagagcgacggacacaaatgcgcaaacaaatggagcgcactgatgctcctgccccaaatggacgctgaagggacatacgatgtgct

SEQ ID NO: 38337 - DNA, 828 bp, Oryza sativa
  Clone ID: PAT_MRT4530_41983C.1
atgggagactcaggcagcaagcctcaggcaagagtgacatgggtgacaggccgtcgaaggaaccaagaaacaattaatgatgcacccaagcacattgtgaagatacctatccgcaaagatgatcaaggcaggtcaaagcactcggctgtggtaattgaacctctacgcgatgatcatgataatagagaaaaatctacacagctcgacaaggctccaccaccagaaccttccaagagcttgctcatagaggaaactcctctatccgggccagatccaacaacttcttactggcaagcaagagcccctccgatggtggtctataacaagtttccttcgtcaccgtctatgggctcttcagaggctgtacaggttgacgatctaagcgacttctctccagaaaccaaagagaaacttcaggagaagaactctgattatatcaccaagtttgtagcacgcagcactaaccttcagctcagttctgtgtacctaatacctgatgagccactagcactgaagctcccgaagtccacacctgtcgacggtcgaaatgccaggatggtgcaaggggatttagtcgagatccaggattgcctgagaaggaagcagttcgataaggatactatcgagctgatcaagacggctgatgccgggagggctaaaatctataagcctccactccccgcggacatggcgatattgatgtctcatctagaagctcttgtgctgcgcttgaaaggagatcttcctaaaacttttgaagaaaagactttggccactcaggatggtgaagcacattcctatttggcaaagctagagggtgattgttaa

SEQ ID NO: 38338 - DNA, 1229 bp, Oryza sativa
  Clone ID: PAT_MRT4530_41984C.1
tcctagacgacacactccccccaccttcttgcgccacaagccgaagccgccggaatcctcgacgagacgccccgccgccgccgccgccgccggcgacgccccccctcaccccccgcaggcatcggagaaatataatataaatacagttaaggggttgaagcaacttcacaatgagtagcatagggactggttatgatctttccgtcaccaccttctccccagatggccgtgtcttccaggttgagtatgctggcaaggccgtcgacaacagcgggactgttgttggcatcaaatgcaaagatgggattgtccttggtgtggagaagctggtaacatcaaagatgattttgaaggggtcgaatcggagactccactctgtgcaccgacactctggcttggctgttgctggtttagctgcggatggtaggcagatagtctctagggcaaagtcagaggcagccagttatgaaaaggtgtatggagaacccatgcctgtaaaggaattggctgatcgtgtagctagctatgtacatttatgtaccctctactggtggctcaggccttttggctgtggagttattcttggaggttatgatagggatgggccacaactctacatgatcgaaccttcggggctctcctataaatacttcggtgctgccctggggaaaggaagacaggctgcaaaaacatgtgtttatgatggttcaagaaaagatgattcagcttttgaatatgttggctgtctatttgtcatgactcatgaacaatgggagatagagaaactgaatctttctgagcttacatgcagagaaggcattgttgaggttgcaaagataatctatggagtgcatgacgaagctaaagacaaagactttgaactggagctgagctgggtatgcgatgaatcaaagcgccagcatgagaaggttccagacgacctcgtggagcaggcgaaggcagccgcccaggcagcgctcgaggagatggacgcagactagaaaccgccgatcatgatgctctagaatcatatctccattactcgatgctagaccgatcgatcatctataaccatatcactacattgtgtaacagacttgaggcagctcgtcagtttcatttcaacgtagaaccacctcaagaaaagaatgttgtactatgcagctcgatcgctgtcacatattgtttgctcctgatttatgacgaaccacactccttgctgtttgctc

SEQ ID NO: 38339 - DNA, 361 bp, Oryza sativa
  unsure (1)..(361): unsure at all n locations
  Clone ID: PAT_MRT4530_41985C.1
gggggcacgccagcacggaccgggccggaancaanccccgggccgacgagcacaaaacctcaaagccgaaaannnnnnnnnnnnnnnnnnnaaaaaggggaaaggggggaaaaggggaaaaaggccccgcgccccccccaacaaccaaagagaaaancgaagcagcacgaaaaagaggacaggggccagacggaaccagngggcgaccacaaaccaggcagaaacgaaaaaaaaaggggaaaaggaacacgacgaagcccaaacaaaacacaacgggacgcgcganacacgggcgagaaaacaaaggagcgaccaaacaagagcgaggacgcaaagggagaaagccaagaagcaaagcaaa

SEQ ID NO: 38340 - DNA, 336 bp, Oryza sativa
  Clone ID: PAT_MRT4530_41986C.1
ctttattatcggctttcttaataggagctgtatatggacaaccaggagctgttacttggtatgtatatgattgtagctctacctacaacagtctagagtacaatttttgccacttatctctggacactggatattactggcaacaaaatctctatctcattgattccagcaatttacaaacagtttgtgcacctgtagttaaaaccgttaatctcgaattgaacgtttgacgcaatgttaaatccaaatttgctagttgtactggtgatagtccaattaatatggtttctgctgatggttaaacttgcacttctttaggagatttgagagttacca

SEQ ID NO: 38341 - DNA, 552 bp, Oryza sativa
  Clone ID: PAT_MRT4530_41987C.1
cctgtacaatttcaaagcttcgaattcatgaaccaggacatcmccaatggattttccagtctttctgtatccagatactcctgaaaaaacttattccgaaaatgatcctttttggggcgccagaatagttggcgccgttgtccaacgggacggcaccagcctctctggcgccgtcctcctgccaccatggtggggtggcgctgaggagcacacaagaaccaaacatacaaaaaataaactcaaatagaagaaatatgtgtgacctgtagaatttttcaaaactctaccgaaaagcttctcgcctcgtaaacataatcttgcaagcggaatttggagattctactttcgccgaacccgacgaagctagtaagaattggatataactttttctatagatgtccgtggatatattattgacctgattctaagtccaaaaaattagggggggggggcagctccagccacattggcacgctccccctgccacctcaacaccgccccgccacggccgccagagaggctgctgtcgtcccttggccggtgccgctagct

SEQ ID NO: 38342 - DNA, 588 bp, Oryza sativa
  Clone ID: PAT_MRT4530_41988C.1
gcaagggaaagatcatttctactaatagtcacaagatcctttttatcaagtagtgggaagactataagtatattccttcagttacctagcggcgctctaacaaaaataccagtatacaccaaaaaccttaggttacacggggtaaatccattaaaaaaggacaaattttagcgaaggggtctactttaggaaaaaaaacgtattagcaacttatatgccatgggaaggttacaatttcgaagacgcaatattaattagcgaatgtttggtatatgaggatatttatacttcttttcacatccgaaaatataaaattcagacagatacgacaagccaaggctctgccgaaaaaatcagcaaagaaataccacatttaaaagaacataatcaaaaatctaatgtaaatacttccaaaatccaaagtggttcaggttcagagtgctccgatattttgctgactggactgctgtcaacaagttttgttgagctaaaagccacacacaacattgaaacatgtctaattgcattccacatcagtggaaagaaccatgggaacaaaaacagaccattgaaatgggtagggggtgc

SEQ ID NO: 38343 - DNA, 457 bp, Oryza sativa
  Clone ID: PAT_MRT4530_41989C.1
agcggaggcgttcggttctagatcggaagcggcctgattcagatgctagaaccattactaagtactaaggggtatgctgagtatcctgctctatcaggtactaaatatactatggaggactaatatcatgtcatggttatatgcaccacctatttattctgacatcaaacccacagcataaccatctataatgcaatcttacggagggtaattcatatggacttcgactatatctaccatcttatgaatgagtagtcagaagcttaagtgcttgagatctcttcatacacaaatgaagaacttcacctcaacgatacttttgccgatactgacgtctaattcagctccgaggccttgagctacatcaatgcacaaagataattccattggactaaatcattcacggaatacattctatcgaaatagccttatttgggcgccatgacacttacgagct

SEQ ID NO: 38344 - DNA, 744 bp, Oryza sativa
  Clone ID: PAT_MRT4530_4198C.1
atggcaagtgacagtacatcatcagatgatgaatgttcatcaaatagcaagtcggacaacaaggtggcagattccgattatgccaactctatttcagaagaggaagaaaccagcgattctgacaaatacatctcaaaaaaagatctgttttcaggatcgatcaaaaggaaaagagggctcagcaacgagcaaaggtcaattattgagaattctgcttttggttctcttctaaactttcaaaggtgtgctataccactatcttttgtcaaatggatagctagtcacactgacgtcagctgctcagatatagttgtcaatgggagatccataccaatcaatccaaacaccaccaacttcatacttggtatcccaaatggaggtttagagatcaagcatgacaatgatgcaggaaaacatttttttcatcagcattatgggagcacaaaacccttaatttccttctttggcactaagttgcttagtgacaagggtgtgaacaaactatcagaagatgatgtcctacgttgtttcatggtggttgcactatcaacctttctttgccccaactcaggcactcaccccaacccaaaataccttgaacctctgattgatgtcaagtccagctcaaagtggaactggtcaaagtttgtttatgaatggcttatgacatacatagccaagttccaaaaggagagaaaatcaaaggaacaaacatcaaaaatgtcacgcccggaaattcactag

SEQ ID NO: 38345 - DNA, 532 bp, Oryza sativa
  unsure (1)..(532): unsure at all n locations
  Clone ID: PAT_MRT4530_41990C.1
cgtccgtgcccagcatcttgcgggcggcggcgcgagtactttaggacttagnnctggctgtgcgctgcatgannnctagtaggggatcacacnncgttgctnnngtgttgcnnatgcaacgnagnannnagtgatcannaaacaaataatnngaataatnnnaaatgtttnntgaaaacataaaaaaaaaaaaaaaaaaaaaaanaaagagaggaaaagaanaagggaaaagaaaaaaaaaatataaaaaaatccaagacttacaaaacaacatagcatagcaacataataaactatataaataaaaaaaaaaaaaaatagggggggctcgtttttgggtttccaacttttcttcccggtaaaaccctggctttaccttttttaatgggctcccaaaataaaaccctggggccgggtttttaaaaagtggggaggggaaaacccttggggttccccaattaattccctttgctgaatatccattttcacccgcccgggngaatcccattaagcccggctcgtgtggcctttc

SEQ ID NO: 38346 - DNA, 526 bp, Oryza sativa
  Clone ID: PAT_MRT4530_41991C.1
agacaaagcaggcacgcctgcatgagctgggacgcaatacagcggccgacctacgcgttcgatacagcaaaatagaaagatctagtgaaccgcagcagagaaggtcattttctaattagatctcctagctattgctgcatgcaatggctctgcgcattttgatgttttaagccaaagatatacgcaatatcagctgcagatgcctgtactgctacagcagacaggagcttaaccgatataacgagttcgcatgggacaagtacgacatatcggaaagccgctaattgcaatcagatgtggttcaactgacaaacaaccaagtctggcaacagctcgagctggcggcgcagcaatctgactatcaggacattaacattggtcaggccataaagaaccagctactactccagcaatttggagatctctactttgatcggaatctggctcaagctcaagctctggtggctataaacgtgccacctagatatgatatataccctaagaactatgctgcaaagaggaccat

SEQ ID NO: 38347 - DNA, 618 bp, Oryza sativa
  Clone ID: PAT_MRT4530_41992C.1
atgattggcccctccattccaatttccaagtgtgaccatgttcatcatgggggaaaaagggacaaaatattggatagaaaagaggccacgactggtgggcgcgaaggcggctgcgggcagcgggtgggagaggagtcgaggcgggctgggacggaggcggcagcgggcggggacggaggcagctgcgggcgaggagccgaggccggaggtgagcgggcacagaggccgcggcgggtggcgggtgaggagctgaggagttcgccgccgcgcgacctgtgcccacacccgagagagagggaatctcgtcgagctccacgttcgccccaactcggcctccgtggcgtgcagccgccacccggtagcgccctccaccgccgacaccactatgcgcaggacaaatcgctccaaattagaccgaaggagatcgagcggcggcagcggcagatcgaggtgcggtggcgcgaggtagttggcctcaatgtcccggggctacgcgctatgccaggatgcggtctcggccaagctaacgtgaatatactcctcgcgaggggggtgaggcaaggcaggcagaggccaggaatcatgacagcagaaaacactgatgtgatgcgtaactga

SEQ ID NO: 38348 - DNA, 530 bp, Oryza sativa
  Clone ID: PAT_MRT4530_41993C.1
ttttttttttttttgctttttttcttgttttcttgccttcttgcctccggttctagatcgcgagcgggccctttgcttctctttttgaattcatgccttcaagcatctgatatacccacaccacatcacatttgccgcccggagttctgcactgaccacacgactatgtgcacaaccactttcctctactataaacacttgatcatcttaaactgaatactgatccacattggggtacaactagcaaggacgcagtgtactcatatgcaagtgcaaccgaatatttacagacccccccatatatagggtcagtttggagctagcgctcatatgggcttccacgcagttatgacctcttggaacatttccagagccagctcacgatctgcgtgctggaagaagctattgatctcctccctcccagccactatcttcccaaaaacaaacaggtaggtcaggcaccctttcttcagcttttgcagctggtacagccacgcgacgtgaagcctctcgaggacattgctagagtt

SEQ ID NO: 38349 - DNA, 348 bp, Oryza sativa
  Clone ID: PAT_MRT4530_41994C.1
atgaccgcgccgccgctcgtcgtccacgaggaagatgaggtcgcgggcgaactccacgaagaagatggaagcggcggcggcgcacaagaagaggaggtccaagtccgcctccgactgagctccatgcccgccaccgtcgagcatccgtcgctgccgagagggaccaagttcgtcatcatcgagcatccatcgctgccgaggagggtagggggagggttggccgcgcattccggcgccgacgaggagaggaaggggcgggagagttgccgctcgctcctcgccgccggcgccgcttgggccacgccgctcgaccgctcaggccgcttcgccggtgcagtcgccgcttga

SEQ ID NO: 38350 - DNA, 294 bp, Oryza sativa
  Clone ID: PAT_MRT4530_41995C.1
tcaagtgcaggtccttctgcagatagtgcggagaaagtaaaagggcctccccaaaagaagccgacaacaataacagatgaagagaagatcctaaggataaagtctgttgaatattctctaccatcggtgaagctctcctggcgtgatgctaacgggatcacacatggtgtcatcctcaacaagcagaaggaggaagatcgccattaaaagcgggtggcgcacttggacactctggaagatgttcaaaaacaactaaaggatgccaaggatgcaactaaagctcgagaggcctag

SEQ ID NO: 38351 - DNA, 4845 bp, Oryza sativa
  Clone ID: PAT_MRT4530_41996C.1
aaactatcccttctgcaacgcttaacctatcccacgcaaaggcaagaatgtccaaagaaaatacagagaatttatatgtacaggcgagaaaggcatctttgtatatcctcaaacaggtaaatccacccatgttgccgttcacccgagcgacctgaggcggagcaagatttctggtaaagatcccacaccatacattcatctgtttcgttctctcgttcacattaactcagtttgcaccgttctacaacttcagcccaattggatcatcgtttgcttggaaccctttgtagcagcaaaagactggccagccccacttgacgcttgtactttctggctgtgaagaccaaggaaacaaacgtcttctggcctttcttgagacaagattaaccatcttgatctcagctgctcctatccaccaggctcttgtggttcatgggcctgtgtatttcgattccgcaacttgtctttagaaagagagtcacgaggaacatatgcataccccttcggaagacgttggttctgtgtagaagcttgatcagatgtcataaaaagctccttttgaaatgtttccctattcttcttatccttcgtcttcttttctccagcttccaatttctgtgaggtaactggtcttcgcgggagctgcttaccagcaagtgatcctctttcactaaacttccgtttgaacgatatcagtgtccttgagctatcagctgtgtttatctcagcatccctgttattcagagaaaacctgatcgcctttttcccagaaatagtactgtccactgtgacatcatcagacctttgcatggttccactgtatgatttgttgttaacagaagtagtggcagattctgaacttgctccatgtgtaaggtaggagaaaacaagagtatccttcgttttggcaagtatgtcatgatcacatagaaccctctcacgcttcaccttttctctcttaattatcctctcgcacaagagtcgcaatttttccaactcaaccctcattcttttcatgttgttgaactcctcaagtccatactgttgcatatcagcctccttttgctctatgctgtgtttgctacaatatgccttgtgttgcaaaataccaccagatccttttgtgttcatgtagaaaccagcatgtctagcacaataaggatgaaaagtggtttggcagtccccattattgcactttagacatgcgccaacagtatgaaggcagacacagcaagtatctttgtcctttacaagactttccattcctttgactggactatcttgtcccctcacatactcagtctccaacaaccactcagcacagaaagcatgaatccactgtccatctgcagtctttctaaatgcacctgatgtgccatggcacagatcacactgcactaaggacaggtttgtgccattgcaatctgattgatcaccaacacaagtgtcttctggtgaaatatcttcgcaaagttcacacttccaggggccagaaatattctcaatatttctatagcaacctatgtggactgcagccttgcatctggagcagacaaatatccggttcaacacagtctcacttcgcatgcatacatcacagtatagtgcattttctttggaataatttggcatatgaaaagtgctgcggttattatcttgtgaaattttgttgttgggtggctttgacaaatccttgagtcgtagtagtgaagaagtccgctggccaacgtttggaggtccagtgccaaattttggagaattctcttgcttagcaggtactacatcatcattggcatcttttctcacagttgagttacgtgaggaggccacaactgcagctgcagctgcagccagaatggcctgggcttctttatgtctcttctcttttctcccacgtttcttagcttctctaacatcacggagaaactgattgacaaaaataaaatcccattttctcctactgaaagcatccaactcacgagagagattctggacaacctttgctattaaatcttcatatctgtgcttcagaaaggcagcagtgtcaagtagcctggcttgcaagtacagcatttccccttctacttcatcatcaggtgagtgctcaaggatacccaaggattttgctcttgaaacttgatccatcacatctgttgtttctgtaagttttatcgaggaacccacacgccttctctcatcgggataacataacggatcttcagggtgacatggtgccagcttatcttgcttgaacgtgttgtcccaaagctgagtcatcttttccttgatgagtggatggatataatagtgtgaatcattgaagttggaaaagggctgtccaggaacatgatctgcgttgcaatcatggttattcccaacaccattttcaaccaagtttaactcatgttttacattatcacctggaggaaaatattgattcaatgaagagacaccctccagctccgagccaggttcagcctcagttaagttatatcttttctttccaggagatgtacctttattttcatttggtatcgccatggaagttccaaattgtgtattgccagagatgttgttcgatatcaatcctccatgctcttcctttggagtacctttagcacaatcttcagcaggggaagaacactcacgctcagcgcctgcttcagccatcttttttattccattctgcaaaagggttgttactccagttgcacagacagctgtgttatccctcataatcttgttattatctttagatcttgttgatgaggatttcatcacagcagaatctgacaagtaagctgttgttcctttctcatcattcggaaccaatgaattcttcatgtttacactatttgtatcctcagacctgcctggtttgctattatgcaccaccattgggccccctttaagaatctttgcctgagcagctggtatatgtgcagaattttggagccacttgataattttcagtttcagaccatgggaaaaagtggtggtttcacccacaagagcagcttccaaagattctgaagaaatacccacttcagatgctacatcaccaacactaacctttccttgatcaattagctttctaagaacaagagcaacatcagcagagtttctcataaggttcccaccaaccgagagattgtcagtatccacttccatcccttggattgctagggaatctgaacttctaacagtgtggggtaaagaggcttgctctatggtctctactttgataaggttactagagttaaagctagtggcttcatagttcatgaatttatccttgttcttgcgcgtgaatcttagttttggtacctttccagtgataaggtttgcatcttttagccttgcttctgtaggactctggtgagatgcacagttacttctctctagagaattggcatatccaatagtagaatgctttgagcaaaatgctctcagctcgacattaggatacccaaattttccccatatctccatttgatgcttggactctcgtgcacatataggatgaaaaggtgttcggcatgttccatgactacatcggacacatacaccatgcttaaccttgcaaatgctgcacaccaatttccactgattctcctggacacttccaacattagtaacaggttccattgattccatgtcttccacaagagctcccggtgtccaaaggctacaaaacaagtgcacaaatttaaggttccccccatgcgctgtttgaccaggctcccctttgacaggttttagagcgcctttctcttttgggcatagaacacaaggcatcgacaaggtgttgtccgcatctttcttcaacgactgcagtgactccaaatccttacaccaagtgcacaaccactggccatcaggcacaacatgcaaaccataacacttctggtgcacagttaccttacagcggttgcaattgagcatgctattggacaccgtactactctcccccaaacaacaaacatcacatacagaactagcctcagctcccgagcgcggtagcagaacaagctgctctaaccctgcatccacacctaaaagcttcctcttcttgttgggccgttctgaagtgagcacaaaccgttcctttgatcctagcaaccaattcagtgatgattctccctcttcttcacattttgatgatacaatgccagcactgctagtagcttgctccacttccaatggccaattctcctgttgcacaaccacctcatgtatgccctgctctacactctgctcaccgcgttccttgttaccaacgaactgtcgcacaatcacctcatgtatgccttgctcaacactttgctcacttcgctcactccgttcgctatgctccttgttactgactctttcttcaccacccagacccaagtacgagcttgtttcagccacagccacatcaaatgtctcagctgtgtccatcaattccttgccactgcccacaaatggtatgaggatgcacgaatcgagcccgccatagccgaacggaaactttggcattaacatatcaatatcatccaaattcaccggccggaaatacgcctcgaactgctcccacacgccagtcttcgcagagggctccgtggctggctgcggcgggagctccacatcagccacgtcctggggctgaatcttcttgtgcttcttccgcgcgtcgctctgccccgaccagttcacgagccgcgcgggcagcgtgggaaccctaggcgccgtcccctcgccctcgaacggcgtccgcaccgacagggccttcctggcctgcgcgtacaggtccaccccgacgcccggggcggccccctccggcaagccctcggcgcgggccat

SEQ ID NO: 38352 - DNA, 858 bp, Oryza sativa
  Clone ID: PAT_MRT4530_41997C.1
agactggtcaccggggggcgaaatgcccacctgaatatattacttcgaacgatcttacacaggacaggcttcacctgcgtaaatgcaggagccctggaggataataagaaagaatacacggggatatatagagaagagaatacagacgcatcacaacctccccaccacgcacacagaggcacagagataaactgagaagctttgacgtttgccacctgcaaaaacgcccgatcaaattccaaatcaaactaatgctagaaccctaattgaacatcatccacatcgcatgcagacttgaaacaccaagaatcgaaggtgccggagggcctcattgccacgcgcaggccggctcagttctctggcagtcgaaagactgtggatatcgaagaccacccgtatcaagccgtcagaaatacgacttagtcatgttgctgcttgaatcaatgtcccccaacgtctattgggggaaggaagccccaaaggaggctaggccactgaaggatggggtcataggccaccctcatcaagtcgtcttcaatcgggctttaacaaattgctagccagtttaacgcccttcgagggaaggaagccccaaaggaggaagggccgctgaacattgcagttagggacacccaagcggagagggtgaaggcgatccgggggattggcaaagacggcagcgttgtcactaaggcgaccacatcggcagcacacacccaacgactccacagtggagcagcccgagttcatccactgccgccctacacacagcccctcggtcgctgctgatccaaccaaaacggggaaggtgaatctggccaccggcgacacgcggagtcgcaacccaccgcacgacat

SEQ ID NO: 38353 - DNA, 170 bp, Oryza sativa
  Clone ID: PAT_MRT4530_41998C.1
atgctcatcggcgcgctgcgcacggacgttttcatccgctttggattcgtccgggaggagcaggcgctgccggacatggagcatggctccagcggccggagtacggcgaccggcagggaggaaatggcgccgccgtctggtgacgcccaacctcctctttcacctctgga

SEQ ID NO: 38354 - DNA, 1567 bp, Oryza sativa
  Clone ID: PAT_MRT4530_41999C.1
agactggtaccagggggcgaaatgcccacctgaatatatacttccacgatcttacacagggcaggtttcacctgcgtaaatacaggagccctggaggataataagaaagaatacacgggggtatacagagaagagaatacagacgcatcacaacctccctaccacgcactgagaagctttgacgtttgccacctgcaaaaacacccgaccaaattccaaatcaaactaatgctagaaccctaattgaacatcatccacttcgcatgcagacttgaaacaccaagaatcgaaggtgccggagggcctcagtgccacgcgcataccggcttggttctctggcagtcgaaagactgtggttatcgaagaccacccgcatcaagccgtcagaagtacgacttagtcatgttgctacttgaatcaatgccccccgacgtctattgggggaaggaagccccaaaagagggaaggccactaaaggttgaggccataggccacccgcatcaagccgtcttcaatcgggctttaacaaattgctatccagttcaacgcccttcgggggaaggaagccccaaaggaggaagggccgctaaacattgcagtcagggacacccaagcggacagggtgaagggcgatcaggggactgaacaaaagagaaatgaaagagatggggatcctacagatggatgaaacatcaacaagagagaacaaagatcgggagcatcacaaccgccgaagaagcacatgttccaaccaacagacaaacccaagcgagccaaggagaagcatgctagaattgaggagatttagaggaggcaacaagcaccagcgaactcctagacatgcaattttgggctgagctggtcgtggcaaggctcaaaatgcttccaaccgccgggtagacaagaagaaaagggaattgagcagacattggcaaagacggcagcgttgtcactaaggcgaccacatcggcagcacacacccaacgactccacagtggagcagcccgagttcatccactgccgccctacacacagcccctcggtcgctgctgatccaaccaaaacggggaaggtgaatctggccaccggcgacacgcggagtcgcaacccaccgcacgacattgcaggtagcaagccgtccggcccatccccaccgcacaacctcgccagaaggcggaagcagcaagccgtcggcaagctccaactccgacgggaccgaaggggaggaggagcgtggtaggaggcggatcccccacccaccaccacggccggctgccgtcgccggaggctgcaacagggctgggagacaagacaccgagtagaagagttttggatgtggaaaaggaaaagagagaaaggaagaaggcgacggtggaaggaggtcgtggtgtttgggtggggggagggggggcgccggcggcggcaccgccccaacgggcgtagcgtcgccggtggcgacgaggcggtgtacgcgtgggaacggctggccttggtgacggtcgcctcgcctcccggggtgcctggagagagcgacacgggagattgcctgcagcccggggatccacta

SEQ ID NO: 38355 - DNA, 446 bp, Oryza sativa
  Clone ID: PAT_MRT4530_4199C.1
tgcacttcgacctttttaacccgtgggtgtggcgaaacctattcacccccagcccttgacgccgtaccttattggcactatggcgaagggcgtgggtgggcgaaacctgttcgcccgcagcccttgacgccgcaccttaatggtattgtggcgaagggtctgggtgtggcggaacctattcgcccccagcccttgacgccgtaccttattggtattgtggcgaagggcctgggtgtggcgaaacttattcgcccccagcccttgacgccgtaccttattggtattgtggcgaagggtgtgggtgtggcgaaaggacgccatgccttattggtaatatggcgaagagcgtggcgtgtggcgaaacctagtcgcccgcagcccttgacgccgtaccttattggtactatggcgaagggcgtgggtgggcgaaacctattcgcccgcag

SEQ ID NO: 38356 - DNA, 925 bp, Oryza sativa
  Clone ID: PAT_MRT4530_419C.1
ggccgcgggttttttttttttttttttttttaaaatcaacgcaaatcacacaggacagaccacagcaaacaatttagagtacagaatgattataataaacaaaatctcgatgcacattactagaagtttaacgttcagaatattgaatgcataagggttttatggcattctccagacaaaggaaaattagcagctcctgcttgtctcaagactcataatgcgctacataaataaaatccattcctagaacaagctaagcttgaagcagcaaggagcacagcagaagcagagctctctctctaggccaccagagtgctggctgtggtcgactcatacttccaggtgggcgggagcttcttggtgcgcttgtagtagcgagcgaggcggtggatcctgctctcaacaaggatgagcctaaacttggagtccttgtccttcctgttcctctccaaatgcttcctaatagcaacagccttcttgatcaggaagtacaggtcctccgggatctccggcgcaagaccatgggccttgaggatgcggaggatcttgctgccggtgacgctcttgacgagggggattccgtgctggtcacggagcaccacgccgatctgcgacggcatctggcccttcttcgcggccttcatgatcatctcctccacatcggcggcggcggtcttgacccagcttgggggagtcctcttgtacggaatcgccgacgacgagatgcccttcccgcggctgtgcatacgccccatggtggcagtggggaatttggcgacggcgaccggcgacggcggttggcgactgcgcggcggaggaggcggcggcggcgggaagagcgagtagtgagcggggtggcggcgcgagcccggccgggtaaggctagggtttggggtggctacttatgtgagtgtatcccggccgg

SEQ ID NO: 38357 - DNA, 171 bp, Oryza sativa
  Clone ID: PAT_MRT4530_41C.1
atggacaaggttaacaacatcacgacatcacacaaagacaaaactcgagatccccagacttttagagggcccgaggatgaggaggcaattctcgtaggtcacgagaatgttgtccatttgtttctctggattcccttcaagtggtcgaggtcgaggtacgactacgactag

SEQ ID NO: 38358 - DNA, 234 bp, Oryza sativa
  Clone ID: PAT_MRT4530_42000C.1
atgcgtcgacggcgcacacggtcggaggacgccgggacgacggctcgcgtggcgggagggcggcgggacgacggctcagcggccggagggtggtgggacggcggtgcaggactgcaggccggcggcgcacagaggccgctcgcgtggagagatgcgagagaaggaaaggggatcgaaactacgcgttcgactggcgtacgactcaacggcgaattacacggcgtgaggcagtac

SEQ ID NO: 38359 - DNA, 398 bp, Oryza sativa
  Clone ID: PAT_MRT4530_42001C.1
atcccctttcctctacttcctcatccagactctctctctctctcgtcgtccacacgacgccgcctgtcaacgcagtgagcaccatgaccacctgcgaacggctgaagatgtggtgccgtttgaccaccaggctgatcacgatcctgaacactactgacattacctccccgccgccatggctgacggcggtgctgtcggcgtgccaacactacctcaccatgctcagcgccaccgctatctttcccaccatcctcatgcccctcatgggcggcgtccatgtggataaggcgatcgtgtcgcagaccatccgtgttcctctccgccacctacatggtgctgaagtggcacctctgtacgcgcttccccgcccgctcggttgcctcctacgcctacttcta

SEQ ID NO: 38360 - DNA, 213 bp, Oryza sativa
  Clone ID: PAT_MRT4530_42002C.1
gcgtctactcctattaaaaggacgcgcgatagggacacctgcattgtatcatggccatcacaacgacagcctttggggtgactatacccttgatcatctaacatcgcaagcccttgattaggcttacggtctcaaagactccaatgtaagactatttcccgaactaaatacagaccaccttgcgactgcgaactacccttaatagaacaaata

SEQ ID NO: 38361 - DNA, 338 bp, Oryza sativa
  Clone ID: PAT_MRT4530_42003C.1
agtaccccaacgaagactggtccgacacaccgggcgtcaaggctcgcgagtaccgcgaggactgggaataccgttggtccgccatcttcggtccctacgacacaatctcgcctataccacccatgcgctatacacaccgtaaggacgactctatgccgagacatatttcagtccgtcacactctgcagatcatctcggtcaaaataaagggaataagagggggcttacagtggccgatcaatgtgtttggtctcattgctgcgcgcgacacgattgaccgcaaccgcattatgatcttcaaccgcaccagggataactgccaaacaattactaaagag

SEQ ID NO: 38362 - DNA, 255 bp, Oryza sativa
  Clone ID: PAT_MRT4530_42004C.1
atggtagcagcggtggccgtccaacgagggagctcgaggagggaggaaggaaagacgggagggagagaggagaaggggaatgaggcattgtcggccatggcaaaagaagcgagtaggagcgctccagcctccagcgctcccgaaggcggcaacccggcggtgagggagcttgaggagggaggagggatggctaggagggagaggggagaaggaggcgtcgccacactgccggccgcggcgcctgcgaggaggtag

SEQ ID NO: 38363 - DNA, 1177 bp, Oryza sativa
  Clone ID: PAT_MRT4530_42005C.1
ttgaaactattattctatacttttgagcaattatccggtcttaagattaatttcaataaaaattaattgtattgctttggcgaagctaaaatttttgagaatcaatacactgagctctttggatgttctataggcaaatttccatatcggtatttgggcatacctatatattataggaagctaagaaatacatattggaaaggggtggaggaactttttgagaaaaggctcagtagttggcaaggtaaactcctgtccaccggaggacgactaacattgattaattcagtgcttagcagcctcccgatgtacatgtcatatttttttgctatcccaaggggataattaaactacttaagctctaggttcttctggcagagtgatggtcaaaaaaaaaagtatcgcttggctaaatggaacgtaatgtgctgccccaaagaacaaggggactaggaattcatgacctagacataaagaatacaactttactcagtaagtgactattcaagctgcttactacagatggtatttgacaacaactgattcggaacaaatatttgggtaataaaccactttcgcaagctcaatgaaaggcttgggactcagatttttgggctagcctcgtgaaggtaaaattgattttcttcgttttgggtccttgattatcaagatgactcccaagttaggttcttggaagacaagtggttgggaaattcaacactaagagatcaatatccttgcctctacaatattgttaggcataaacaaatgactgtcgcagaagtcttccaaaccaacctcctaaacttttcatggagaagagacctagtaggatcaaaattggtggcatggaataatttattaccacgcatcgccaatatacaattaagtgaagagcaagatgaatttcgatggaacctaaccccaaatggggagttttctatgaaatctcattatcttgcttcgttcacagtgatgttccgaacgtaaacaagggtctttagaaactaaaaatcccaaagtgaagattttcctatggtatttacatcgtggagtattgacaaaggtatagccaaacgaaactaacaagttagtaagaattgttgtttttgtcacaaagaggagacgattagacatcttttcaatgaatgctgccttgcaaattctgtttcatcta

SEQ ID NO: 38364 - DNA, 399 bp, Oryza sativa
  Clone ID: PAT_MRT4530_42006C.1
atggcatgcggcggccgggcgaggagggaggcggcgctcggcagctgggcgaggagggagacgcggacgcttgctccgcccctcttccgctgcctcaacgtcgatccccctcgacttcatgtcgagaacgaacgagcgagtgaggcggcgacctcggccggtgagcacgcctgccaccactccgcccgccgtctgccgtccctctgctccgcccgccacccgccaccgctccgcccaccgctcgccgccgctcccgccgcccctctgctccgcctgctgtgcagcgctcctctgctccacgcgccacccgccaccgctccgcccaccgcccgccgtcgctccgtcaacagcccaccacccgtcaccccctctgtgctgccgccgctcgccttcttgtag

SEQ ID NO: 38365 - DNA, 120 bp, Oryza sativa
  Clone ID: PAT_MRT4530_42007C.1
atggagttgttcccagtaaatatcgcggtggaatctgttttgcaaatatatggaacaatatgctgctacgatgtcagcgtgattattgccaagagtgcctactacggcaagggcatagag

SEQ ID NO: 38366 - DNA, 355 bp, Oryza sativa
  unsure (1)..(355): unsure at all n locations
  Clone ID: PAT_MRT4530_42008C.1
aagcaaccagaaaaggcggcctctgtacacccacactccgctcccctcctgctgctactccagtccagtccagtccagcgcactcctcactcaacaactctccctcgatactctccccccgcaccaagaaaccacggaatcctcctcctcgatccctcccaatccccaatcccagcatccccgagatccgcctcccagcgcgatcccaacctcatggcgtngccgccggggaagaagggggaaggcggcggcgatggcggcggcgggaaggcggagtggctgatcttacgcgttcgtgggcgcgcgggacggcggttcttggcggagttaaaccgagttnaaccggaaattttcc

SEQ ID NO: 38367 - DNA, 2112 bp, Oryza sativa
  Clone ID: PAT_MRT4530_42009C.1
tcatcttatgagccgattgatgagtaccaaaatttcttcatgaacttcgctgactgcaactttagcctgatcggcagtcaaacacttaagtaacactccatcaatcgtccgataataaagctcatcatccaacagagtatactttaatgccttatatctcaatttcctagaagccgattgagacggattatgcaaatactgatgcacatcatacctccaatcatcggctgtcattgctgcaatttcaaccttaacatctttgatcatgagcttataccctgatgccccttgggccaaatcattagcttcaatattttgttctcgagagacatgctttaaagtaaccagccgaaactccttcattagttgttggcacttctcattataaaccatcaatgtatcattcttgcattcatactctcctgccaattgactgattactagcaaagaatcccccatgatttcaatggtatcggcttcaacttccttgagtaattgcaaccctttgagcactgcctcatactcagcttgattattagtcgcatacggtttaatggtataagcaaactcgaaacatgccccttctacaatagcatgggcatcttgagcatcagttccagagatgactttcagggacttggttaggtcagcaacatttttgatagccgatttgagccttgctttttgttcttcaattgattttggaagatcggctagctttttgtgttccatatctagctcggcattgcattcttcaagttgcgccaagagctcaatcttgcgagcttcgagccgatcaatattggatttgattggacggcgttcggctagtcttagcttggctttttccagcttgaactgatgttgctcgagataagcggctggagttaggacatcagccagatcttcgggaatcagagcttgaacttcatgcagccgcgtcctaattgacccacagtcaactaccaaactgtctaaagaagaggcttctagccgatgagcgatgtcttcaagtgtttttctcacatcatcggataggggagcttgggctttgcttgaagtgtcttcttctgcctcatcaaggtaatctctgatgtcaaaagagaagagatcagctagagctgggatagcagaagcagctggttgttcttcctcttcgacgtgatgactccccacagccgatggagtctgattacttgacgattgctgtacaggaggagaaggaggaggaagtggtggagccgatttaacaattgttgctgctggttttttcttcacagcagttttcttcttctggggtatgacgttattgaatagatctatcatatacattgcagccgattgatgaaatagatgcagcttccattcaccccaccatctgtcaaaatttttgcttctaaatcctgccaactcaatattatcaatactgcccagagggggtcctggtaggttaagtagccgatccatcattagagtggatgcgatttgtcctcggcactgaatattgtcggcaaagaataagccgattgggagttgacccaatccaagtcgtctggccaagctcattgggtgataaaactcgtaggagacttggatgtttctcccttggtgaatgccgactgggaggatgcatgggctgattgcagctataggaatttctctggatttttggaattttcgatgattaatgtcttcaaatctaaagtctgatggaagttcaaggtctgctgagtcttcataaggaaaccagattcgtgcatctttcttaaaaccttcgtagaagctgcagaaccagtccttttgtagctcagccgatagcttcgctccagcatcggttgatgtggatgcatattctccatatgacatgcatctgcgatgggtgcgctcttctccgtcatcttccacaatcggctctggcaatgggaattcagcttctgtcacagagggtcgattgacaatgttcatgactatcaggtttaaccaagtttgcagcagccaccatggtccacctgctccaactattgagccgacggctattttagcagatgcattgttcaacatctcagcgtactcggccgatggtgcagtagaagggctggtggaagacgacat

SEQ ID NO: 38368 - DNA, 2601 bp, Oryza sativa
  Clone ID: PAT_MRT4530_4200C.1
atggcaagtgacatgacatcatcagatgacgacagttcatcaaatagcaagtcggacaacaaggtggcagattccgattatgccaactctatttcagaagaggaagaaaccagcgattctgacaaatacatcacaaaaaaagatctcgtcagcacattaaaagatctgttttcaggatcgatcaaaaggaaaagaggtaggacagacaaaccagtaaggagacaaaaacaaaagcgcacaaaacttgaatatgaccaagatcaatctggaagtgcagagtccccaaaaccaagaagcagactaaacatcacatacttttccaatttgattgaagggctcagcaacgagcaaaggacaattattgagaaatctgcttttggttcacttctaaactttcaaaggtgtgctatactactatcttttgtcaaatggatagctagtcacactgactttagctgctcagatatagttgtcaatgggagatccataccaatcaatccaaacaccaccaacttcatacttggtatcccaaatggaggtttagcgatcaagcatgacaatgatgtaggaaaacatttttttcatcagcattatgggagcacaaaacccttaatttccttctttggcactaagttgcttagcgacaagggtgtgaacaaactatcagaagatgatgtcctacgttgtttcatggtggttgcactatcaacctttctttgccccaacttagacactcaccctagcccaaaatacctcgaacctctgattgatgtcaagtccagctcaaagtggaactggtcaaagtttgtttatgaatggcttatgacatacatagccaagttccaaaaggagagtaaatcaaaggaacaaacatcaaaaacccttggcggctgcggacacttacttgctattaaatatcttgatttcaaagattttggaattagaagtattccaattggtccaccaccaagaatctctgtttggaaaggcggaatgataaaagagtattcaaaaatggatgaatgcaaaacaggagattttggaaagcgactaatcaaagcaatggagaaattaagttatgacgcaatatgttcaggggcccgctgcattaagcaacagggcaacaatagcaacatgtcatgcagcgatgctctccagcaataccatagcaaatcatttaacccaaggcttgcaagtggttcacaagagaacattctgacacaacatatgaaaaaaaatgcacaactagctgccaaggttttggattgcgtctacatgtcaaaagcaagcctattcacacaaaaagatagcaccacaacaagggaagagaagagtggagaagagaagagcaaggggggaagcaagcagggtgccagcaatgtagcacataatggtaatgccccacccctagaacaaaaaaaccaaaacaacactgatgtctgttcccaactacccaagacaccacaaacaaaatcaactgcagagcataaaacaaagtctaacatcaacaacaccagcactagcaaaggagcaccccctacagataaaaaagcatccagtaaggactttgtttgtagtcagcaatcaaacaactctgtggcatccaggactagagctaagagattacattcagcatcccctttgtcggttgtatcaattagcccatcgaaaaaaaattcttctgaccaaaagattcgcaaagcagtaaggaaacaggtgcagcccactaaggatcttgaaagcaactctacagagtttgttatcgatatagagggtccatatgatattgaagacataacaggtcacacaatggataagacgaagttcattcttgtgaattattcaaactcttcagaagatcataagagccaagatcctacacaagatgaatcagacaacattccacacaagagcacaaatcaacccaaatttgaatgcttatatcattttgatgataaatcaaaagcaaacaaaagtgccagccttgggcacttcttgtcccaaacaacatcagcaaacttcactgcaaacatggggaataggaggcttgagggacaacactgtgatgaaaacgagtaccaagatgactttgcagaattcttatatgaagaggaaccatcagataacatcgatatggttgaacaacgtgcgcaaccacaaataaacaatgagcaaagtagccctcaaacaccactgcacataaacattgcttctgcaaggacacctgctacaaaacaagtaatgcaaattgtttatttcttgaagaattgggaaggtgctggaaaagaggaagactatgaaaattgcgcaagacaagcttttacatttgccaggaacaagaaacctctgcactactatgacttgcttattttcccatgtctgtatgacaatcattggtttgtgtttactgtggacatcaaggggcatcactttatcttcctggactccatttatgatgaaaatagcaaatatcataagaaaattcaagggctattgataccaggattcattgcaatgtgggaagaattctcagatgtggagaaatactttagtaaatttgatatccaatacccaccaattactcgccaaaacaatgggtaa

SEQ ID NO: 38369 - DNA, 456 bp, Oryza sativa
  Clone ID: PAT_MRT4530_42010C.1
atggcggtccacccgctgctccgccttctcctcctccggccaccgccaccgccgccgccgccgcctcccaactcaccacccttcgccaccacacgccgcgcttcctccgcctccgccgccgccgcagcggcgctcctcctcctcgcggcctcccctcggccgcgccccgcccgcgccgaccccggcggcggaggcggcgaggacatcgacgaggcccgcgttgtgcgcctcttccaggaggcgtcgccgtcggtggtgttcatcaaggacctcgtcgtcgggcggacgccgggacggggaggcgggcaagcggtggaggcggaggacggcgaggaggggggcgccacggtggaggggaccggctctgggttcgtctgggacaccgcgggccacattgtgagcaagcaccgaccatctccatttcacccccaaaaagatatcatcatcttgttttaa

SEQ ID NO: 38370 - DNA, 2157 bp, Oryza sativa
  Clone ID: PAT_MRT4530_42011C.1
atgtcgtcttccactagcccgtctactgcgccatcagccgagtacgctgagcacctttccaacctagttgcgattcccagcctatcgcacgaaaaccactattttcttggcccaatcggcaatcttgaccccactgatttcatctttggtgaaaccaacagaatcccctttagactagccaaccctaacttgggtcactgcaagaataccttcaagtcttggccatctctcgaaaagcctacccctgataagagctggaccacccggtaccaacgcatatcggctagtaagaaaacccactgggatgagattgggatcggccaagtgcttgctctcaccatagccaattctgctaaggatgaacctctgatggctgccgccacctatttttggtctaacaccatcaatgccttcttatttaaccaagggccgatgactccaactttgatcgacatcatcatgattactggattaaatgtaacttcatcggctaaccctatgagtatgaacaccaagaaccaatttgacttcaagaccaaaagcataggagggtggtctggttatgtagcggcatacatgggcaaagggcctgtcactcctcgggagcatgtagctttcttgctaatgtggctagaaaagtttttcttctgtggatccagctgtggtcccacaaccaattggcaatttgtagccgaagccttagaatcaaagaaacaatttcctttgggcaaaatccttctcggctatctataccaaatgttgaacaatgcatcggctaagatagccgtcggctcaatagttggagcagaagctgaattcccaaggttggagccaattgtagaagacgatggagaagaacgcacccatcacagatgcatgtcatatggagaatatgcatccacaccagccgatgctggggcaaaactatcgactgagctgctcaaagattggttctgcagcttttatgaaggcttccagaaagatgcccgagtttggtttctttatgaagacttagcagaccttgagctcccattaaacttcagatttgaagacatcaatcatgaaatatatcaaacatccagggaagtctttacagctgcaatcagcccatgcatcctacctgtcggacctcccttaggcagtatcaacaatattgagttagcaggattcaggttcaggaactttggcagatggtggggtgaatggaagttgcatctatttcatcaatcagccacaatgtacatgatagatctattccctgacgtcataccccagacaacagaatcctcccctccacatcagagcaatagtggtaggaacattgaatatgccccaggtctgattcctaatggaggcgaattgtctccccctgtcatcggctatcacgtccccaaggtcttgaccctcctccaaggcgccatcagggaaccaactgatgtaaccaagaaaagaaaaactagatcatcgactgtgagtaccttgactctagctccaaagaaaaaggccaagtctaagaaaaccaagccaaccgacgacctgcctgctttggatccatccattgaacaagctctggatgaagaagatattgatgatgatgttgatcaggctgcagccgaacctcctcctcctccttcttctcctgtacaacaatcatcaagtgaccgaactccatcggccgtggggagtcatcatattgtggaagaagaacaaccggctgctcctgctatcccagttctagccgatttcttttcttttgatatcaaagattatcttgatgaggcagaagaagatacttcaagcaaagctctagctcccttatctgaagatgcaaagaaaacacttgaagatatctcgcatcggctagaggcctcttctctggatagcttagtgcttgaagcccgcaaaatcgatctcttggcacaacttgaagaatgcaatgctgaattggatatggagcacaaaaagctagccgatctcccaaaatctgtcgaagagcagaaagcaaggctcaaatcggctatcaagaatgttgctgacctaaccaagtccctgaagatcatttctgggactgatgctcaagatgcccaagccattgaagaagtcgaacaaattaggcgaagtgctatttcggctatccagcagtacttgtctcaataa

SEQ ID NO: 38371 - DNA, 309 bp, Oryza sativa
  Clone ID: PAT_MRT4530_42012C.1
atgggtgcgctcttctccgtcatcttccgcaatcggctctggcagtgggaattcagcttctgttacagagggccgattgacaaccttcatgactatcagggcttcggctacaaactgccagttggttgtagggccacagctggatccacagaagaggaacttttccagccacatgagcaagaaagctacatgctctcgaggggtaacggatccttggcccatatatgccgccacttagccagaccagccacctatgcttttgatcttgaagtcaaattggttcttggtgttcatactcatgggaagtag

SEQ ID NO: 38372 - DNA, 474 bp, Oryza sativa
  Clone ID: PAT_MRT4530_42013C.1
atgtcggaggtcctgaagaatccggcgatcctcgccaaggccaccgaggagctagacaccatcgtcggcgtcggccgcttggtgacggagggtgacataccacacctcccctacatccacgccatcatgaaggagacgatgcgtatgcacccggtggtgccgctgctggtaccccggatgtcccttccggccggagcggttcgtggaagcgagatcgacgtcaaggggcgagacttcgagcttctgccgttcggcacgggccggcggatgtgccccgggtacagcctcggtctcaaggtcatccagctcgccctcgccaacctgctgcacgccttctcctggaacctccccgacggcatcgctgccggcgagctgagcatggaagagatcttcgggctcaccatgccgcggaagatccctctcctcgccgttgtcaagcccaggctgccggaccatctctatgccgagccatga

SEQ ID NO: 38373 - DNA, 1485 bp, Oryza sativa
  Clone ID: PAT_MRT4530_42014C.1
atgtcgtcttccaccagcccttctactgcgccatcggctgagtacgctgagttgttgctctacaaccaatggcaattcgtagccgaagccttagaatcaaagaaagaatttcctttgggcaaaatccttctcggctatctgtaccagatgttgaacaatgcatcggctaaaatagccgtcggctcaatagttggagcaggtggaccatggtggctgctgcaaacttggttaaacctggtagtcatgaaggttgtcaatcggccctctgtgacagaagctgaattcccattgccagagccgattgtggaagatgatggagaagagcgcacccatcgcagatgcatgtcatatggagaatatgcatccacaccaaccgatgctggagcgaagctatcggctgagttactcaagactggttctgcagcttctacgaagacaacagagtcctcccctcctcatcaaagtaacagtgtcaagaacattgaatatgcttcagatctaattccgaatggaggtggactatctccccctttcatcggctaccatgcccccaagacttcaactctccttcacggcctaactagggaaccagccgacgcaggcaagaaaaggaaaaccagatcatcagccatgagtaccttatccttggctccaaagaaaaagaccaaattcaagaaaactcaaccacaaccaactgatatgtcgactgatgatctgcccgccttggatccatctattgaacaagctttagatgaagaggaaattgatgaagatgttgaccaagctgtagccgaaatgagtgacatagaaagaacaccatcggcttcacccaagcaaacgcctccaactccttctgcccccgttcattttacaagacaatcttcaagtgatcaaactccatcagctgtggggagtcatcacgtcgaagaggaagaacaaccagctgctcctgctattccagcactagctgatctcttctcttttgacatcagagattaccttgacgaagcagaagaagacacttcaagcaaagccctagctcccctattcgatgatgtgagaaaaacacttgaagacatttctcatcggctagaagcctcttctttagacaatttggtagttgactgtgggtcaattaggacaaggctacatgaagttcaagctctgattcccgaagatctggccgatgtcctaactccagccgcttatctcgagcaacatcagttcaagctggaaaaagccaagctaagactagccgaacgccgtgatcgcaaagagattgaggccacaatccaagctaatcggcagcttgtgcatgaagaaaaaaccaaacttgatcagctatctgaaggtccgatcaaatccaatattgactggctcgaagctcacaaaattgagctcttggtgcaacttgaagaatgcaatgccgagctagatatagaacacaaaaagctagccgatctcccaaaatcaattgaagaataa

SEQ ID NO: 38374 - DNA, 1633 bp, Oryza sativa
  Clone ID: PAT_MRT4530_42015C.1
ccaataagtaatggaactacaatcatcatgggctactttctttgccgtcgtgcttgccaccgtcgtcttcctcctccgggccgttctgctccgccgccgccgagcttacaagctgccaccaggaccaaagccatggccgatcatcggcaacctgaacctcatcagctcgctgccgcaccgctccatccacgagatatccaagcgccatggccccatcgtgcagctctggttcggctcctgccccgtcgtcgtcggctcctccgtcgagatggccaagctcttcctccagaccaacgacgcggtgttcgccgaccgccccaggaccgccgccggcaagtacaccgcctacgactgcaccgacatcacctggtcgccctacggcgcctactggcgccaggcgcgcaagatgtgcgccgccgagctcttcagcgccaggcggctcgagtcgctcgagcacatccgccacgaggaggtgcgcgcgctgctgcgcgagctgcacggctccggcgcggcggggaacgccgtgcagctcagagaccacctgtcaatggcggcgctcggcgtgatctcgcgcatggtgctcggaaagaagtacgtcgagaagcagccggcaggaggcggagcggcgatgacgacgccggaggagttcaagtggatgctggaggagctgttcctgatgaacggcgtgctcaacatcggcgacttcatcccatggctggattggctggacctgcaggggtacatcaggaggatgaagaatgtgaacaggttgatacaccggttcctggaccgtgtcctcgacgagcacgacgagcgacggcggctacagggggatggctttgtggccagggacatggtggacattctcttgcagctcgccgatgaccctaacctcgacgttcagcttaccaggaatggtatcaagggtattacccagaaaaacttgtctttgaaaccattagaacttaatgttccatacgtgatagagacatggctcaacgaccttgtcactggtggtgcggacaccagtacggtgaccgtggaatgggccatgtcggaggtcctgaagaatccggcgatcctcgccaaggccaccgaggagctagacaccatcgtcggcgtcggccgcttggtgacggagggtgacataccacacctcccctacatccacgccatcatgaaggagacgatgcgtatgcacccggtggtgccgctgctggtaccccggatgtcccgtgaggatgcctccgtcgccggctacgacgtccccgctggcacgcgcgtgctcgtcaacacgtggaccatcggccgcgacccgtcggtgtgggactcgcctgagcagttccggccggagcggttcgtggggagcggtatcgacgtcaaggggcgcgacttcgagctgttgccgttcagctcaggccggaggatgtgccccgggtacaacctcggtctcaaggtcatccagctcaccctcgccaacctgctgcacgccttctcctggtgcctccccgacggcgtcaccgccggcgagctgagcatggaggagatcttcgggctcaccatgccacggaagatccctctcctcgccgtcgtcaagcccaggctgccagaccatctctatgccgagccttaa

SEQ ID NO: 38375 - DNA, 2082 bp, Oryza sativa
  Clone ID: PAT_MRT4530_42016C.1
atgtcgtcttccactagcccatctactgcgccatcggccaagtacgctgagcaccttttcaacctagttgcgattcccagcctatcgcacaaaaaccactattttcttggcccaatcggcaatcttgaccccactgatttcatcattggtgaaaccaatagaatcccctttagactagccaaccctaacttgggtcactggaagaataccttcaagtcttggccatctctcgaaaagcctacccctgataagagctggaccacctggtaccaacgcatatcggctagtaagaaagcccactgggatgagattgggatcggccaagcgcttgctctcaccatagccaattcttctaaggatgaacctctgatggctgccgccacctatttctggtccaacaccatcaatgccttcttatttaaccaagggccgatgactccaactttgatcgacatcatcatgattactggattagatgtaacttcatcggctaaccctatgagtatgaataccaagaaccaatttgacttcaagaccaaaagcataggagggtggtctggttatgtagcggcatacatgggcaaagggcctgtcactcctcgggagcacgtagctttcttgctaatgtggctagaaaagtttctcttctgtggatccagctgtggtcccacaaccaattggcaatttgtagccgaagccttaggatcaaagaaacaatttcccttgggcaaaatccttctcagctatctataccaaatgttgaacaatgcatcggctaagatagccgtcggctcaatagttggagcaggtggaccatggtggctactgcagacctggctaaacctggtagtcatgaaagttgtcaatcggccatctgtaacagacgctgaattcccacggttggaaccaattgtagaagacgatggagaagaacgcacccatcgcggatgcatgtcatatggagaatatgcatccacaccagccgatgctggggcaaaactatcggctgagctgctcaaagattggttctgtagcttttatgaaggcttccagaaagatgcccgggtttggtttctttatgaagactcagcaaaccttgagctcccattagacttcagatttgaagacatcaatcatgaaagatatcaaacgcccagggaagtctttatagctgcaatcagcccatgcatcctacctgtcggtattcaccaaggaagaaatatccaagtctcctacgaattctatcaccctataagttcagttagacaacttggatttggccaactcccaatcggcttagtctttgctgacaagatccaatgccgaggagaaatttcttcaactctaatgatggatcgactgcttaacctccaaggaccccccttaggcagtatcgacaatattgagttagcaggattcaggagcaggaactttgacagatggtggggtgaatggaagttgcatctatttcatcaatcggccacaatgtacatgacagatctattccctgacatcataccccagacaacaaagtcctcccctccacatcagagcaatagtggtagaaacattgaatatgccccagattatcttgatgaggcagaaaaagatacttcaagcaaagctctagctcccttatctgatgatgcaaagaaaacactggaagatatctcgcgtcggctagaggcctcttctctggatagcttagtggtcgactatggatcgattaggacacgattgcacgaagttcaagctctaattcctgaagaactggccgatgtcctaactctagccacttatcttgagcaacatcaatttaaactagaaaaagccaagctaagattagccgaacgccgtgagcgcaaggagattgaagccacaatccaagtcaatcggcagcttgtgcatgaagaaaaagtcaaactcgatcaactatccgaaggtccgatcaaatccaatatcgatcggcttgaagcccgcaagatcaaatccaatattctcttggcacagcttgaagaatgcaatgctgaattggatatggagcacaaaaaactagccgatctcccaaaatttgtcgaatag

SEQ ID NO: 38376 - DNA, 107 bp, Oryza sativa
  Clone ID: PAT_MRT4530_42017C.1
tgaaccgtgagttggcaatcgaaacaattggagagagtccgacgttaacatggcacccatgccagcgccggcagcaacgaaatcggtagcgaacacaagcgacgaca

SEQ ID NO: 38377 - DNA, 2475 bp, Oryza sativa
  Clone ID: PAT_MRT4530_42018C.1
ttattgagacaagtactgctggatagccaaaaaagctctttgcctaatttgttcgacttcttcaatggcttgggcatcttgagcatcagtcctagaaataatcttcagggacttggttaggtcagcaacattcttgatagccgatttgagccttgctttttgctcttcgacagattttgggagatcggctagctttttgtgctccatatccaattcagcattgcattcttcaagctgtgccaagagatcgattttgcgggcttcaagccgatcgatatttgatttgatcagaccttcggatagttgatcgagtttgactttttcttcatgcacaagctgccgattgacttggattgtagcttcaatctccttgcgctcacggcgtttggctaatcttagcttggctttttctagtttaaattgatgttgctcaagataagcagctggagttaggacatcggccatttcttcaggaattagagcttgaacttcgtgcaatcgtgtcctaatcgatccacagtcgactactaagctatccagagaagaggtctctagccgacgcgagatattttcaagtgttttctttgcatcgtcagataagggagctagagctttgcttgaagtatcttcttctgcctcattaagataatctttaatataaaaagaaaacagatcggctagaactaggatagcaagagcagccggttgttcttcttccacaatatgatgactccccacggctgatggagttcggtcactcgatgattgttgtacaggagaagaaggaggaggaggaggttcggctgtagcctgatcaacatcatcctcaatatcttcttcatccagagcttgttcaatggatggatccaaagcaggcaggtcgtcggttggcttggttttcttagacttggcctttttctttggagctagagtcaacgtgctcacagccgatgatctagtttttcttttcttggttacatcggttggttccctgatggcaccttggaggagggttgagaccttgggggcgtgatagccgatgacagggggagacaatccgcccccattaggaatcaaacctggggcatattcaatgttcctacctctattgctctgatgtggaggggaggattctgttgtctggggtatgacgtcagggaatagatctgtcatgtacattgtggccgattgatgaaatagatgcaacttccattcaccccaccatctatcaaagttcctgctcctgaatcctgctaactcaatattgtcgatactgcctaagggaggtccttggaggttaagcagtcgatccatcattagagttgaagaaatttctcctcggcattggatcttgtcagcaaagaataagccgattgggagttggcctaatccaagttgtctagctgaacttatagggtgatagaattcgtaggagacttggatatttcttccttgatgaataccgacaggtaggatgcatgggctgattgcagctgtaaagatttccctggacgtttgatatctttcatgattgatgtcttcaaatctgaagtctaatgggagctcaaggtctgctgagtcttcataaagaaaccaaacccgagcatctttctggaagccatcataaaagctgcagaaccaatctttgagcagctcagccgatagttttgccccagcatcggctggtgtggatgcatattctccatatgacatgcatctgcgatgggtgcgttcttctccatcgtcttctacaattggctctaacctcaggaatttagcttctgttacagatggccgattgacaactttcatgactaccaggtttagccaggtctgcagtagccaccatggttcacctgctccaactattgagccgacggctatcttagccgatgcattgttcaacatttggtatagatagccgagaaggattttgcccaagggaaattgtttctttgattctaaggcttcggctacaaattgccaattggttgtgggaccacagctggatccatagaagagaaacttttctagccacattagcaagaaagctacgtgctcccgaggagtggcaggccctttgcccatgtatgctgctacataaccagaccaccctcctatgcttttggtcttgaagtcaaattggttcttggtgttcatactcatagggttagccgatgaagttacattagccgatatgcgttggtaccaggtggtccagctcttatcaggggtaggcttttcgagagatggccaagacttgaaagtattcttccagtgacccaagttagggttggctagtctaaaggggattctgttggtttcaccaatgatgaaatcagtggggtcaagattgccgattgggccaagaaaatagtggtttttgtgcgataggctgggaatcgcaactaggttggaaaggtgctcagtgtactcggccgatggcgcagtagacaggctagtggaagacgacat

SEQ ID NO: 38378 - DNA, 675 bp, Oryza sativa
  Clone ID: PAT_MRT4530_42019C.1
atggcgtcgtctcgctccgtcgtgctccgggtgctggtcgcggtggccgtcgtggcagcagccggggcgccgcgcctcgccgtcgcggactcgccgccgcttcaggacatctgcgtggccgacctgcgggcggcgacagcggtcgacgggttcccgtgcaagccgacggcgtccgtggtgagcgacgacttcttctgcgacgccatcgtccaggcgcccagcacgagcaacccgttcggcgtcaactccacgcgcgccacggtgtccgcgttccccggcctgaacacgctgggcctctccatcacgcgcaccgacctcgcgcccggcggcctcaacccgccgcactcgcacccgcgcgcctcggagctcgtgctcgtgctcagcggcgaggtcatggtggggttcaccacggcggccaaccggctcttctccaaggtggtcagggagaaggagctcttcgtcgtgccccgcggcctgcagcacttccagctcaacgtcggcgccggcaacgcgtcgttcgtcgccatgttcgacagccagtcgcccggcctcgtcacgccgaccttcgcgctcttcgcgacccagccggccatgccgatggaggtgctcgccaagacgtttctcatgggcgaggatgaagtgggcgccatcaaatctaagtttgccggcttctga

SEQ ID NO: 38379 - DNA, 345 bp, Oryza sativa
  Clone ID: PAT_MRT4530_4201C.1
gaatattctggcaagtggagtcaggaacgtcatttatcgaacgacacccacatgagttctaggtgttggtcacgaccgaagtggctgaactggtgctacactattttggacacgcaaagtaagcatgctctatgcacatggcagatggcttggaaaaatgcaatgcatctgaaaatatttgaaaggcccatctgttgtgcaaaagaagcataccacctgcgtgcaccaccagagacaattgcactcgctgagcattcacactaaatgaacttaccgctggattgaaagaaaaactgccaccaacagactctagatggcgaccacttcagcgatgcctagagaaat

SEQ ID NO: 38380 - DNA, 594 bp, Oryza sativa
  Clone ID: PAT_MRT4530_42020C.1
ttctcctttctcctcttttctccgcgtcgggctggccggacagtatccagaagaatcaggtcaacgccgacgacgggcgagcgcgggggcggagcggcgccgggctgcaggcgaagcggaggcgggcatcgaagtagagcgtgggcgagtggacgcgggagagcgacgtggtgttgacggcgccgggctgcgggcggagcgcggcgggcgagagcggcgatgggcgggcggcgggcgagctccaggtcgctccgtgcgcgccgcatcaccaggggcgcgacgactgttgggtgtgggcggccgccctcctccggctttgccccctactccccgcacatctccacctcctggtcggccgcctctcccgccgacgcccccacctctcgcgtcggcgcgcctcctctcctcctctcccgccgcctcgtcacgccgaccgcctccgcttgccgctgcagccgcactcgccgacgcccgccctagcagccgcgcttcccgccgcaagccgcgctcgcccgccgcttgccctcgcagccgctccgcctgcctccgcccacgcccggagaagaaaaaagaacaacagaaaaatgtgggtca

SEQ ID NO: 38381 - DNA, 2253 bp, Oryza sativa
  Clone ID: PAT_MRT4530_42021C.1
ttattgagacaagtactgctggatagccgaaatatctctttgcctaatttgttcgacttcttcaatggcttgggcatcttgagcatcagtcccgagaatgatcttcagggacttggttacgtcaacaacattcttgatagccgatttgagccttgctttttgctctttgacagattttgggagatcggctagctttttgtgctccatatccaattcaacattgcattgttcaagctgtgccaagagatcgatcttgcgggcttcaagccggttgatattggatttgatcggaccttcggataactgatcgagtttgactttttcttcatacacaagctgccgattgacttggattgtggcttcaatctccttacgctcacggcgttcggctaatcttagcttggctttttctagtttaaattgatgttgctcaagataagcggctggagttaggacatcggccagttcttcaggaattagaacttgaactttgtgcaatcgtgtcctaatcgatccacagtcgaccactaagctatccatagaagaggcttctagccgacgcgagatatcttcaagtgttttctttgcatcgtcagataagggagctagagctttgcttgaagtatcttcttctgcctcatcaagataatctttgatatcaaaagaaaagagatcggctagagcttcggctgcagcctgatcaacattgtcctcaatatcttcttcatccagagcttgttcaatggatggatccaaagcaggcaggtcgtcggttggcttggttttcttagacatggcctttttctttggagctagagtcaaggtgctcacagccgatgatctagtttttcttttcttggttacatcggttggttccctgatggcgccttggaggagggttgagaccttgggggcgtgatagccgatgacagggggagacaatccgcctctattaggaatcagacctggggcatattcaatgttcctaccactattgttctgatatggaggggaggattctgttgtctggggtatgacagcagggaatagatctgtcatatacattgtggccaattgatgaaatagatgcaacttccattcaccccaccatctgtcaaagttcctgctcctgaatcctgctaactcaatattgtcgatactgcctaagggaggtccttggaggttaagcagtcgatccatcattagagttgaagaaatttctaccggcattggatcttgtcagcaaagaataagccgattgggagttggcctaatccaagttgtgtagctgaacttatagggtgacagaattcgtaggagacttggatatttcttccttggtgaatactgacaggtaggatgcatgggctgattgcagctgtaaagacttccctggacgtttgatatctttcatgattgatgtcttcaaatctgaagtctaatgggagctcaaggtctgctgagtcttcataaagaaaccaaccccgggcatctttctggaaaccttcataaaagctgcagaaccaatctttgagcatctcagccgatagttttgccttagcatcggctggtgtggatgcatattctccatatgatatgcatctgcgatgggtgcgttcttctccatcgtcttctacaattggctccaaccttgggaattcagcttctgttacagatggccgattgacaactttcatgactaccaggtttagctaggtctgtagtagccaccatggtccacctgctccaactattgagccgatggctatcttagccgatgcattgttcaacatttggtatagatagccgagaaggattttgcccaagggaaattgtttctttgatcctaaggcttcggctacaaattgccaattggttgtgggaccacagctggatccacagaagagaaacttttctagccacattagcaagaaagctacgtgctcccgaggagtgacaggccctttgcccatgtatgccgctacataaccagaccaccctcctatgcttttggtcttgaagtcaaattggttcttggtgttcatagtcatagggttagctgatgaagttacatctaatccagtaatcatgatgatgtcgatcaaagttggagtcatcggccgttggttaaataagaaggcattgatggtgttggaccagaaataggtggcggcagccatcagaggttcatccttagtagaattggctatggtgagagcaagcgcttggccgatccaatctcatcccagtggg

SEQ ID NO: 38382 - DNA, 2322 bp, Oryza sativa
  Clone ID: PAT_MRT4530_42022C.1
ttattgagacaagtatcgctggatagccaaaatagccctttgcctaatttgttctacttcttcaatagcttgggcatcttgagcatcagttccaaagatgaccttcagggacttgcttaggtcagcaacattcttgatagccgatttgagccttaccttttgttcttcgatagattttgagagatcggctagctttttgtgctccatatctagttcagcattgcattcttcaagctgtgccaagagatcgatcttgcgagcttcgagccgatcaatattggatttgatcggaccttcagatagctgatcaagtttggtcttctcttcatgcacaagctgccgattagcttggattgcggcctcaatctctttgcgctcacggtgttcgactagtcttagcttggctttttccagcttgaactgatgttgctcgagataagcggctggagttaggacatcggccaaatcttcgggaatcagagcttgaacttcatgcagccgtgtcctaattgatccacagtcaactaccaaactatctaaagaagaggcttctagccgatgagagatatcttcaagtgttcttctcacatcgtcagataggggagctagagctttgcttgaagtgtcttcttctgcctcatcgagataatttctgatgtcaaaagagaaaagatcggctagaactgggatagcaggagcagttggttgttcttcttcctcgatgtgatgactccccacaaccgatggagtctggtcacttgacggttgttgtacaggataaggaggtcttgtaaaatgaacgggggcagaaggagttggaggcgtttgcttgggtgaagccgatggtgttctttctgtgtcactcatttcggctacagcctggtcaacatcttcaccaatttcctcttcatctagagcttgttcaatagatggatccaaggcgggcagatcattagtcggcttatcagtcggtttagttttcttgaatttggcctttttgtttggagctaaggccaaggtactcacggccgatgatctggttttccttttcttgcctgcatcggctggttccctggttaggtcgtgaaggagagttgaagtcttgggggcatggtagccgataacgcagggagatagtccacctccattcggaattagacctgtagcatattcaatgttcctgccactattactttgatgtggaggggaggactctgttgtaccccaccatctgtcaaagtttttgcttctaaatcctgccaactcaatattatcaatgctgctcagaggtggtcctggtaggttaagtagccgatccatcattagagtggatgtgatttttcctcggcactgaatcttgtcggcaaataataagccgattgggagttggcccaatccaagttgtctggccgagctcattgggtgataaaactcgtaggagacttggatgtttctcccttggtgaataccgataggaaggatgcatgggctgattgcagctataagaacttctctggatttttggaatttttcatgattaatgtcttcaaatctaaagtctgatggaagttcaagatttactaagtcttcataaggaaaccagatccgtgcatctttcttaaaaccttcgtagaagctgcagaaccagtccttgagcagctcagccgatagcttcgctccagcatcggttggtgtggatgcatattctccgtatgatgtgcatctgcgatgagtgcgttcttctccatcgtctcctacaatcggctctggcaatggtaattcagcttctgtcacagagggtcgattgacaaccttcatgactatcaggtttaaccaagtgtgctcccgaggagtgacaggccctttgcccatgtatgccgctacataaccagaccaccctcctatgcttttggtcttgaagtcaaataggttcttggtgttcatactcatagggttagccgatgaagttacatctaatccagtaatcatgatgatgtcgatcaaagttggagtcatcggcccttggttgaataagaaggcattgatggtgttggaccagaaataggtggcggcagccatcagaggttcatccttagcagaattggctatggtgagagcaagcgcttggccgatcccaatctcatcccagtgaactttcttactagccgatacgcgtaggtaccaggtggtccagctcttatcagggggtaagtttttcgagagatggccaagacttgaaggtattcttccagtgacccaggttagggttggctcagcgtactcagccgatggcgcagtagacgggctggtggaagacgacat

SEQ ID NO: 38383 - DNA, 2616 bp, Oryza sativa
  Clone ID: PAT_MRT4530_42023C.1
atgtcgtcttccactagcccgtctactgcgccatcagccgagtacgctgagcacctttccaacctagttgcgattcccagcctatcgcacaaaaaccattattttcttggcccaatcggcaatcttgaccccactgatttcatcattggtgaaaccaacataatcccctttagactagctaaccctaacctgggtcactggaagaataccttcaagtcttggccatctctcgaaaggcctacccctgataagagctggaccacctggtaccatcgcatatcggctagtaagaaagtccactgggatgagattgggatcggccaagcgctttctctcaccatagccaattctgctaaggatgaacctctaatggctgccgctacctatttttggtccaacaccatcaatgccttcttatttaaccaagggccgatgactccaactttgatcgacatcatcatgattactggattagatgtaacttcatcggctaaccctatgagtatgaacaccaagaaccaatttgacttcaagaccaaaagcataggagggtggtctggttatgcagcggcatacatgggcaaaaggcctgtcactcctcgagagcacgtagctttcttgctaatgtggctagaaaagtttctcttttgtggatccagctgtggtctcacaaccaattggcaatttgtagccggagccttaggatcaaagaaacaattccccttgggcaaaatccttctcggctatctataccaaatgttgaacaatgcatcggctaagatagccgtcggctcaatagttggagcaggtggaccatggtggctactgcagacctggctaaacctggtagtcatgaaagttgtcaatcggccatatgtaacagaagctgaattcccaaggttggagccaattgtagaagacgatggagaagaacgcacccatcgcagatgcatgtcatatggagaatatgcatccacactagccgatgctggggtaaaactattggctgagctgctcaaagattggttctgcagcttttatgaaggcttccagaaagatgcccgggtttggtttctttatgaagacttagcagaccttgagctcccattagacttcagatttgaagacatcaatcatgaaagatatcaaacgtccagggaagtctttacagctgcaatcagcccatgcatcctacatgtcggtattcaccaaggaagaaatatccaagtctcctacgaattctatcaccctataagttcagctagacaacttggattagaccaactcccaatcggcttattctttgctgacaagatccaatgccgaggagaaatttcttcaactctaatgatggatcgactgcttaacctccaaggaccttccttaggcagtatcgacaatattgagttagcaggatttaggagtaggaactttgacagatggtggggtgaatggaagttgcatctatttcatcaatcggccacaatgtatatgacagatctattccctgacgtcataccccagacaacagaatcctcccctccacatcagagcaatagtggtaggaacattgaatatgccctaggtctgattcctaatggaggcagattgtctccccctgtcatcggctatcatgcccccttaggtctcaaccctcctccaaggcgccatcagggaaccaaccgatctccaaagaaaaaggccaagtctaagaaaaccaagccaaccgatgacctgcctgctttggatccatccattgaacaagctctggatgaagaagatattgaggatgatgttgatcaggctgcagccgaacctcctcctcctcctccttcttcccctgtacaacaatcatcgagtgaccgaactccatcggccgtggggagtcatcatattgtggaagaagaacaaccagctgctcctgctatcccagttctagccgatctcttctcttttgatatcaaagattatcttgatgaggcagaagaagatacttcaagcaaagctctagctctcttatctaacaatgcaaagaaaacacttgaagatatctcgcgtcggctagaggcctcttctctggatagcttagtggtcgattgtagatcgattaggacacgattgcacgaagttcaagctctaattcctgaagaactggccgatgtcctaactccagccgcttatcttgagcaacatcaatttaaactagaaaaagccaagctaagattagccgaacgccgtgaacgcaaggagattgaagccacaatccaggtcaatcggcagcttgtgcatgaagaaaaagtcaaactcgatcacctatccgaaggtccgatcaaatccaataccgattggcttgaagcccgcaagatcgatctcttagcacagcttgaagaatgcaatgctgaattggatatggagcacaaaaagctagccgatctctcaaaatctgtcgaagagcaaaaagcaaggctcaaatcggctatcaagaatgttgctgacctaaccaagtccctgaaggtcatttctggaactgatgctcaagatgcccaagccattgaagaagtcgaacacattaggcaaagagctattttggctatccagcagtacttgtctcaataa

SEQ ID NO: 38384 - DNA, 2700 bp, Oryza sativa
  Clone ID: PAT_MRT4530_42024C.1
ttattgagacaagtatcgctggatagccaaaatagccctttgcctaatttgttctacttcttcaatagcttgggcatcttgagcatcagttccagggatgacttttagggacttggtcaagttcgcaacattcttgatagccgatttcagccttgttttttgttcttcaattgattttgggagatcgactagttttttgtgttccatatctagcgcggcattgcattcttcaagttgcaccaagagctcaatcttgcgagcttcaagctgatcaatattggatttgatcggaccttcagatagctgatcaagtttggttttttcctcatgcacaagctgccgattagcttggattgtgacctcaatctctttgcgctcacggcgttcggctagtcttagcttggctttttccagcttgaactgatgttgctcgagataagcggctggagttaggacatcggccaaatcttcgggaatcagagcctgaatttcatgcagccgtgacctaattgatccacagtcaactaccaagctatctaaagaagaggcttctagccgatgagagatgtcttcaagtgtttttcttacatcatcggataggggagctagggctttgcttgaagtgtcttcgtctgcctcatcaaggtaatctctgatatcaaaagagaagatatcggctagaactgggatagcaggagcagctggttgttcttcctccttgatgtgatgactccccacagccgatggagtctggtcacttgacgattgtggtggagccgacttggcaatcgttgctgctggctttttcttcacagcagttttcttttttcttgtaaaatgaatgggggcagaaggagttggaggcgtttgcttgggtgaagcccatggtgttctttctgtgtcactcatttcggctacagcctggtcaacatcttcaccaatttcctctgcatctaaagcttgttcaatagatgtatccaaggcgggtagatcatcagccgacttatcagtcggtttagttttcttgaatttggcctttttctttggagctaagaccaaggtactcatggccgatgatctggttttccttttcttgcgtgcatcggctagttccctggttaggccgtgaagaagagttgaagtcttgggggcatggtagctgataacagggggagatagtccacctccattcggaattagaccttgagcatattcaatgtccttgccactattactttgatgaggaggggaggactctgttgtctggggtatgacgtcagggaatagatctgtcatatacattgaagccgattgatgaaatagatgcagcttccattcaccccaccatctgtcaaagtttttgcttctaaatcctgccaactcaatattatcaatgctgcccagagggggtcttggtaggttaagtagccgatccatcattagagtggatgtgatttgtcctcggcattgaatcttgtcggcaaagaataagccgattgggagttggcccaatccaagttgtctggccgagctcattgggtgataaaactcgtaggagacttggatgtttctcccttggtgaatgccgacggggaggatgcataggctgattgtagctataagaacttctctggatttttggaatttttcatgattaatgtcttcaaatctaaagtccgatggaagttcaaggtctgctgagtcttcatagggaaaccagattcgtgcatctttcttaaaaccttcataggagctgcagaaccaattcttaagtagctcagccgatagcttcgctccagcatcggttggtgtggatgcatattctccatatgacatgcatctgcgatgggtgcgctcttctccatcgtctcctgcaatcggctctggcagtgggaattcagcttctgtcatagagggccgattgacaaccttcatgactatcaggactaaccaggtttgcagcagccaccatggtccgcctgctccaactattgagccgacggctattttagccgatgcgttgttcaatgtttggtacagatagccgagatggattttgcccaaaggaaattctttctttgattctaaggcttcagctacaaattgcctgttggttgtagggccacaactagatccatagaaggggaacttttctatgcttttggtcttgaagtcaaattggttcttggtgttcatactcatagggttagccaatgaagttacatctaatccagtaatcatggtgatgtcgattaaagttggagtcatcggcccttggttgaataagaaagcattgatggtgttggaccaaaagtaggtggcggtagccatcagaggttcatccttagcagaattggctatggtgagagcaagcgcttggccgattccaatctcatcccagtgaactttcttactagacgatacgcgttggtaccaggtggtccagcttttatcaggtgtgggtttttcgagagatggccaagacttgaaggtattcttccagtgacccaggttagggttggctagtctaaaggggatccggttggtttcaccaatgatgaaatcagtggggtcgaggttgccgattgggccaagaaaatagtggattttgtgcgaaaggctgggaatcgcgactaggttgaagagatgctcagcatactcggctgaaggcgcatcagatgggttggtgcaggacgacat

SEQ ID NO: 38385 - DNA, 425 bp, Oryza sativa
  unsure (1)..(425): unsure at all n locations
  Clone ID: PAT_MRT4530_42025C.1
tnncaccattgcatcatgtcctgnatcataacctttttgctcaggtnttgggcaggaaatattttagactntattctgcttccatctccaatgacctttaccctcacagagaaactatgctaagcaatattagtcaggtagatcttgacaacattaacgtaaatgagttcccgaggacaggagacgttgaattcatggacggcatattggaggaaggtgacctgctttactttccaccaaaatggtggcattacgttagatctctctctactagtttctctgttagcttctggtggcgaacgtcaattcctcctcctcagggctcgtaatgttattgttttgatcatccatgacgtttgcgtttctatcatcagatgttagaaacccaagaaaaacttaattgaacccaaaaaaaaaaaaaaaaa

SEQ ID NO: 38386 - DNA, 2443 bp, Oryza sativa
  Clone ID: PAT_MRT4530_42026C.1
atggatgccatggataaataccatgtgcaactgaagagaccaagaattctgcctggaacagatatcgatgagaaatccaagaagttcaggcatatgcttaagtctgttgctgttgatggcaatgatatacttgtttccgcaaagaaatcatcagaaagatcattggctagctaggttggaagcaagagaagctgcagcgaaggcagcagccaagagggaagaagaaagggtgcgggaactgaagaagactaggggagagaaatggcttccttcaattgctagacaaatgaaggaagaaaaagcttgggagcaacggaagtgatgatgccaccatcatatcaatagggggacctgtgctaatctctgatgccatcatcggcacccgggcagtgaccttcttcactttctgtctatgacaagggacagtagatagatcatagattaatggatgattttgcgtagctgataattcagttctggatgtcagcattgctctgatccctatatgggccttctttgtagacaattttgtattgtaacgtgctatccttcgccgcctccaacccagggctcgcctcgacgaacctgctcatcgccaaaaaccgccacctctcgccgccctcctgcctcccctccctcgtcccgctcctccccgtcctcccctaccgccacctcctcccgctcctcctctccttcgtcccgctcgacccgcttcgccacctccaccgccacctcctcgcgcacctccccacgagtcccctcgccgatgccgcgctctccgcctacgcccgcctccgcctcccccacctcgccgcccagctcctccactccctccgccgccgccgtggcgttcgcccttccctccaggctgccaacgccgtcctctccgcgctttcgcgcagcccatccaccttgccgcaggcctccctcgatgtcttccgctccctcatcgagctccgcctccaccccaaccactacaccttcaacctcctcgtccacacgcattgctccaagggcaccctcgccgacgctctcgccacgctctccaccatgcaggggttcggcctctcccccgatgccgtcacctacaacacgctcctcaatgcgcactgccggaagggcatgctcggcgaggcccgggcactgctggcgaggatgaagagggacggcatcgcgcccacgcagccaacgtacaataccctcgtgtcggcgtttgctaggcttgggtggattaagcaggcgaccaaggtcgtggagtccatgacagcctacgggttcgagcctgacctgaggacgtacaatgtgctcgccgtggggctgtgccaggcggggaaggtggacgaggcattccggctgaaggatgagatggaacggctcagcaccgcgttgccggatgtagtgacttacaatacacttgttgacgcctgcttcaagtggcggtgctcatcagatgcattgaggctgcttgaggaaatgcgtgacaagggggtgaagccgactttggtcacacataacattgttgtgaagagtctttgcaaggagggtaaattggaggaggcattggggaagctggagaagatagcagaggaggggttggcaccagatgtaatcacgtacaatacgttgattgatgcatactgtaaggctggtaatgtcgcaaaagcattcacattgatggatgagatggtcggaaaggggctcaaaatggacaccttcacacttaacaccgtgctgtacaacctatgcaagatgaagcgttatgaagatgctgaggagcttttgcattcacccccgcagcggggtttcgtgcctgatgaagtcagctatggtactgtaatggctgcgtacttcaaggagtataatccggagcctgctttgcgtctgtgggaccagatgattgagaggaagttgataccaagcatttcaacgtacaacacgttgatcaaggggctttgtaggatggagaggctgaaagaagcaattgacaaattaaatgagctcgtggagaaggggttggttcctgatgaaaccacatataatatcatcattcatgcatactgcaaggaaggggacctagaaaatgcctttcgattccacaacaagatggttgagaattccttcaagccagatgttgttacctgcaacactttgatgaatggcctttgtctgcatgggaagctagataaagcattgaaactctttgaatcatgggtggagaaggggaagaaggttgatgttatcacatataataccctaattcaatcgatgtgcaaagttggggatgttgatactgctttgcacttctttgatgacatggagccttcttctgcggatgaagcagatgtcaaggaacatgagggtaaacctgaggcagaatccagtgaaaaagcacaagacaatgctctggagacatacatggaacgcctaaatgggctatgtaccg

SEQ ID NO: 38387 - DNA, 462 bp, Oryza sativa
  Clone ID: PAT_MRT4530_42027C.1
atggcggctgggcggcgaggtcgcggcggcgggacggtgatgtcgcggcgacggcgtggtggtggggctctctgcggcatcggcggcgcggcggtggggctccgcgcggctccggcgatggcgtcgccagttccggtcgccccgccagatctggccgggtcggccggcggagcgcgccccggcgccgactgccgcgtggtcctggccgggggcagcaggcctgctgcggcttttgccggcggcggggacggctcatccatcctcctgttcctccagatccggttctccccgtcttcagtggttgttcttccggtgctctctggcggtgcggcgcccgctcctttcttctcagctgggttcctgggtgtgaggtggtctctggtcgagctgcagggtgattggctgttgaggcggagtcggagctgcttgtcttgcaagctcggcaacgatgaccctcaatga

SEQ ID NO: 38388 - DNA, 425 bp, Oryza sativa
  Clone ID: PAT_MRT4530_42028C.1
cctctccggtgagcgacccatacggaaatcctctctcgcgtcccctctatgcgcggaccttctctctgtggcggaggcccttaacattagcttctcttctagatctggaagcatgctttactctttaccatatatttggtggttttcttattatttttttgaaattgaagagcacagctcttccccttccgttaaaggaagcgagcatgttcagctacagaggaaaaaaaaacgaaaaatggaagggaagcaacatcagatcacaaaacaaatagtgccatcccaccattctgtatgatctccacaagacaacaacaacatataacaactaacaaattaccttaaaattagtagtgggggcagtttgtttccagaagaaattcagaattagatacgagtttttagaactggaatgggaacccacc

SEQ ID NO: 38389 - DNA, 991 bp, Oryza sativa
  Clone ID: PAT_MRT4530_42029C.1
ttaaaaaaaaactctctggtgccctcgcgtcgccctcgcgcggcggctcgggggcgaaaccctagccaccgccgcccctccccctccctcctccttgcttcgccgccgccggagctcgtcgccggcaattccgggcgacgcgctgggatggcggcggcggggccatctctcttggctccatctcgccctggcgcgggcgtggcgacaatggcggctgggcggcgaggtcgcggcggcgggacggtgatgtcgcggcgacggcgtggtggtggggctctctgcggcatcggcggcgcggcggtggggctccgcgcggctccggcgatggcgtcgccagttccggtcgccccgccagatctggccggggtgacgacgcgcggccagtgacgggctcggtcgatgccggcgccctcgggcgttggcaggtggcttgcagcccccgtgcggtttcgtcggcgacgacggcatcgggtcggcggtggctcgcatccggtcggcggcggctcgtccagtcggccggcggagcgcgccccggcgccgactgccgcgtggtcctggccgggggcagcaggcctgctgcggcttttgccggcggcggggacggctcttccatctccctccctcctgttcctccagatccggttctccccgtctccagtggttgttcctccgagtgctctctggcggtgcggcgcccgctcctttcttctcaggtgctcctcccttcttaggctaggctgcttccagtcgatgccggggagctccttggtctggtaggggtggcgtgcggattttcggcgtcctgttcgctggtcgtcggccgcgctgttagtttgctgcggctgggttcctgggtgtgaggcggtccctggtcgagctgcagggtgtttggctgttgaggcggagtcggagctgcttgtcttgcaagctcggcaacgatgaccctcaatgaacgtcccggcaacgcggcgagggtttggaagtggagcat

SEQ ID NO: 38390 - DNA, 378 bp, Oryza sativa
  Clone ID: PAT_MRT4530_4202C.1
atgaagaagaggaagaaaagcaaaataaaagaaaagagctccaatgagctccacgctctgccgcccctcgctggccaccgtgcgtccgtgcctccactgctgcgccgcgacgcccgatcgtgcccggggtccgcaccgaggccggggccgaatcgcgcatcccgcacccgtgctgaggttgccgtcgcgccgagccatgcctacgccgccgcactgccacatgcacgtcaggccaccgcgcccacggccggccgccacgcctgcaccgggcctccgcccttgcgccatcgaatggcagtgtgccctcactatggccacttcccaagcactgtggacgcaccaaggcaacacgctgcgatgcggtggctgtcgggctag

SEQ ID NO: 38391 - DNA, 423 bp, Oryza sativa
  Clone ID: PAT_MRT4530_42030C.1
atgtgcggtgcggtggtggacttcgacctcaccatggacacctttgggtacgaggagcttccgtacatcatatgggaaggggataagtccccaagggccaaagctgaggctgatcgatgtgcaaagcatcaggaattcaggactgctgctgctgaagcatggaagagcagatggatgaggaagagaagggagttccccggcttagaggaaggccggggaggtgtggcccaatggtgggtggtggtgagaaggcgacgaggcggcggtggtgcaatcggagccgtggtggcggatggtagagtcggaggacgaggacgtggatggggcgggggcacctcgcaaagcttaggtagaatcaatggtgagcggtggtcggcggagggctcatcggcgtctagcatcgttggaggagtcacctgttga

SEQ ID NO: 38392 - DNA, 309 bp, Oryza sativa
  Clone ID: PAT_MRT4530_42031C.1
atggatagcacaacaacagctcggttgaatggaacttttgtcagtgatcctggtggtggagctgtagcctgtagggactgtaagattctcttccaggttgtcaaatttggggatcttaaccaacaggggttcgcttcaaatatttttttcattgtgaattacacaacaaacaacatgatcctaacaattactcgcccaactctgaaccttcccatgttagcaatggaaacaattattggacccacctggcaggcatacatgatacggagtataccaatggattctctgcaattgcagctttccgagtaa

SEQ ID NO: 38393 - DNA, 3120 bp, Oryza sativa
  Clone ID: PAT_MRT4530_42032C.1
atgaagctctcgccgtcggccggcggcgtctccgaccagccgccgtcgccgccggaagttgcagaggagcagaagtgcctaaattctgagttgtggcatgcatgcgccggccctctcgtttcgctgcctgcggtcggtagtcgggtggtttattttcctcaaggccacagtgagcaggtagctgcatcaacaaataaggaaatggagtctcagatccccaactatcctaacctgccgccgcagcttatatgccagctacataatgtgaccatgcacgccgatgcagagacggatgaagtctatgcgcaaatgacgctgcagccactcagcccgcaagagctcaaggatccattcctacccgccgagctaggcactgccagcaagcagccaacaaattatttctgcaaaacgttaactgctagtgacacaagtacacatggtggattctctgttccccgtcgagcagcagagaaagtatttcctccgctggatttcactcagcagcctccagctcaagagttgatggcgaaagacctccatggaaatgaatggaaattccgtcatatctttcgtggccaaccgaagcggcatcttctgactacgggttggagcgtctttgtaagtgcaaagagactggttgctggagactctgtcctttttatctggaatgacagtaatcagctgcttctgggaattcgtcgggcaaataggccacaaacggtcatgccatcatcagtattgtctagtgacagcatgcatattggtctgcttgctgcagctgctcacgccgcatcaacaaatagccggtttactattttctataatccaagagcaagcccttcggagtttgttataccactggctaaatatgtaaaggctgtctaccatacccgcatatcggtgggcatgcgtttccggatgctttttgaaacagaagaatccagtgttaggagatacatggggacaataacaggaataagtgatcttgatcctgttcgttggatgaactcacactggcgctctgtcaaggttggatgggatgagtcgactgctggagagagacagccaagggtgtctctttgggagatcgagcctctgacaactttcccgatgtatccatctccttttcctctcagactaaagcgtccatggccaacaggcttaccttctttatatggcggaaaggaggatgacttggcttcttctcttatgtggcttcgagatagtcaaaacacaggtttccaatctctgaattttggaggacttggtatgagtccgtggatgcagccaaggctggatagttccctacttggtctgcaacctgacatgtaccaaacgatagcggcggcggcggctttacagaacaccactaagcaagtatcacctgccatgctgcagttccagcagccgcaaaacattgtcggtagatcttctcttctatccagtcagattctgcagcaagcacagcctcaatttcagcagatgtaccaccaaaacatcaatggcaactcaatccaaggccatagtcagcctgagtacctccagcaaccgcttcaacattgcccatcatttaacgaacagaagcctcagttgcagccgcagcaacagcagcaagaatcacaccagcagcaacctcagcatcaacaaatgcaacaacagaaacacttgtccaactttcagactgtaccaaatgcattgtcggttttttcacagctttcctccacccctcagtctacaccctccacattgcagacagtttcaccattctcacagcaacataatttccctgacacaaatatcagttgtctctctccatccaatgtctcatccatgcacgatacactgagatcattcccttcagaagctgcttcagacctcccaggtgtgccaagaatcacccctgtacctgtctctgacccatggtcatctaagcgagttgcagtggaatctacgatcacttctcgcccacatgacatttcatcacagatagagaacttcgacttgacaccttctagtattcctcaaaactccacgttagcaccactgcctggaagggaatgcctggtggatcaagatgggagctctgatcctcaaaatcacttcttgtttggtgtaaatatagactcacagtcacttttgatgcaagatggcattccaagccttcacaatgaaaacagttcaagcacaattccatattccacatccaacttccttagcccttctcaagatgattatccattgagtcaaacactaactactccgggctgcttagatgaatcaggatatgttccatgttcagataatgctgatcaagtgaagcgaccgcatgcaacctttgtgaaggtttacaaatctggaaccgttggaaggttgctcgacatcactagatttagcagttatcatgaacttcgtagtgaggtagggcgcctttttggccttgagggccagttggaagaccctttgagatcaggctggcagcttgtatttgttgaccgagaggacgacgttcttctagttggcgatgatccgtggcaggaatttgtgaacagtgtgtcttgcataaagatactttcgccgcaggaggttcagcagatgggcaagccgggcattgaactcttctcgacttctgcaaggagacttggcaacagctgtgacaactacatgagcaggcaggaatcaagaagcctaagcactggaatcgcgtcggtgggctcagttgagttctgagaaatagggagctcatagcacccggcgttaggcgtccagttctgtacgtctctgtagctcttagttctgtgacctggaacccaagcacataggtcaagtgtagctctaagttatgcgctgtctggtaattatgtcatattacattgacttttagtggtacctattacattttggtatacatgccgacactttgtttcctggaatactgatcatgttaacttagggcatctaattattaggttcatgttgagtagtgctgtagtgccgcaggcgctagctttggccatattctgtatattgatgatgttttcctcctgcaatgtactgttaatgacagcaagtaaggttttccatgcaactgtgaaaattcagttcaagaactattgagcttat

SEQ ID NO: 38394 - DNA, 557 bp, Oryza sativa
  Clone ID: PAT_MRT4530_42033C.1
ggtcgaaattcagtcgaaatttatccgaaaccgatcaaaatttatcaaaaaacatgataccgatgaggctcgaaatttagtggtcaaccggtaatataaaccctcacaagacaaatctctatcagatacaaacaactgttgcagaacacttctcgacgggttcatcgccccatccgtgacgactcaccaagttcgagcatcgcaaaacagtctacatattcatcttcatcgcatggatttctgtaatcacggacgtcagttctgtcaatgtctgctgtgtcctcttgcttcttagtactcatcaacttaccatcaaaataaatcttgttttttatgccattctctgagatccagctgaccgctgtttctgcaccatctcattttgaaagttttcgcatgctatcgcagccatctatccgaagggattcgggagaggtcgtcaggtacccaatgctctttggcaattcggaaaaccaacagaggggagagttccaccacctgaaagacagggaaggaagtggaaccagttttccagtcaattgggccaacagcgcggg

SEQ ID NO: 38395 - DNA, 1503 bp, Oryza sativa
  Clone ID: PAT_MRT4530_42034C.1
atggcggcgtctcggtctccgcctccgtcatcgccatggccttcctgggtcctgctggatccaaacgtgtcggactacagattttgcatcggtccaacagcaaaagggtggaaggtcgtcgattttacgaacaagaactacggagccgggaagaagtatggccaattgatggcggagtgtctgaagctatatgtgcgcctcgccgacggcgacgcgggcctggatcaatcagagttggccatcactgcaaacgacggggtcatccgctccatcatagaggaggagctcacggaacaaactggctgcctgaagatggatcttcacgggatcgtacacgcctcgtgtgtcaccggctacgtcgagatcgcggacaagaacctcatcatcctcgccgtgtcttactccttcgctcgtgacaattactaccttatctacgatgccactctccggtcgctctccatgataccccatgtatctgctcatccctattgccaggcctattacccgtgcgaccctctccctgtgcgctacggcgacgagtacacccttgtactcttcgcgcggaatttggagtaccagaaagaagaacaaggatgcaactactaccaccgtgatgtgctctgcctgtggccgccgccgccatcgtcggagaaaccgcctctgctgctgcgtgacaccccgggtccctccattgagccgtggcacttgaaggagcccgtcttcccggaggggaagacgccatcggagttccgccaccacgtcaagttcacgtccacaagccatgctttctgggctgacctcacgaagggcgtcctgtgctgccgctgcagcgacctcttcgacagctaccacgtcaacttcagcttcatcgagctgccccatgggtgcgagtgtgacgccctggacatgccggatactgcgccggcggagatataccggaccatgggttgcacctctgggagctcgatcaagttcgtctccatctccttcgaagattctatgccggtggatgaaaagaccatgacagtgtggacgctggacacggcctcttggggatggactaaggatgtggagctcagcctgggaagtctgtgggagctggaggacttcaagaagaatggattgccggagactcagccagtctaccctttcctgaggaaggaggaagatgaagacaatgccctctacttcacgctgtccagttcactgttggggccaatcagcgaatgtggggaacctgcggtgcaccacatgtgccgcttcgacatgagaagcatgaggctcgagtccagccctctttcttttcccccagatatgattgttccgcagcgtttgtttggctctgagttcttcagataccttgaccgtcatgttcaggttcctggttgtggcaaaggcaagaggaagttgaatgaggactatatactgatgctaatttgcccaagtgaattcctagggttgtgtgctcagcaatggagcgagtggaagagcatgcagaaatag

SEQ ID NO: 38396 - DNA, 243 bp, Oryza sativa
  Clone ID: PAT_MRT4530_42035C.1
atggcgggacggccctgtgggagggcgggagggccccatgggacggcgggacggcggcggtatgaaacggcgaaaacagcgggggcgaggtcgcaagtagccgaggagcccatgggcgtgggagtcaagaacacgacggggttggctactgaggtctcgcggcgcatgggaacgggcgtgggcggcagcgcgcggggacacacggaagacgccggcgcgcgggcgatgggcggtagtgcgtag

SEQ ID NO: 38397 - DNA, 3462 bp, Oryza sativa
  Clone ID: PAT_MRT4530_42036C.1
atggcgatgcgaggtgagccgtggcggcgccaggagggggagcaggcgcaggcggaggccgatcgggaacgcgagctggacctcttccgcagcggctccgcgccgcccacggtcgagggctccatgggcgcgctccacgccgccgccgccgccgacgtgttcctggaggacgagctccgggccgacccggcctaccactcctactactactccaacggcaacatcaaccctcgcctcccgccgccgctgctgtccaaggaggactggcgctccgcgcagcgccttcgccccggcttgggtgggatcggcgacgggaggaagcccagaggtggaggtggaggccgcggcggcggcggcgctggagggatgggtccaggggatggcctcattgggatgcccggtctcgagattggccgccagaatagcttctccggttttggcactataaaacgcctttctgtcgcaaaagtattggtcctgaaacttcttataattctattcaaggctaaagaaataacttctgacctatatatgctgcaggatgactcgtatcaacacgatacggatagacagggtgccaactgcaatggtacagacttgttgagttcttctaaagtgcagtatggtctacatcgtgagactggagctattagtggccttcactcagacagcaaagcaccatgcttgccagaaaaccagaatgaatcatcacactcatatgcatcaataataggatcatcactttcaagaagtgcatctccagatcctgaactagtgaggagagttcctagtccttgcctccccccaattggtgtgaaacttggtgctacagataagaagaataatgttggttcatcttctttcaattgtagttctcccaatattattgaatctgatgatttggtgtctgctctatctggtatgaacctgtcgtcatcaagagcaatgaacggaaacacaatggaccaatctaagctccatcaggatgtggatgatgttcgtaagttcctttttgatcagtacatggatcaaacaaatggcaatcagcgccattcctacatgaaacgttctgaacaaggacacgtgaaggttcctcaagaatattctggtgcttctatgaatccttctgttatgagaagccagatcaatgctggtggtttcacatcatttaacaactcatcggtgggatctggctttgcttctcctaggcttggatcccgatcaccaggtgggagtttatcttcacggcaaaatctaactggtgcatctaaccttccaaactacgttggaattggaagtccaactgcagcttctgcccaccagatgcctgttgatccactgtatgttcagttccttcgggcagcagaaattgctgcccttgcagctaactgtgaggatcctttgatggatagggctaatctaggaggttcttacatggatctatttggccctcagaaggcgtaccttagtccattgcttcagtcacagaagcaatatagttactacgggaatctcggggttggtcttggctatgctggtaactctttaacaagtcctattcttccctcgtcaccaggtggacctggtagtccacttaggcacggggatcgcagcatgcgctatccatctgggatgagaaattttggtggttcctttggctcctggaattcagatctcggtggtaagatggaggccaatttagttccatcacttctggaagaatttaagagcaacaaaagcaaatcatatgagctctctgaaatcgctggtcatgttgttgagttcagtgcggatcaatatggaagtagattcatacagcaaaagcttgaaacagccagcactgaagaaaaagacatggtttttgctgaaatcatgcctcaggctctcacattgatgactgatgtctttggaaactatgttgttcagaagttttttgagcatgggagctcagctcagataaaggagttggctgatcagctaattggacgtgtcttagcactcagcctccaaatgtatggttgccgagttatacagaaggccatagaagttgttgatttagatcagcagactaaaatggttgctgagcttgatggacaagtgatgcgctgtgtacgtgatcaaaatggaaatcacgttatacagaaatgtattgaatgcattccacagcatgctatccagttcattgtttcaaccttctatggtcaagttgtgatgctatcaactcatccatatggttgtcgggtgatacagagggtgctggagcattgtgatgatcctaaaacccagcaaatcatgatggatgagatcctacaatctgtttgcttgctggctacagaccagtatggtaactatgttgtccagcatgttctggaacatggcaaaccccacgagagatctgctattattgagaagttgattgggcagatagtacaaatgagccagcaaaagtttgcttcaaatgtcattgagaagtgtttagcctttgggaatcctgtggagcgtcaagtcctgattggtgaaatgcttggctccagtaatgagagcgaacatcttgaggtgatgatgaaagatcaatttgcaaactatgtggtacagaaggtgttagagacctgtgatgatcagcagagagagatgatccttacaaggataaaagctcatctgaacacactgaagaaatatacttacgggaagcatatagtggcacgcgtggaaaagctcgtcgcagccggagaaaatccgagtattatgggcgaggaggcgccggaggagtacgagctgggcggcggggaggacgagcgggtgatggagtgggagacggggctgcccggcgccgacgagctgaccccgctgtcgcagccgctggtgccggcggggctggcggcggcgttccgcatcccgccggagcccgggcgcacgctgctcgacgtgcaccgcgcgtcggcggcgacggtgtcccggttgcggcgcgcgtcgtcgtcgtcgtcgagctcgttcccggcgttcgcgtcgaagggagcgggaacgggagcggacgaggcggagtcagggggaggcgcggatggggggaacgggaacaccaacaacagcagcagcaagagggcgcggctggtgtggacgccgcagctgcacaagaggttcgtggaggtggtggcgcacctggggatgaagaacgcggtgcccaagacgatcatgcagctgatgaacgtggagggcctcacccgggagaacgtcgccagccacctccagaagtatcgcctctacgtgaagcggatgcagggcctctccaacgagggcccttccccctccgaccacatcttcgcctccacccccgtcccccacgcctccctccacgaccaggttccttctccttaccacccccacccccaccaccactcctacaacaacgccgcctatgccgccaccgtctcctcctaccaccactaccaccacgccaaccactga

SEQ ID NO: 38398 - DNA, 455 bp, Oryza sativa
  Clone ID: PAT_MRT4530_42037C.1
gtatgcaattcaggaggaaaagggccctttacagactcagtttgcagatatagagaagagcaacgaagacccaaaccaagccccgcagcctcgagaaccagcacaggagtttgataccgatgctcatatggaaaaacaaactgcaatggaagcatgaattggtgctccatacagacggttggttccattcaatgtattgcacgaaaatgctccgtaactatatgaagttgagttttggaaaatacatgtgccaaactcgaatgcatacttgcaagtttcctactgcatgtttgtatatcagtaccagcaaactgaagtactgttgtacaaacaaaaacatatatttgccgtagtgagaattgcttgagttgtaacaattccatgtactctctattattaaaagagctctgcatagccaagttgtacacacgcaaaaaaaaaaaaaaaaaaaaaaa

SEQ ID NO: 38399 - DNA, 459 bp, Oryza sativa
  unsure (1)..(459): unsure at all n locations
  Clone ID: PAT_MRT4530_42038C.1
cggacggtgnnntncttcttcttcctcttctacttgagctgaagctgaagctgccattgtcttgctgagctcgtttggntctctttggtctagcttgcaatggctagcgtcgtgcagtaccaggcggcggcggcggcgacggcgatggcgtgcgaggaggagttcattccgcaggggctgatctcctgcttcgggcggtcgctgtcgagggcgtcgtcggggcgacacctggagtactgcagcagggacgtgagcggcggcggcgaggatagccggcgcatggcgcaggagcgatcggcgagggcgaagctgcggtggaaggccgtggcgcaggagatcatggcgaggaggagcggcggcggcggcggcggatcagggcggcggaggaagacggcgttcagctacgactccaagagctacgcgctcaacttcgacgaccaggccgccggcgccgagtaa

SEQ ID NO: 38400 - DNA, 460 bp, Oryza sativa
  unsure (1)..(460): unsure at all n locations
  Clone ID: PAT_MRT4530_42039C.1
cccacgcgtccgcccacgcgtccggagcaagaagaagaggaggcagatgagaaatagggattctgccatgaaatcgagggagaggaagaagatgtatgttaaggacctagagactaagagcaagtatctagaggccgagtgtcgtcgcctcagctacgcgcttcagtgctgcgcagctgagaacatggcgctgcgccagagcttgttgaaggataggcctgtcggtgccgccacagccatgcaggagtctgccgtactcacggaaaccctgccgctggtttccctgctttggctcgtgagcatcgtgtgcctactcccggtgcccggtctacccaaccgaaacccggtggctcgaagcagcgccggaagagatctcgcgacggtaaccggaaagaagacaagcagtgaacaacagctagaagaaacattactactccatgggaggcgtngcaagggctcg

SEQ ID NO: 38401 - DNA, 273 bp, Oryza sativa
  Clone ID: PAT_MRT4530_4203C.1
atggctcgacctcttgctgcggcctctgtccagtgcccgatgccaggtacccagcagccagcaacctgcggccggtatctttgcaccgtgcgactgattttgtacaactattggaaatctttacttttggttttggtttggtccggcatgattcaagatttgcaggctggaatgtggatcgaccacatcgtgatgattgggagcattcccaaggacagattggaaagtaaggatgtaaaatcaaggaggccagctgttccattttgcttttga

SEQ ID NO: 38402 - DNA, 231 bp, Oryza sativa
  Clone ID: PAT_MRT4530_42040C.1
caattcccacctgtgactctaacttttctcttgccatggtcatatgctgcagcatagttttaattcaccattcctgaccacggtctgttgatcacaaagggaattactcatgagaccaggaattagtgcaaagtcaccatctatattactaaaataattttgaaagtcagatatataactctattcatgatggacaacacactgttaacatcattatatgtaatttccatt

SEQ ID NO: 38403 - DNA, 1440 bp, Oryza sativa
  Clone ID: PAT_MRT4530_42041C.1
atgacatggcacattcaagccctcccattggccatgccacggcaccaccccgcgtgggccccaccacctcccttcgccgaaactttcccctcctccttcctcccgaagcaaaatccgagcatctccgacgagtccgccatatttaaacacacccacgagcggcaacccaccgcgagagacaaaaatatctccatcgcgatctccatggatgtagagttcttcgccgacctcgacctcgacgcgctcctcgcctccttctcctcctccgccgccgccgccggctccggcgtctcgggcctcttcgccccgtcaccgccgcacgatgcggaggcggggtcgccggagtcggtgagctcccggcggcccagcccttcccgggaggcggcgctgtcggagatcgagaggttcctgatggaggagggccccgcggcggaggagggggtcggcgcggaggatttcttcgacgcgctgctcgtcgacggcggggaggaggaggaggaagaagaggggaaggggagtgatggcggggggaagcacggatggggattccgggaacgagaatgacaaattggcgtgtctatcgcctgtcgtgctgccgcttatccatggactatctttttctttttttggttccttccccccgagtttttataatatcctcctatgcataatgcattatccaggtagttttgaaaatgtatgttaaggacctagagactaagagcaagtatctagaggccgagtgtcgtcgcctcagctacgcgcttcagtgctgcgcagctgagaacatggcgctgcgccagagcttgttgaaggataggcctgtcggtgccgccacagccatgcaggagtctgccgtactcacggtatgcttgagtcataatcctgatgctcctacagtatatttgtgtcataaacctgatgctaaaggtaaccttttcctgtttgcagaaaccctgccgctggtttccctgctttggctcgtgagcatcgtgtgcctactcccggtgcccggtctacccaaccgaaacccggtggctcgaagcagcgccggaagagatctcgcgacggtaaccggaaagaagacaagcagtgaacaacagctagaagaaacattactactccatgggaggcgttgcaagggctcgagggcgaggatcaagctagataccggaccgttccgtttagcagcagctgcttgctaggctgccgcttccttgcaaagttgtttccagtctgtattgtagctagcaaatcaaattggcgtgtctatcgcctgtcgtgctgccgcttatccatggactatctttttctttttttggttccttccccccttgtttttataatatcctcctatgcataatgcattatccaggtagttttgaaatctggctttgttgaaaaaccaatatgatgctgatcatgttataaaaatatttg

SEQ ID NO: 38404 - DNA, 1322 bp, Oryza sativa
  Clone ID: PAT_MRT4530_42042C.1
cgagcaagaaaagccacgaagctccgggcgaagcggggacgagccggagcagcagcaccccgcccgtcgcgcgcaatggcgatccccaaggtggacctgcgagggctcgagccggggacgccggggtgggaggcggcccgggccgcggtgaccgcgtccatggtgtcgcacggctgcgtcgtggtcgcgcacggcgcgctcgggccggagctccgggaggcgctcttctcccgcgccgcgcgcgagctggttcgcgctcccggcggaggccaagcggcggaacgtctccacggtggggccttacaggggctacatcaccaacacccccgggatgaactgggagagcctccacgtcggcgccgccgccgacgccggccgcgtcccggagttcgccggcctcctctggcctgatggcaaccccgagttctggtgttcgtccagtgacacgatcgtgtcgttcgccaagaagatgacggagctcgagcgggcggtggagaggatgaccctggagggcctcggcgtcggggaggaccacatcgcctcgcacctcgacgcgcacgacgacgccgtccgcttgtcccgctacggcccgccgccggacgccgcgagcgccatgtccatgggggagcaccgggacgacaccgtgatcaccatcatcgtgcagcacgaggtggagggcctcgaggtgcaggccagcgacggcagctggcacacgatcccccctgagccggacacggtcgccttcatggccggtgagctgttcacggtggtgacgaacgggcgggtgcccgcgtgcgtgcaccgcgtgaggacgccgagccaccgcgagcggctcgtggcgctgttcaccacgcggtgcaagggcggcaccgtggtgagcgccatggacgagctcgtcgacggcgaccacccgctggcgtacaggccgtgcaacgaggacgagtacgtccagttccgccactcggaggagggcggcagattcagcgaaccgctcaaggcgttctgcggagtagacgtacgctagctgcacaatgatccactgaagatgatccttggattggaagtatgagtggtagtacctatcatcttcagttagtgctggttactcgtctttatgggttgtttgaatgtttgttctcttacgtttctgaaaaattcaacggcttcatatattaaaaaaacgaaggaagtatcatataaaataattcgagtaactatcatcttcaaatgtgagaggatgtgttccggaaagaaaaagacagtgctaaataaatttgcgcaacgatgacgatcgagcgtggttctataaaaaaaaaaaaaaa

SEQ ID NO: 38405 - DNA, 237 bp, Oryza sativa
  Clone ID: PAT_MRT4530_42043C.1
cccacgcgtccgcccacgcgtccgcccacgcgtccggtcatttttctcctcctggccattggtataaacaccctggtttgacaaaatacagtagcagaggaagacagttcggcgttgttcatattcttcttactagaaatcaacgttgttcataatacaatgatagtgttaattaagattaattaatcccaaaaaaaaaaaaaaaaaaaaaaaaacgacgacagctggtgcaagagc

SEQ ID NO: 38406 - DNA, 790 bp, Oryza sativa
  Clone ID: PAT_MRT4530_42044C.1
ccggccgggccccatcccattctcgccgccgccctcatctcgctccggtaatcctacctgccggatccgaccgatcctctccaactacagcatctccatccccctgttcttttcttctgttgacacagcacgcgctgtttttgttttccccgctctcctgatcgccgcagtttttctgccgttggaatccggatcttcgtcgtgggcgcgtcgccggtggccgtcgcgagcatcgaagcacacctgcaaaaactctcatgtgatgacaccttcagtacaaagctgattctgaaggctgaaaacatcaaattctggcacttaaagttcttctggtacatactttagcgaaccacactgcgaaaagtcttacgtgatgataccaaaggctgaaaacattgaatccatggaggcggcgggcgggcagctggaagcggcgctgctcctcattatgcaacgccaccaccaccattcccttcatcagcgcaagataaccgacagagaaaagatcgatgcagtgaggagcgcggcgcgggttgcagatcttctcgtggccacggttgatggcggagcgcaggagctctacatcaacgagaggcgcatagagattgaagcccgcgcgctgcttgctacaatcgcacggtacaagaagcagactgaccagtggcttgccgccaccaacgcaatcaactctgtcttgaaggaaattggagattatgagaactggatgaagatcatggatttcgactgtaaaagtataaatgcagctatccgtaacattcaccactcctga

SEQ ID NO: 38407 - DNA, 1983 bp, Oryza sativa
  Clone ID: PAT_MRT4530_42045C.1
ttattgagacaagtactgctggatagccgaaatagctctttgcctaatttgttcgacttcttcaatggcttgggcatcctgagcatcagtcctaggaatgatcttcagggacttggttaggtcagcaacattattgatagctgatttgagccttgctttttgctcttcgacagattttgggagatcggctagctttttgtgctccatatccaattcagcattgcattcttcaagcttcggatagctgatcgagtttgatttttcttcatgcacaagctgccgattgacttggattgtggcttcaatctctttacgctcacggcgttcggctaatcttagcttggctttttctagtttaaattgatgttgctcaagataagcggctggagttaggacatcggccagttcttcaggaattagagcttgaacttcgtgcaatcgtatcctaatcgatccatagtcgaccactaagctatccagagaagaggcctctagccgacgcgagatatcttcaagtgttcttgggatagcaggagcagccggttgttcttcttccacaatatgatgactccccacggccgatggagttcggtcactcgatgatttttgtacaggagaagaaggagtaggaggaggttcggctgcagcctgatcaacgtcatcctcaatatcttcttcatccagagcttgttcaatggatggatccaaagcaggcaggtcgtcggttggcttggttttcttagacttggcctttttctttggagctagagtcaaggtgctcacagctgatgatctagtttttcttttcttggttacatcggttggtttcctgatggcgccttggaggagggttgagaccttgggggcgtgatagccgatgacagggggagacaatccgcctccattaggaatcagacctggggcatattcaatgttcctaccactattgctctgatatttaggggaggattctgttgtctggggtatgacgtcagggaatagatcgacaggtaggatgcatgggctgattgcagctgtaaagacttccttggacgtttgatatctttcatgattgatgtcttcaaatctgaagtctaatgggagttcaaggtctgctgagtcttcataaagaaaccaaactcgggcatctttctggaagccttcataaaagctgcagaaccaatctttgagcagctcagccgatagttttgccccagcattggctagtgtggatgcatattcaacatatgacatgcatctgcgatgggtgcgttcttctccatcgtcttctacaattggcttcaaccttgggaattcagcttctgttacagatggccgattgacaactttcatgactaccaggtttagccaggtgtgctcccgaggagtgacaggccctttgcccatgtatgccactacataatcagaccaccctcctatgcttttggtcttgaagtcaaattggttcttggtgttcatactcatagggttagccgatgaagttatatccaatccagtaatcatgatgatgtcgatcaaagttggagtcattggcccttggttaaataagaaggcattaatggtgttggaccagaaataggtggcggcagccatcagaggttcatccttagcagaattggctatggtgagagcaagcgcttggccgatcccaatctcatcccaatgggttttcttactagccgatatgcgttggtaccaggtggtccagctcttatcaggggtaggcttttcgagagatggccaagacttgaaggtattcttccagtgacccaagttagggttggctagtctaaaggggattctgttggtttcaccaatgatgaaatcagtggggtcaagattgccgattgggccaagaaaatagtggtttttgtgcgataggctgggaatcgcaactaggttggaaaggtgctcagcgtactcggccgatgccgcagtagacaggctagcggaagacgacat

SEQ ID NO: 38408 - DNA, 1763 bp, Oryza sativa
  Clone ID: PAT_MRT4530_42046C.1
ggcaggcacgcggacggcggctgcgcgcgggcaacggcggcggctgcaggcgcacgggcgtcggttgcgtcgacgtcggcgtcggctgcgttgacgtcggcgtcggtaggcgtgcgggcagtggccgggcgacgcacgtgtgacgacggctgcgatggcgacccgtgggctgaccgctggcggcggggacggaggcgggtggcggtgacggcgcacgggttgagcggcggcggcagtagcaaggcgacgccaaccaggtgttcgacgaaatgccaacaaggaacgtatttgcgcggagctaagggcccagggccaccgcgggaccggcggagcttggcgctgtctgggccaaacggcccggcggctggccagggcggcacggggctgtcggttgcgtcgacgtcggcgtcggctgcgttgacgtcggcgtcggtaggcgtgcgggcagtggccgggcgacgcacgtgtgacgacggctgcgatggcgacccgtgggctgaccgctggcggcggggacggaggcgggtggcggtgacggcgcacgggttgagcggcggcggcagtagcaaggcgacgccaaccaggtgttcgacgaaatgccaacaaggaacgtatttgcgcggagcgtcggtaaccgtaggtaaccgtacggttaccgtggttaccgggcttaccgcggggtacggtaatataagtaccgcggtaacctccgccggggcgcggtaaccccggccccggcggtttgggaaacctggacaggctgcagcaatgggaggacgatgcctcttccaactccggaacaagaaaacggcggcggcggcgtcaaggcgcggcgagcaactccggcagcgccgccacgtgagcacgcgggggaggatgaagtgaaggtgcaggcactcgtcagcgtggtcccagggcgacgaggacatccgcaccacctcccatctccagcaagctcgtcctaccacgatccccgccatccgctcgctccgcgcggcgacggtggtcgtgtctatgcctgcccacgccgtccatggccgtcgtcgctcacgtcgtctcggtcgccggtagctcgcgtcgggagagggggtagcacccaggatccgtctcgcgttgacgtcgcttgcgtcatctcgaccgccagcccaccccgactcactgccgacgatgatctcgccccgattcctcacctccgctggcgcgccggtgaaaccggcgatggccgccggcaaattcttcaagcacggaacgaaggaggaagaagaaattggggcatttttgtccggaatgcatgttctcattgctccatctgagccgcctatgcgtgatccactgatcagggtgctgagttgctgacaaccgaggtgggaaccaggtactgagctccaccacataacaggggtatatgggaccgccttgggactgtttcggcccacgtgccacctcggtgccgctctctgggctgtaagagcgaggcggtgccgcacgtccatcctgcgtgaccgctggtcccgcggaatggaagtgtggtcccgcgcccccgttatagggtggaggtagttatgccaatctttttcacacatgtatataaacctaaatatatttttcgggattctccggcgtcctccccggccatgcggccaccatagccacccgctgcggcggcgacggagcattccggtgagccgcgccgacctcgcccgcatgcgccgccgcatcggcgacgacccacgccacccacctccaggtaattccacccgcat

SEQ ID NO: 38409 - DNA, 376 bp, Oryza sativa
  unsure (1)..(376): unsure at all n locations
  Clone ID: PAT_MRT4530_42047C.1
aatacccaaatgaaatatacggagggggggtatagcccatatctatataatatattactattaacaaaaacttaggatgcccacatatgtgataagctcatatctgatacacagaacatacataaaacatcaaacggagaaataatgaataacaagcgtcaagcctgcctgcttaaaatgtgtaaaggcagatggcgtacgcgatactaggcattgaatcgaaattcttggcaacagggtcgggccaaccttccagcacaggcaggttacctacttgaatgactccttgccctncttatactatgcaggacgcctacaatgcatcgatgggatgcaaatagatagagatcttgtattcagcttgatggaacagaac

SEQ ID NO: 38410 - DNA, 171 bp, Oryza sativa
  Clone ID: PAT_MRT4530_42048C.1
atggcgtgcaacgaccaagcagttttttcgggtagtgcgacgaaggttgggcggagatggcagctaccggaggaggaactcgagctcagggcagccatggaggccaggaggcaggtggcgagcggcggggagaagggtgaccgccggcaggaggcgggacctcggacctaa

SEQ ID NO: 38411 - DNA, 2361 bp, Oryza sativa
  Clone ID: PAT_MRT4530_42049C.1
ttattgagacaagtactgctggatagccgaaatagctctttgcctaatttgttcgacttcttcaatggcttgggcatcttgagcatcagttccagaaatgaccttcagggacttggttaggtcagcaacattcttgatagccgatttgagccttgctttttgctcttcgacagattttgggagatcagctagctttttgtgctccatatccaattcagcattgcattcttcaagctgtgccaagagatcgatcttgcgggcttcaagccgatcgatattggatttgatcggaccttcggatagctggattgtggcttcaatctccttgcgctcacggcgttcggctagtcttagcttggctttttctagtttaaattgatgttgctcatgataagcggctggagttaggacatcggccagttcttcaggaattagagcttgaacttcatgcaatcttgtcctaatcgatccatagtcgaccactaagctatccagagaagaggcttctagcctacgcgagatatcttcaagtgttttctttgcatcgtcagataagggagctagagctttgcttgaagtatcttcttctgcctcaacaagataatctttgatatcaaaagagaagagatcggctagaactgggatagcaggagcagctggttgttcttcttccacaatatgatgactccccacggctgatggagttcggtcactcgatggttgttgtacaggggaagaaggaggaggaagaggttcggctgcagcctgatcaacatcatcctcaatatcttcttcatccagagcttgttcaatggatggatccaaagcagacaggtcgtcggttggcttggttttcttagacttggcctttttctttggagctagagtcaaggtgctcacagccgatgatctagtttttcttttcttggttacatcggttggttccctgatggcgccttggaggagggttgagaccttagaggcatgatagccgatgacagggggagacaatccgcctccattaggaatcagacctagggcatattcaatgttcctaccactattgctctgatgtggaggggaggacttagttgtctggggtatgacgtcggggaatagatctgtcatgtacattgtggccgattgatgaaatagatgcaacttccattcaccccaccatctgtcaaagttcctgctcctgaatcctgctaactcaatattgtcgatattgcctaagggaggtccttggaggttaagcagtcgatccatcattagagttgaagaaatttctcctcggcattggatcttgttagcaaagaataagtcgattgggagttggcctaatccaagttgtctagctgaacttgtggggtgatagaattcgtaggagacttggatatttcttccttggtgaataccgacaggtaggatgcatgggctgattgcggctataaagatttcccttgggaattcagcttttgttacagatggccgattgacaacttttatgactaccaggtttagccaggtctgcagtagccaccatggtccaccttcttcaactattgagccgacggctatcttagccgatgcattgttcaacatttggtatagatagtcgagaaggattttgcccaaggggaattgtttctttgattttaaggcttcggctacaaattgccaattggttgtgggaccacagctgaatccacagaagagaaacttttctagccacattagcaagaaagctatgtgctcccgaggagtgataggccctttgcccatgtatgccgctacataaccagaccaccctcctatgcttttggtcttgaagtcaaattggttcttggtgttcatactcatagggttagccgatgaagttacatctaatccagtaatcatggtgatatcgattaaagttggagtcatcggcccttgattaaacaaaaaggcattgatggtgtttgaccagaagtaagaggcagttgccatcaggggttcatctttggccgagtttactatagtgaggtcaagttcttggccgattccaatttcatcccagtgaacccttttgcttgctgatacacgtttgaaccatgtggtccaacttttttcaggtggaactttctctagagacggccaagatttgaaggtattcttccagtgacctagatctgggttggttaatctgaaggggatcctattggtttcaccaataataaactcagtggaatcagggttgtcgactgggccgagaaagtagtagttttcgtatgagaggcttggaatcgcgactagattggagagatgctcagcatactcggctgatggcgtatcagatgggttggtggaggacgacat

SEQ ID NO: 38412 - DNA, 160 bp, Oryza sativa
  unsure (1)..(160): unsure at all n locations
  Clone ID: PAT_MRT4530_4204C.1
cggacgcgtgggggcgcgcagtcggcgcacgacgcggagatcagggcgctgctgtaccagcacgggctgtcgccggtggcgagctacngcgttcagggtggcggagctcactgcgcacatttacgagctgcggaacgtgctggggaggaagggggtcaag

SEQ ID NO: 38413 - DNA, 2961 bp, Oryza sativa
  Clone ID: PAT_MRT4530_42050C.1
atgtcgtcttccaccagcccttctactgcaccatcggccggtacgctgagtaagaaagttcactgggatgaaattggaatcggccaagcactcgctttcaccatagccaattctgctaaggatgaacctctgatggctgccgccacctacttctggtccaacgccatcaatgctttcttattcaaccaagggccgatgactccaactttaatcgacatcaccatgattactggattagatgtaacttcatcggctaaacctatgagtatgaacaccaagaaccaatttgacttgaagaccaaaagcataggtggctggtctggctatgtggcggcatatatgggccaagggtctgttacccctcgagagcatgtagctttcttgctgatgtggctggaaaagttcctcttttgtggatccagttgtggccctacaaccaactggcactctgtagctgaagccttagaatcaaagaaagaatttcctttgggcaaaatccttctcggctatctgtaccagatattgaacaatgcatctgctaaaatagccgtcggctcaatagttggagcaggtggaccatggtggctactgcaaacttggttaaacctgatagtcatgaaggttgtcaatcggccctctgtgacaaaagctgaattcccattgccagagccgattgtggaagatgacggagaagagcgcacccatcgcagatgcatgtcatatggagaatatgcatccacaccaaccgatgctggagcgaagctatcggctgagctactcaaggactggttctgcagcttctacgaaggttttaagaaagatgcacgaatctggtttccttatgaagactcagcagaccttgaacttccatcagactttagatttgaagacattaatcatgaaaaattccaaaaatccagagaaattcttatagctgcaatcagcccatgcatcttctctgtcggcattcaccatgggagaaacatccaagtctcctacgagttttatcacccacttggattgggccaactcccaatcggcttattctttgccgacaagattcagtgccgaggacaaatcacatccactctaatgatggatcggctacttaacctaccaggaccccctctgggcagtattgataatattgagttggcaggatttagaagcaaaaactttgacagatggtggggtaaatggaagatgcatctattttatcaatcggcttcaatgtatatgacagatctattccctgacgtcataccccagacaacagagtcctcccctcctcatcaaagtaatagttgcaggaacattgaatatgcttcaggtttaattctgaatggaggtggactatctcccccttttatcggctaccatgcccccaagacttcaactttccttcacggcctaactagggaaccagccgatgcaggcaagaaaaggaaaaccagatcatcagccatgagtaccttagccttggctccaaagaaaaagaccaaattcaagaaaactcaaccacaaccaactgatatgtcgactgatgatctgcccgccttggatccatctattaaacaagctttagatgaagaagaaattggtgaagatgttgaccaagctgtagccaaaatgagtgacacagaaagaacactatcggctttacccaagcaaacgcctccaactccttctgcccccaagaagaaaactactgtgaagaaaaaaccagcagcaacaattgttaaatcggctccaccacaatcgtcaagtaatcagactccatcggctgtggggagtcatcacgtcgaagaggaagaacaaccagctgcttctgctatcccagctctagccgatctcttctcttttgacatcagagattaccttgatgaggcagaagaagacacttcaagcaaagcccaagctcccctatccgatgatgtgagaaaaacacttgaagacatcgctcatcggctagaagcctcttctttagacagtttggtagttgactgtgggtcaattaggacgcggctgcatgaagttcaagctctgattcccgaagatctggctgatgtcctaactccagccgcttatctcgagcaacatcagttcaagctggaaaaagccaagctaagactagccgaacgccgtccaatcaaatccaatattgatcggctcgaagctcgcaagattgagctcttggcgcaacttgaagaatgcaatgccgagctagatatggaacacaaaaagctagccgatcttccaaaatcaattgaagaacaaaaagcaaggctcaaatcggctatcaaaaatgttgctgacctaaccaagtccctgaaagtcatctctggaactgatgctcaagatgcccatgctattgtagaaggggcatgtttcgagtttgcttataccattaaaccgtatgcgactaataatcaagctgagtatgaggcagtgctcaaagggttgcaattactcaaggaagttgaagccgataccattgaaatcatgggggattctttgctagtaatcagtcaattggcaggagagtatgaatgcaagaatgatacattgatggtttataatgagaagtgccaacaactaatgaaggagtttcggctggttactttaaagcatgtctctcgagaacaaaatattgaagctaatgatttggcccaaggggcatcagggtataagctcatgatcaaagatgttaaggttgaaattgcagcaatgacagccgatgattggaggtatgatgtgcatcagtatttgcataatccgtctcaatcggcttctaggaaattgagatataaggcattaaagtatactctgttggatgatgagctttattatcggacgattgatggagtgttacttaagtgtttgactgccgatcaggctaaagttgcagtcagcgaagttcatgaagaaattttggtactcatcaatcggctcataagatga

SEQ ID NO: 38414 - DNA, 159 bp, Oryza sativa
  Clone ID: PAT_MRT4530_42051C.1
atgacgatgacgtcggatgacgacggcgacgatgactacaaccacgaggagggcgaacggaatgatcctgttgtgaagttctacaattccggaatccagggcgtgaatgaagttcttcgctttcacttcaacgtgaatgaagagatcgctggtgactaa

SEQ ID NO: 38415 - DNA, 2523 bp, Oryza sativa
  Clone ID: PAT_MRT4530_42052C.1
ttaaagccgatcgatatttgacttgatcgggcctccagacagctgatcaagcttggacttctctacatgcacaagctgccgattgtgctggattgtagctttaatatctttgcgttcccggtgatcggctaatctctgcctagccttctctagcttgaatcggtgttgctcaaggcaaacggctggagtaagggcatcggctagttcatctgggagtagagcttggatgtctgtaaaccttgcccggatcgagccacagttggtcaccaagttgtctagtgatgcttctagccgatgagaaatatcttccagtgtttttctcacatcatcggataggggagctaaggctttgcttgaagtatcttcttttgcttcatcaaggtaatctctgatgtcaaaagagaagagatcggctagaactgggatagcaggggcagctggttgttcttcttcctcaatgtgatgactcctcacagccgatggagtctggtcacttgacggttgtggtggagccgacttgacaatcgttgctgttgactttttcttcacagcagttttctttttccttgtaaaatgaacgggggcagaaggagttggaggcgtttgcttgggtgaagccgatggtgttctttctgtgtcactcatttcggctacagcctggtcaacatcttcaccaatttcctcttcatctaaggcttgttcaatagatggatccaaggcaggcagatcatcagccggcttatcagttggcttggttttcttgaatttggcctttttctttggagctaagaccaaggtactcacggctgatgatctggttttccttttcttgcctgcatcggctggttccctggttaggccgtgaaggagatttgaagtcttgggggcatggtagccgataacagggggagatagttcacctccattcagaattagacctgaagcatattcaatattcttgccactgttactttgatgaggaggggaggactctgttgtctggggtatgacgtcagggaatagatctgtcatatacattgaagctgattggtgcaatagatgcagcttccattcatcccaccatctgtcaaagcttttgcttctaaatcctgccaactcaatattatcaatgttgcccagagggggtccttgtaggttaagtagccgatccatcattagagtggaagtgatttgtcctcggcactgaaatttgtcggcaaagaataagccgattgggagctggcccaatccaagttgtctagccaagttcattgggagataaaactcgtaggagatttggatgtttcttccttggtgaatgccgacagggaggatgcatgggctgattgcagctataagaatttctctagatttttggaatttttcatggttaatgtcttgaaatctaaagtctgatggaagttcaaggtctgcggagtcttcgtagggaaaccaaattcgtgcatctttcttaaaaccttcgtagaaactgcagaaccagtccttgagtagcttagccgatagcttcgctccaacatcggttggtgtggatgcatattctccatatgacatgcatctgcgatgggtgcgctcttctccgtcatcttccacaattggctctggcaatgggaattcagcttttgtcacagagggccgattgacaaccttcatgactatcaggtttaaccaagtttgaagcagccaccatggtccacctgctccaactattgagccgacagctattttagccgatgcattgttcaacatctggtacagatagccgagaaggattttgcccaaaggaaattctttctttgattctaaggctttggctacaaattgccagttggttgtagggccacaactggatccatagaagaggaacttttccagccacatgagcaagaaagctacatgctctcgaggggtaacagacccttggcccatatatgctgccacatagccagacctgccacctatgcttttggtcttgaagtcgaattggttcttggtgttcatgctcatagggttagccgatgaagttacatctaatccagtaatcatggtgatgtcgattaaagttggagtcattggcccttggttgaataagaaagcattgatggtgttggaccaaaagtaggtggcggcagccatcagaggttcatccttagcagaattggctatggtgagagcgagtgcttggccgataccaatttcatcccagtgaactttcttactagccgatacgcgttggtaccaggtggtccagctcttatcagcagtaggttttatgagagatggccaagacttgaaggtattcgtccagtgacccaggttagggttggctagtctaaaggggatccggttagtttcaccgataatgaaatcagtggggtcgagattgccgattgggccaagaaaatagtggtttgtgtgtgaaaggctgggaatcgcgactaggttggaaaggtgttcagcgtactcggccgatggcgcagtagaagggctggtggaagacgacat

SEQ ID NO: 38416 - DNA, 332 bp, Oryza sativa
  Clone ID: PAT_MRT4530_42053C.1
tcccggtccacccaacccttccgaacttcccttggcattaccttccacacatttccgatataaatattttacagcaacaaacaaagggcccaagggaactacacttactttaaaggtgttatgatagggaatgccctgatggacaacaagacagaccacacgggcatgatctactacccctgggaccccaccctcatttctgacccggtgtacgcccacgtcaagaagtactgcaactctttcatggagaacatgaccgacgcctgcgacaacaccctcaccaagtacttctccgtgtaccgcctcattatcatgttcaacctttacacccc

SEQ ID NO: 38417 - DNA, 2715 bp, Oryza sativa
  Clone ID: PAT_MRT4530_42054C.1
ttgagacaagtatcgttggatagccgaaatagccctttgcctaatttgttctacttcttcaatagcttgggcatcttgagcatcagttccagagatgacttttagggacttggttaggtctacaacattctagatagccgatttgagccttgctttttgttcttcaattgattttgggagatcggctagctttttgtgctcaatatctagctcggcattgcgttcttcaagttgcgccaagagctcaattttgcgagcttcaagccgatcaatattggatttgatcggaccttcagatagctgatcaagtttggtcttttcttcatgcacaagctaccgattagcttggattgtggcctcaatctcgttgcgctcacgacgttcggctagtcttagcttagctttttccagcttgaattgatgttgctcgagataagcagctggagttaggacatcggccaaattgtcttcaagtgtttttctcacatcagcggatagaggagctagagctttgcttgaagtatcttcctctgcttcgtcaaggtaatctctgatgtcaaaagagaagagatcggctataactgggatagcaggagcagttggttgttcttcctcctcgatgtgatgactccccgcagccgatggagtctggacacttaacgattgctgtacaggaggagaagcaagaggaggctgtgatggagccaacttggcaatcattgttgctgactttttcttcacaacagttttcttttttcttgtaaaatgaacgggggcaaaaggagttggaggcgtttgcttgggtgaagccgatggagttctttctgtgtcactcatttcggctacggcctggtcaacatcttcaccaatctcctcttcatctaaggcttgttcgatagatggatccacggtgggtagatcatcagccagtttatcagtcggcttggctttcttgaatttggactttttctttggagctaaggccaaggtactcatggccgatgatctggttttccttttcttgcctgcatcggctggttccctggttaggccgtgaaggagagttgaagtcatgggggcatggtagccgataacagggggagatagtccacctccattcggaattaggcctgaagcatattcaatattcttgccactgttactttgatgaggaggggaggattctgttgtctggggaatgacgtcagggaatagatctgtcatatacatcgtagccgattgatgaaatagatgcaacttccattcaccccaccatctgtcaaaattttttcttctaaatcatgacaactcgatattttcaatgctgcccagaggaggtcctggtaggttgagtagccgatccatcattagagtggatgtgatttgtcctcggcactgaatcttgttggcaaaaaataagccgattgggagttgacccaatccaagttgtctggccgagctcattgggtgatagaactcgtaggagacttggatgtttctcccttgatgaatgttgacaggatggatgcatgggctgattgcggctataagaacttctctggatttttggaatttctcatgattaatatcttcaaatctaaagtctgatggaagttcaaggtctactgagtcttcataaggaaaccagattcgtgcatctttcttaaaacctttgtagaagctgcagaactagtccttgagcagctcggccgacagctttgctccagcatcggttggtgtggatgcatattctccatatgacatgcatctgcgatgggtgcgctcttctccgtcatcttccgcaatcggctctggcagtgggaattcagcttctgttacagagggtcgattgacaaccttcatgactatcaggtttaaccaagtttgtagcagccaccatggtccacctgctccaactactgagccgacggctattttagccgatacattgttcaacatttgatacagatagccgagaaggattttgcccaaagggaattctttctttgattctagtgcttcggctacaaactgccagttggttgtagggccacagctggatccacagaagaggaacttttccagccacatgagcaagaaagctacatgctctcgaggggtaatagatccttggcccatatatgccgccacatagccagaccagccacctatgcttttgttcttgaagtaaaattggttcttggtgttcatactcatggggttagccgatgaagtcacatctaatccagtaatcatggtgatgtcgattaaagttggagtcatcggcccttggttgaataagaaagcattgatggtattcgaccagaagtaggtggcggcagccatcagaggttcatccttagcagaattggctatggtgagagcaagtgcttggccgattccaatctcatcccagtgaactttcttactagccgatacgcattggtaccaggtggtccagctcttatcaggtgtgggtttttcgagagatggccaagacttgaaggtattcttacagtgacccaggttagagttggctagcctaaaggggatccacttggtttcaccaatgatgaaatcagtggggtcgagattgccgattgggccaagaaaatagtggtttttgtgcaaaaggctgggaatcgcgacttggttggagagatgctcagcatactcggctgatggcgcatcagatggattggtggaagacgacat

SEQ ID NO: 38418 - DNA, 1941 bp, Oryza sativa
  Clone ID: PAT_MRT4530_42055C.1
atggacgacctgaaggcgatcttggcgcggccgatccagttggcggagcaggtgatcaagtgggcggaggaggcgcagacgtgccggcaggagtgcctcgacctcaaggccaaggtggagcgcctcgcctccctcctccgccaggccgcccgcgccgacctctacgagcgccccgcccgccgcatcctcgacgacaccggcaaggccctcgacaaggccgccgccctcctcgaccgctgccgcggccacggcctcatccgccgcgtcttcaccatcatccccgcgggctccttcaagaagacctccaaccagctcgacaactccctcggcgacctctcctggatcctccgcgtctccaactactccaacgccgacgacctcgacgacgaccacatcggactcccccccatcgcccagaacgagcccatcctcttcctcatctgggagcagatcgccgtcctctacaccggcaacccggaggcgcgcgccgacgccgccgccagcatcgtctccctcgcccgcgacaacgaccgctacggcaggctcatcatcgaggaggacggcgtccccccgctgctccgcctcatcaaggagggctcctccgagggccaggagaccgccgccctcgccatcggcctcctcggccgcgaccccgagtgcgtcgagctcatggtcctcgccggcgtctgcaccgccttcgccaagatcctcaaggacgcacccatgaaggtgcaagggatggtcgcctgggccgtctccgagctcgccaccaaccaccccaaatgccaggacgccttcctccagagcaacgtcatccgcctcctcgtctcccacctcgccttcgagaccgtccaggagcactccaagtacgccgtcgcctccaagatgtccatacacaccgtcctcatggacaagaagaacaacggctccacctcctcctcgcaccaccacgacgcgctagacgccgtcgaccacgccgccgccaccaccaccaccaccaccgccatggcggccaagcccaccggaggcggcgccgccagctcgagcggcgcaggcgcaggatcagcaggaaccgggacgacctcgagcagcagcgtcagcgtcggcggcaccgtcgccgggacgaagcagcacaacgcgtcgctgtccgggacgagcaccaaggcgcgggagttcgaggacccggagacgaaagcctacctcaaggccaacgccgccaaggcgctgtggcagctcgccatgggcaacgcggccgtgtgcaagaacatcaccgagtccagggcgctgctctgcctctccgtcctcctcgagaaaggcgtcgacgacgtgcggtacaactcggccatggcgctcatggagatctgcctggtcgccgagcagaacgccgacctccggcgatcggcattcaagccgacatcccccgccgcccgcgccgtcgtcgaccagctcctccgcgtcgtccacaaggccgactacgacgagctcctcatcccatgcatcatttcgctcggctgcctttccagaaccttccgggcgaccgagacccggatcatcgggccattggtgaacctcctcgacgagagggaagccgacgtcagccgggaggcggccgccgcgctcaccaagttcgcctgcacggagaactacctccatgtcgaccactccaaggcgatcatccaccatggcggcgccaagcacctcgtccagctcgtctacttcgccgagcaggccgtccagatcgccgcgctcctcctcgtgtgctacattgcgcacaacgtccccgacaacgaggagctcgcgcaagcggagatcctcaccttgctcgagtgggcatcaaagcaagcggccatggtgcaagatccattgatcgagaacttgttgctggaggccaagattagaatggagctctaccaatccagaggggcaaaaggttactactga

SEQ ID NO: 38419 - DNA, 2757 bp, Oryza sativa
  Clone ID: PAT_MRT4530_42056C.1
atgaagaaggaaatgaggggttttggttgccgctgcccatggaggcctagcccttctattgtgccatcggccgagtacgctgagcacctttccaacctagtcgcgattaccagcctttcgcacaagaaccactattttcttggcccaatcggcaatcttgacccctctgatttcatcatcggtgaaaccaacatgatcccctttggactagccaaccctaacctgggtcactggaagaataccttcaagtcttggccatctctcgaaaaacctactcctgataagagctggaccacctggtaccaacgcgtatcggctagtaagaaagttcactcggatgagattgagatcagccaagcgctcgctctcacgatagccaattctgctaaggatgaacctatgatggctgccgccacctatttctggtccaacaccatcaataccttcttattcaaccaagggccgatgactccaactttgatcgacatcatcatgattactggattagatgtaacttcatcagctaaccctatgagtatgaacaccaagaaccaatttgacttcaagaccaaaagcataggtggctggtctggctatgtggcggcatatatgggccaaggatctgttacccctcgagagcatgtagctttcttgctcatgtggctggaaaagtttctcttctgtggatccagttgtggccctataaccaactggcaatttgtagccgaagccttagaatcaaagaaaagatttccattgggcaaaatccttctcggctatctgtaccaaatgttgaacaatgcatcggctaaaatagccgtcggctcaatagtcggagcagataaattcccattgccagagccgattgtagaagacgacggagaagagcgcacccatcgcagatgcatgtcatatggagaatatgcatccacaccaaccgatgctgaagcaaagctatcggctgagctgctcaaggaatggttctgtagcttctacgaaggttttatgaaagatgcacggatcaggtttccttatgaagactcagcagaccttgaacttccatcagactttagatttgaagacattaatcatgaaaaattccaaaaatccagagaagttcttatagctgcaatcagcccatgcatccttcctgtcggcattcaccaagggagaaacatccaagtctcctacgagttttatcacccaatgagctcggccaaacaacttggattgggccaactcccaatcggcttattctttgccgacaagattcagtaccgaggacaaatcacatccactctaatgatggatcggctacttaacctactaggaccccctctaggcagcattgataatattgagttggcaggatttagaagcaaaaactttgacagatggtggggtgaatggaagttgcatctatttcatcaattggcttcaatgtatttgacagatctattccctgacgtcataccccagacaacagagtcctccccttcacatcaaagtaacagtggcaaaaacattgaatatgctccaggtctaattccgaatggaggtggactatctccccccattatcggctaccatgcccccaagacttcaactctccttcacggcctaaccagggatccagccgatgcaggcaagaaaaggaaaaccagatcatcggccgtgagtaccttggccttagctccaaagaaaaagaccaaattcaagaaaactcaaccgactgataagccgactgatgatttgcccgccttggatccatctattgtacaagctttaaatgaagaggaaattggtgaagatgttgaccaggctgtagccgaaatgagtgacacagaaagaacaccatcggcttcacccaagcaaacgcctccaactccttctgcccccgttcattttacaagaaaaaagaaaactgctgtgaagaaaaagccagcagcaacgattgtcaagtcagccccaccacaattgtcaagtgaccagactgcatcagctgtgtggtgtcatcacatcgaggaggaagaacaaccagctgctcctgctatcccactcttactctttccgaaattgtctctgttggttctagccggtctcttctcttttgacatcagagattaccttgatgaggcagaagaagacacttcaagcaaagctctagctcccctatctgatgatgtgagaagaacacttgaagatatctctcatcggctagaagcctcttctttagatagtttggtagttgactgtgggtcaattaggacacggctacatgaagttcaagctctgattcccgaagatttggccgatgtccgaactccagccgcttatctcgagcaacatcagttcaagcgggaaaaagccaagctaagactagccgaacgccgtgagcgcaaagagattgaggccacaattcaagctaatcggcagcttgtgcgtgaagagaagaccaaacttgatcagctatctgaaggtctgatcaaatccaatattgatcggctcgaagctcacaagattgagctcttggcgcaacttgaagaatgcaatgccgagctagatatggaacacaaaaagctagccgatctcccaaaatcaattgaagaacaaagggcaaggctcaaatcggctatcaagaatgttgctgacctaaccaagtccctgaaagtcatctgtggaactgatgcacaagatgcccaagctattgaagaagtagaacaaattaggcaaagggctattttggctatccagtga

SEQ ID NO: 38420 - DNA, 2796 bp, Oryza sativa
  Clone ID: PAT_MRT4530_42057C.1
atgtcgtcttccaccagcccttctactgcgccatcggccgagtacgctgaggtaagtcctcaccagctagatcccttttcctcgcatgaaattgatttctccttttctcctcatgttttctgcttcccaattcctttagatttgttgcacctttccaacctagtcgcgattcctagcctttcacacaaaaaccactattttcttggcctaatcgacaatctcgaccacactgatttcatcatcggtgaaaccaaccggatcccctttagactagccaaccctaacctgggtcactggaagaataccttcaagtcttggccatctctcgaaaaacctactcctgataagagctggaccacctggtaccaacgcgtatcggctagtaagaaagttcactgcgatgaaattggaatcggccaagcacttgctctcaccatagccaattctgctaaggatgaacctttgatggctgccgccacctacttttggtccaacaccatcaatgctttcttattcaaccaagggccgatgactccaactttaatcgacatcaccatgattaccggattagatgtaacttcatcggctaaccctatgagtatgaacaccaagaaccaatttgacttcaagaccaaaagcataggtggctggtctggctatgtggcggcatatatgggccaaggtggatccagttgtggccctacaaccaactggcaatttgtagccgaagccttagaatcaaagaaagaatttcctttgggcaaaatccttctcggctatctgtaccagatgttgaacaatgcattggctaaaatagccgttggctcaatagttggagcaggtggaccatggtggctgctgcaaacttggttaaacctgatagtcatgaaggttgtcaatcggccctctgtgacagaagctgaattcccattgccagagccgattgtggaagatgacggagaagagcgcacccatcgcagatgcatgtcatatggagaatatgcatccacaccaaccgatgctggagcgaagctatcggctgagctactcaaggactggttctgcagcttctacgaaggttttaagaaagatgcacaaatctggtttccttatgaagactcagcagaccttgaacttccatcagactttagatttgaagacattaatcatgaaaaattccaaaaatccagagaaattcttatagctgcaatcagcccatgcatcctccctgtcggcattcaccaagggagaaacatccaagtctcatacgagttttatcacctaatgagctcggccagacaacttggattgggccaactcccaatcggcttattctttgccgacaagattcagtgcccaggacaaatcacatccactctaatgatggatcggctacttaacctactaggaccccctttgggcagcattaataatattgagttggcaggatttagaagcaaaaagtttgacagatggtggggtgaatggaagctgcatctatttcatcaatcgacttcaatgtatatgacagatctattccctgacgtcataccccagacaacagagtcctcccctcctcatcaaagtaacagtggcaagaacattgaatatgcttcaggtctaattccgaatggaggtggactatctcccccttttatcggctaccatgcccccaagacttcaactctccttcatggcctaactagggaaccagccgatgcaggcaagaaaaggaaaaccagatcatcaaccatgagtaccttagccttggctccaaagaaaaaaaccaaattcaagaaaactcaaccacaaccaactgatatgccgactgatgatctacctgccttggatccatctattgaacaagctttagatgaagaggaaattggtgaagatgttgaccaagctatagccgaaatgagtgacacagaaagaacaccatcggcttcacccaagcaaacgcctccaactccttctgcccccgttcattttacaagacaatcatcaagtgatcagactccatcggctgtggggagtcatcacgtcgaagaggaagaacaaccagctgctcctgctatcccactcttattctttccgaaattgtctctgcatgctctagccgatctcttctcttttgacatcagagattaccttgatgaggcagaagaagacacttcaagcaaagccctagctcccctatccgatgatgtgagaaaaacacttgaagacatctctcatcggctagaagcctcttctttagacagtttggtagttgactgtgggtcaattaggacacagatgcatgaagttcaatctctgattcccgaagatttggctgatgtcctaactccagccgcttatctcgagcaacatcagttcaagctggaaaaagccaagctaagactagccgaacgccgtgagcgcaaagagattgaggccacaatccaagctaatcggcagcttgtgcatgaagaaaaaaccaaacttgatcagctatctgaaggtccgatcaaatccaatattgatcggctcgaagctcgcaagattgagctcttggcgcaacttgaagaatgcaatgccgagctagatatggaacacaaaaagctagccgatctcccaaaattaattgaagaacaaaaagcaaggctcaaatcggctatcaagaatgttgctgacctaaccaagtccctgaaagtcatctctggaactgatgctcaagatgtccaaactattgaagaagtagaacaaattaggcaaagggctattttggctatccagcgatacttgtctcaataa

SEQ ID NO: 38421 - DNA, 127 bp, Oryza sativa
  Clone ID: PAT_MRT4530_42058C.1
cttggataaaaagaacaatgtaccacctgagaagtcattaaagctcccatacaagattgatggtgacaaggtgttcgggtggtctaaccggcgaggctttggtggtctgaccgacggcaggaaggcg

SEQ ID NO: 38422 - DNA, 1312 bp, Oryza sativa
  Clone ID: PAT_MRT4530_42059C.1
tactgcctatagggggtccttggaggttaagcagccgatccatcatcagagttgatgagatttctcctcggcactgaatcttgtcggcaaagaataagtcgattgggagttggccaaatccaagttgtctagccgagctcatcaggtggtaaaattcataagagacttggatgtttctgccctgatgaatgccaacaggaaggatgcatgggctgattgtagctgtaagaacttttcatgattgatgtcttcaaatctgaagtctgatgggagttcaagatctgctgagtcctcgtaaggaaaccaaacccgggcatctttctgaaagccttcataaaagctgcaaaactaatccttaagcagctcagccgacagctttgctctagcatcagttggcatagatgcatattctccatatgacatgcatctacgatgagtgcgttcttctccatcatcttccacaatcggctccaaccttggaaattcagcttctgtcacagatggccgattgacaactttcataactaccaggtttaaccaagtctgcagcaaccaccatggtccacctgccccaaccactgagccgacggctatcttggccgatgcattgttcaacatttggtatagatagccgagaaggattttgcccaaagggaattgtttctatgatcctaaagcttcgactacaaattgccaattggtttgtgggaccacagctggatccacagaagagaaacttttctagccacattagcaagaaagctacgtgctcccgaggagtgacaggccatttgcccatgtatgccgctacataaccagaccaccctcctatgcttttggtcttgaagtggttcttggtgttcatactcatacggttacccgataaagttacatctaatctagtaatcatgatgatgtcgatcaaagttggagtcatcggcccttcgttaaataagaaggcattgatggtgttggaccagaaataggtggcggcagccatcagaggttcattcttagcagaattggtagccgatatgtgttggtaccagatggtccagctcttatcaggggtaggcttttcaagagatggccaagacttgaaggtattcttccagtgacccaggttagggttggctagtctaaaggggattctgttggtttcaccaataatgaaatcagtggggtcaagattgccgattgggccaagaaaatagtggtttttgtgcgataggctgggaatcgcaactaggttggaaaggtgctcagcgtactcggccgatggcgcagtagacgggctagtggaagacgacat

SEQ ID NO: 38423 - DNA, 847 bp, Oryza sativa
  Clone ID: PAT_MRT4530_4205C.1
atgacgtcaccgacagcggcggcggctcggcggagcagacggctcggacggcgcacgctcgccggcgaacggcggcactacggcacaaacggagggcaccagcacgtagaggacgacgcggcgaactcaccggtgaccaaaacggcggcggaggaagaacggacggcgacggtgacgaggttgaaacggcggcggagatcgggtcgacgacggcgacgatgctccggcggtctccgacggtggcgaagtggcggacgaggacgacgacgacttggcgaccacgacggcggtcttcccgagcgacgacgatgaccggaacggcggcggcgcacggctggagcgacggcggcgacggcggcactagggcacacggtgctagagctcttccggcgacgagaggcgaaggcgagggtggcgacgggtagaggaggcaccgggggtccttttaaatgggctcggaggcggcggcaaaggcccacggcgacggcaacggcgaaggaaagctcgggtagaacgaatccgagacgaactcgaatccaactctttccaagacgatttggccaaagattccaaaggagaaaaggtagaggagatcccgaggatcatttcccctctatcaattcggccggagaaggaaaggagcggccggattggaaagcggcggcggcggcgcgaaactagggtttcggcccgaggaagacgacgactccgacaggcgggacccacctgtcagcgacagcgagggcgcgcgcgcgagcggctgcggctgcggactgggccggctgggccgaggagagagagaggaggttttgggccgactttcggcccaaagccaaaagaagacttt

SEQ ID NO: 38424 - DNA, 2676 bp, Oryza sativa
  Clone ID: PAT_MRT4530_42060C.1
ttattgagacaagtatcgctgcatagccaaaatagccctttgcctaatttgttctttttcttcaatagcttgggcatgttgagcatcagttccagagatgactttcagggacttggttaggtcggcaacattcttgatagctgatttgagccttgatttttgttcttcaattgattttgggagatcggctagcttcttgtgttccatatctagctcggcattgcattcaagttgcgccaagagctcaatcttgcgagcttcgagccgatcaatattggatttgatcggaccttcagatagctgttcaagtttggttttttcttcatgcacaagctgtcgattagcttggattgtggcctcaatctctttgcgctcacggcgttcggctagtcttagcttggctttttctagcttgaactgatgttgctcaagataagcggctggaattaggacatcggccaaatcttcgggaatcagagcttgaacttcatgcagtcgtgtcctaattgacccacagtcaactaacaaactgtctaaagaagaggcttctagccgatgcgagatgtcttcaagtgtttttctcacatcatgagataggggagctagggctttgcttgaagtgtcttcttctgcctcatcaaggtaatctctgatgtcaaaagagaagagatcggctagaactgggatagcaggagcagctggttgttcttcctcctcgacgtgatgactccccacagccgatggagtctgatcacttgacgattgttgtacaggaggagaaggaagaggaggtggtggagccgatttaacaattgttgctgctggttttttcttcacagcagttttcttctttcttgtaaaatgaacaggggcagaaggagttggaggcgtttgcttgggtgaagccgatggtgttctttctgtgtcactcatttcggctacagcctggtcatcatcttcaccaatttcctcttcatctaaagctagttcaatagatggatccaaggcgtgcagatcatcagctggcttatcagtcggcatagttttcttgaatttgacctttttctttggagctaaggccaaggtactcacggccgatgatctggttttcctattttttgcctgcatcggctggttccctccattcagaattagacctggaacatattgaatgttcttgctattgttactttggtgaggaggggaggactctgttgtatggggtatgacgtcagggaatagatctgtcatataaattgaagctgattgatgaaatagatgcagcttccattcaccccaccatctttcaaagtttttgcttctaaatcctgccaactcaatattatcaatgctgcccagagggggtcctggtaggttaagtagccgatccatcattagagtagatgtgatttgtcctcggcactgaatcttgtcgacaaagaataagccgattgggagttggcccaatccaagttgtctggccgagctcattgggtgataaaactcgtaggagacttggatgtttctcccttggtgaatgccgacagggaggatgcatgggctgattgcagctataagaacttctctggattttttgaatttttcatgattaatgtcttcaaatctaaagtctgatggaagttcaaggtttgctgagtcttcataaggaaaccagattcgtgcatctttcttaaaaccttcgtagaagctgcagaaccagtccttgagtagcttagccgatagcttcgctccagcatcggttggtgtggatgcatattctccatatgacatgcatctgcgatgggtgcgctcttctccgtcgtcttccgcaatcggctctggcagtgggaattcagcttctgtcacagagggccgattgacaaccttcatgactatcaggtttaaccaagtttgcagcagccaccatggtccacctgctccaactattgagctgacggctattttagccgatgcattgttcaacatttggtacagatagccgagaaggattttgcccacaggaaattctttctttgattcaaaggcttcggccacaaatttccagttggttgtagggccacaactggatccacaaaagaggaacttttccagccacatgaccaagaaagctacatgctctcgaggggtaacagacccttggcccatatatgccgccacatagccagaccagccacctatgcttttggtcttgaagtcaaattgattcttggcgttcatactcatagggttagccgatgaagttacatctaatccagtaatcatggtgatgtctattagacttggagtcatcggctcttggttgaataagaaagcattgatggtgttggacaagaagtaggtggcggcaaccatcagaggttcatccttagcagaattggctatggtgagagcgagcgcttggccgattccaatctcatcccagtgaactttcttattgaaggtattcttccagtgacccaggttagggttggctagtctaaaggggatccggttggtttcactgatgatgaaatcagtggggacgagattgccgattgggccaagaaaatagtggtttttgtgtgaaaggctgggaatcgcgactaggttggaaaggtgctcagtgtactcggccgatggcgcagtagaagggctggtggaagacgacatcgccat

SEQ ID NO: 38425 - DNA, 2526 bp, Oryza sativa
  Clone ID: PAT_MRT4530_42061C.1
atgtcgtcttccactagcctgtctattgcgccatcgaccgagtacgctgagataagttctcaccggctagatccctttccctcgcatgaaatcgatttctccttttctcattatgttttctgcttcccgattcctttggatttgcagcacctttccaacctagttgcggttcccagcctatcgcacaaaaaccactattttcttggcccaatcggcaatcttgaccccactgatttcatcattggtgaaatcaacagaatcccctttagactagccaaccctaacttgagtcactggaagaatactttcaagtcttggccatctctcgaaaagcctacccctgataagagctggaccacctggtaccaacacatatcggctaatgtaacttcatcggccaaccctatgagtatgaacaccaagaaccaatttgacttcaagaccaaaagcataggagggtggtctggttatgtagtggcatacatgggcaaagggcctgtcactcctcgggagcacgtagctttcttgctaatgtggctagaaaagtttctcttctgtggatccagctatggtcccacaaccaattggcaatttgtagacgaagccttagaatcaaagaaacaatttcctttgggcaaaatccttctcggctatctataccaaatgttgaacaatgcatcggctaagatagccgtcggctcaatagttggagcaggtagaccatggtggctactgcagacctggctaaacctggtagtcatgaaagttgtcaatcggccatctgtaacagaagctgaattcccaaggttggagaaaattgtagaagacgatggagaagaacgcacctaccgcagatgcatgtcatatggagaatatgcatccacaccagccgatgctggggcaaaactatcggctgagctgctcaaagattggttctgcagcttttatgaaggcctccagaaagatgcccgagtttggtttctttatgaagactcagcagaccttgagctcccattacacttcagatttgaagacatcaatcatgaaagatatcaaacgtccagggaagtctttatagctgcaatcagtccatgcatcctacctgtcggtattcaccaaggaagaaatatccaagtctcctacgaattctatcaccctacgagttcagctagacaacttggatttggccaactcccaatcggcttattctttgctgacaagatccaatgccgaggagaaatttcttcaactctaatgatggatcgactgcttaacctccaaggacctcccttaggcagtatcgacaatattgagtttgcaggattcaggagcaggaactttgacagatggtggggtgaatggaagttgcatctatttcatcaatcggccacaatgtacatgacagatctattccctgacgtcataccccagagcaatagtggtaggaacattgaatatgccccaggtctgattcctaatggaggcggactgtctccccctatcatcggctatcacgcccccaaggtctcaaccctcctccaaggcgccatcaaggaaccaaccgatgtaaccaagaaaagaaaaactagatcatcggctgtgagcaccttgactctagctccaaagaaaaaggccaagtctaagaaaaccaagccaaccgatgacctacctgctttggatccatccattgaacaagctctggatgaagaaaatattgaggatgatgttgatcaggctgcagccaaacctcctcctcctccttcttctcctgtacaacaatcatcgagtgaccgaactccatcggccgtggagagtcatcatattgtggaagaagaacaaccggctgctccttctatcccagctctagccgatctcttttcttttgatatcaaagattatcttgatgaggcagaagaagatacttcaagcaaagctcaagctccattatctgacgatgcaaagaaaacacttgaagatatctcgcgtcggctagaagcctcttctctggatagcttagtggtcgactgtggatcaattaggacacgattgcacgaagttgaagctctaattcctaaagaactggccggtgtcctaactccagccgcttatcttgagcaacatcaatttaaactagaaaaagccaagctaagattagccgaatgccatgagcgtaaggagattgaagccacaatccaagtcaatcggcagcttgtgcatgaagaaaaagttaaactcgatcagctatctaaaggtccgatcaaatccaatatcgaccggcttgaagcccgcaagatcgatctcttggcacggcttgaagaatgcaatgctgaattggatatggagcacaaaaagctagccgatctcccaaaatctgtcgaagagcaaaaagcaaggctcaaatcggctatcaagaatgttgctgacctaaccaagtccctgaagatcattctcgggactaatgctcatgatgcccaagccattgaagaagtcgaacaaattaggcaaagagctatttcagctatctag

SEQ ID NO: 38426 - DNA, 1483 bp, Oryza sativa
  Clone ID: PAT_MRT4530_42062C.1
cgttgccgactcggacagagactcatgtctcccttttgtatatccatgtgagatttctgcaccattgctgcattctgttcgatctcgatcttccaagaaggaacttggagcgatggccaccggcgggaactcgctgccgtcgccgtcgtgcgccgacgacaagaagcggcgggtgtgctactactacgaccccggcatcgcccacatcaaattcagcgacgaccatgtcatggtgcccgcccgcgtcgccatggcgcacagcctcgtcggcgtctacggcatgctcggcgacatgcgccgcctccgcacgagacccgccacggaggcggagatccgccgcttccactcgccggagtacgtcgacctcctccgcgacctcaccccggagagctacttcaacgacgccgcgcttcggcagaaggcggaggatgaccacggcatcggcggcgacgacgattgccccgccttcgaccgcctctggaagtactgccgcggctaccccggcgggtcgttcgccgcggcgcgcgcgcttgtcgacggcgcctccgacatcgccatcaactggtccggcggcatgcaccacgcgtccgcctgcaaggccaccggcttctgctacgtcaacgacatcgtgctcgccatcaacgagctcctcggcaccttcaggcgagtcatctacgtcgacatcgacgcgcaccacggcgacggcgtgcagaacgccttcttggactccaaccgggtcatgacgctgtcgttccaccggtacggcaaaatcacgccccacaaggacttcttcccgggctccggcgccatcaacgaaatcggcgacggcgccggcgagcactacagcgtgaacgtgcccctggacgccggcgtccgcgacgacgtgtaccacacgctgttcaagccgatcgtgggcaaggccatggaggtgttccagccggaggccatcgtgctgcagtgcggcgccgactcgctctccggcgaccgcctcggcggcatggagctgtcggtgcggggccacgcggagtgcgtcagcttcctccgcgggttcaacctgccgctgctcctcgtcggcggcggcggctacaccatcaaccacgtcgcctccgcgtggtgctacgagacggcggtcgccgtcggcaaggagaggaagctccccgacgacatagagatacccagccacggctacgagctcatgtacaagaaccaggggaacaagctccattacaagacgtcgacagcgacggcggcgagaaaaaggtcgagcagcacggaggtcaccaaggggaaggtgctcgagcacctgtcgcaggtcaagcgcgcgccgagcgtgcagttccaggagcgacgcggcggcgacaatgccgccggagttgggctctactacgagcgccctccgagcctggaagacgacgaacccgcgcagaggctgcaccgcctctgcttccctggcctgacgaagcgtatcaggctcaatgactga

SEQ ID NO: 38427 - DNA, 381 bp, Oryza sativa
  Clone ID: PAT_MRT4530_42063C.1
ggaacttatatttattttttttttttttggggatcggaaccgacattaaattttgaaaattcaaaaattaagaacaacccaaattttttaaaagggaaaggaacttggaaaaccattttttattaagtggtggaaactccccttgcaccccctttttaattttaaaaggccttttcaactttataccgacatttttcttgtagtaaccgggtacctccattaaatttccaaaataaaaatttggtgccttaaaaaattttaccttgggggagaaaacattttggagagggaatatacttgaaagggactttttgaacttttttccaaagactttaggggagaattttgaaaccaatttttttaaaaaaaattttgaagccc

SEQ ID NO: 38428 - DNA, 328 bp, Oryza sativa
  Clone ID: PAT_MRT4530_42064C.1
cgcagataaatcaccaaacccaattgagatgaggacattctcaagagtgctccacttgagggaatgctttcacaagtcagaccatgggatacgccggggatgggcccgagttatgacatcaggttaaggattatagcgaacactacgtatgaggggtgctgtgattctatcccagcaatagtaggtcctcgagaccatagaccgtgggcacaatcggacatcggaagaaagcataggggctgcgaaaacagcacttcgtggggaatttagtgacttaaggacccattgtggggctccagcacggatccaaatgtgcccttattacccg

SEQ ID NO: 38429 - DNA, 589 bp, Oryza sativa
  Clone ID: PAT_MRT4530_42065C.1
ctctttttttttttttttttttttttttttttgataaagtaacacttgcatagttgcattaattcacattaaccagcgtttaaaacccgtaacaatgataatccaaccgaaaccaaccagagctaagcaacttacaaagctctcacacactcaaattattttccgacctaagtaaaataaaaaataaaaagaccgaaaattttgtcttagtctctttccagcattgaaccacactagtaaaagtactcgacacgcgacagcttcttcgacgacccggtccacggcacatcgacggtgacgatgccgtcctcgtacttgaactccgcatcctggccgttcaccttgcacagcctaggcctcgccgacgagtacgccaccatctccccggcgcccttcaccggccacctccgccgccacgtcgccgtccttcctcgccgcctcgaagccctgcacggcgccgccggcgttcagcatgttggcgagcccgatgggcgcgaagccgatccccagctccggcgagacgatggccgcacgggcgccaccacgaggagctcgtagggtgaacgggtcgagcgtgagctcgaaggac

SEQ ID NO: 38430 - DNA, 875 bp, Oryza sativa
  Clone ID: PAT_MRT4530_42066C.1
gcaataaactaacagcacacctttattcataatcgcatccaaaagattggatagagaacatcatgagatgtagcgatagcatatatataacatgaaattgaaatcatgaacaaaaaacaaatacagaaggctacatagtaatcagaataacagccttcaaaataaagtggtaggaacattgataacggccaattctgaaaagaagtggactgagggaatttgatttgtgtaatgattacaccgtaatcccgtcttgtgtagtccccaccttccaagactcacaacaagttgctacaggattcccgcatgaatccattgggctgtagtatgcatggagtgtaagttcatacacatttgataaactagacatctggacagctttaaatttggcaatgcctcgtgccaaagcaagttctccagttcctcctgtaatgctccactcaccattagcagattgcggaagaaccccggtaatctgaagcgttgaaccattgaacctcccattctcgaaaaccaagttaaatgatgtgtaaaagctaaacttggacaaactattattgatagtaaatccttgaccacgaccaacagtattactacggctggcatccaatccatcagttatgacccaatcattcgcagcagtcccaccaaaaccgttagggctatctggtgggattacaactgcatattggtttttggttggtcctccccatgcttggtgcaagaacagatgcatgcagagctcattttggataaggggaaggacacacattagtggagcgattgcatagtaggccatttatagggctaagggggaaggggtcttcaagcagtgaagatcttgcttgctagctagctgctgccggacgcgtggg

SEQ ID NO: 38431 - DNA, 341 bp, Oryza sativa
  Clone ID: PAT_MRT4530_42067C.1
ggccatggatgactatagatacctggataacatcaccttttaccagggccataaatcctataacattcatcatatacttgggcgattcaacgcacaaatatgtatcacctgaataatcttagcagaacggctgcatgcgggactattagacttgaacatggatactacactactttgccgttagtacccgtggagggcacctgtaggctgcaatgaaccgacaccattctgacaaggcccctatccatgaaatgcttcatagccctcctagccagggacccatttatcctgaggcgctcttgtaggacccacgcgctgatctaggtgaacttggccacctc

SEQ ID NO: 38432 - DNA, 436 bp, Oryza sativa
  unsure (1)..(436): unsure at all n locations
  Clone ID: PAT_MRT4530_42068C.1
acttggtgacagggccccacacagttccccactgcatnatccacagtgcgcgtgctataatccttcagaggaggnttcagcccatttacatataacctccacagtattacccncatacttattgaaatgccccacaacatactaagttagcgtgacccctgccatactttttacatttccagtagtacttattttctctttctacccccattaatcttagatattcctagacatcttgcgattacaaatattatatccagatacttattttgtttctccttcatgtcccgattgtttagtgtaaattcttactgcatcggcagaacagatataatttctcaccacatgtgaagtggtaaaaagtgtatgtatcagtatattttgatataaaatttgttgaaaatgcacaggacgtcaaaaaaaaaaaaaaaaaaaa

SEQ ID NO: 38433 - DNA, 426 bp, Oryza sativa
  Clone ID: PAT_MRT4530_42069C.1
atggtgcgagaggtggatgaggaggagcgaggtggcggtggtctgggcggcgtggacgcggcgttggcgttcggcttggacgcacgactgtgggcggtggagagcgagcacgcgagggtggtgaacccggagcagcggtggcgggcacgttcaaccggctggctggggaagaaaggatgggaaacagacttcaaggggagagggggtgggccggaccgagtgagggaaggggctggcccagggaggaaaatgacagaggagagggagttgggctatgggaaaggaaaggtggtccaaaggaatagggatctttctcaatttttctggggaatttcagagatggacttttggagagtatttgatggaattgtaaatggactttgggactataattttgtggagactttgtatgtggaattggagtga

SEQ ID NO: 38434 - DNA, 204 bp, Oryza sativa
  Clone ID: PAT_MRT4530_4206C.1
atggggactgtgattttcgaggaggaaaagacggtgccactgtggcggagcacaagtgccggcgggatcgtcgggaatcacgcggtggctggccaaagttcttgccccgttcatgtcgtggttgctggccagcgagcaaagttgaaggagtcagatggaagggaagaagatgtggatggaggggcccggtttaaaatctcagag

SEQ ID NO: 38435 - DNA, 273 bp, Oryza sativa
  Clone ID: PAT_MRT4530_42070C.1
atgggggcgccggccgcgcggcgaagaggagggaggtgcggagaggaggacggcgcggcgatgggggcgccggcggtggaggagcggcgaagaggagggaagcacggcgatggggtgccggcagtggaggcgcggcagaggaagaggtgtgggaggcgcggcggaggaagaggttggaggcgtcggaggatggaagccaagcgcgagcgattcggggaagggaagcgaatcgcgggggacgaaagcgcggatcgcatgcaaagcgatatctga

SEQ ID NO: 38436 - DNA, 911 bp, Oryza sativa
  Clone ID: PAT_MRT4530_42071C.1
tgcactctttgagccatccccctgttaagaatttgaatatatgcattctgtttggtttatacattagaattttttttacgaatgtttgccttcataacttcgtatcatgcattctaaccaattccaatgggaatacagtatcctttttgattcattaattccaagtgtcaacaaaagtcagtatttgaagtcaagaaagatgtgtgcagtactgcagttcctaattccaagcagttcaatgtcaaaattggtgctattccatactatactggcaacaaagtatttgtttttagaccttcaaaccaaaaaattgaactctaaaattcaagtgcaatttataatacatggcaagttgtataaaccagttgcagtatatatcactttcttgaattcactagatcaaaagtctaagaactctgaatacatgcatgtacggaaaaacaatgtaaccgtctaatgaactaattagctactccctccgcctcacaataaatcaacttctggctacaaatctggacataacctatatccaggttcgtagctagaagttgatttattttgggacggagggagtaagtagcaagcaagtcaatatttgattagctttgtggttgactgttatgcagcctcaagcttcatccactaagtcagttatggccaaggttgaacacagatgaaatgtttggattggccaacacaatgaccaaaaactaacacgttgatgcaggcccaaatgattttgtaaagaatacagaaatgtaacattaaaaataccatatccatattgtcagatgttgtccacgaaaatgatgataaaggatgactctcatacaagggtcttctgttgactcccttttcaatatctgattcatagagatggagataagtaccgaaaggaaaataactaaagg

SEQ ID NO: 38437 - DNA, 1440 bp, Oryza sativa
  Clone ID: PAT_MRT4530_42072C.1
atggcgcacaagatccccctggaggtggcgcacacgctcgtggagatcgcggaggtggctcgctacgccatcgagcaccgccgcggccacggcccggcccacgacggcgtctcccccccggcggtggacggggaggaggccgagcggctgcgggcggagaacgttatcctccgcgctcgcctcgccgacgacctctccatcctccgcgagctccaaggcgagccctgtgtttcccaggagtgccctgccgatctgcataatcgtcttgtagcagcagttaacaatgctagcttcttggctcagcttgagaaaattcgagatgagtcaaggcatcaacaaacagagctatctcctgataacatgacagatattccatacactgaaggtggcgggaagaatggatcttgggtcttggttgcctgtgataaacccggggcaaatatggaggaaatcagtggaattgataatgaaaattatgtacttgttaatgatgatgacattattgatggtatgacctcctttattgctaggtgcattcttgaagatccaaagtccaagtcaatatcaccagtggagctgcaaaaggctgttgcaatggcattgagcacccttaatgataagtggaaatggatgagtatttgggaggctggaaaagtgctttacatattggcaacatggggaatcacaatagtggggttgtataggagtcgccacgtgctgaaaattgcagccaagggagctgtcatgggctggttaaattcagcgtcagacgacgcctggaacgagcccaatccaaggcccacaactccacaactccacaagcttcctgtccagtctccactcgcaaacccttctcgccgccattccttcccttccccaaagccaccgcaatctttctcctcctcgtcggcggcggctgcgaattccgacttcatattctccgagactccgatggccaccaaatcacagaagaagaagaggccttccgggcctaatccttctatcaaatccaaggcctcgtcctccgaccaaaaacctaagccttcgaaacccacggaggaggagagggaggagaaagcggcggcggcggtggcggcggagaagccgaagaagaagaaggcgaccaacgagatcgacaagatcttccaggccaccaagtcatccggcaagaagcgcaagcagcagcagcagcagggggaggaggaatctgtgcgagccaagaagcccaaggagaggtccgagggggccaagaagagcaataaggctaagaagggtagcaagggcagggacacggacgacgacgacgaagtcgaggagaagcggccgcggcggcgcacggcggacgggctggcgatatactccgccgacgagctcgggttcggcaagtccgacgccggcggcaccccgctctgccccttcgactgcgactgctgcttctga

SEQ ID NO: 38438 - DNA, 1164 bp, Oryza sativa
  Clone ID: PAT_MRT4530_42073C.1
atgccgccgctcgctgccacgccgctggccaccgccgcgccgcccgccgcgcaggccgccgctcgctgccgcgccgcacgccgcctcctcgcctccacgccgctgcgcctccgtgccgccgcgcagcccgccgcctccgcgcctccgcgccgccgcgccgacccgctctcgctctcgctcgatctggatagagataaggcagcgctctcgctcgatctatccaaaaagaatgagataaggcaggaaagaggaagagacgcacctcgctcctacaccctctccgctgctcgcaccgcacaccaccacccatcacgaccagtcgaccacctccccccgccgatgccataccgctcagccggccgtgagggctctagctccaccgcctctcggccaccgccgctccccgccgccgccgccgacgacgcgcgagcaaagagctatgcaatcatggttctgatgcttccatctgatagcgcaagaaaatggcatgtgcatgagttggagcttgttgaggtcgtggctgatcaggttgcagttgcactttctcatgcagctattcttgaagagtccatgcgtgcgcgtgatctgctaatggagcaaaatgttgctctggatttagctcgacgtgaggctgaaatggctatccgtgctcgtaatgatttcctggctgttatgaatcatgaaatgagaacaccaatgaatgcaataatagccctttcgtccttacttttggaaaccgaacttactcctgagcagcgcttgatggtggaaacagtcttgaaaagcagcaatcttttagcaacactcatcaatgatgtgttagatctttccaaacttgaggatggtagccttgaattggagattaaagcattcaatcttcatgctgttttcaaggaggtaatgagtttcatcaagccaatcgcagccatcaagagactgtctgtgtcagttatgttggcaccagacttgccattatgtgccatcggtgatgaaaagaggctaatgcaaactattttgaatatctctggcaatgctgttaagtttacaaaggagggccacatcacacttgtagcttctgttgtgaaggctgactctttaagagaattcagaaccccagattttcacccaactgcaagcgatgacaatttttatttgaaagttcag

SEQ ID NO: 38439 - DNA, 225 bp, Oryza sativa
  Clone ID: PAT_MRT4530_42074C.1
ggcacgagggcattcaaatgcttaggatattcaaggagcatgccagtaggcctccatcttggatgccttggcttcctaggggacccgtcagaggttgatccaggaaaaggggggaaacaccaggagttcccaaagccaggtctgggcccattgggcctcccagtttctttacactggagagaagcagcagttttcttctcactgagaagcatttcctcccattgg

SEQ ID NO: 38440 - DNA, 2504 bp, Oryza sativa
  Clone ID: PAT_MRT4530_42075C.1
atggatgccatcaagaagcggttcaagtcttcagctttctcatactctccgccaccagattactagctttcagcaaagagctatgcaatcatggttctgatgcttccatctgatagcgcaagaaaatggcatgtgcatgagttggagcttgttgaggtcgtggctgatcaggttgcagttgcactttctcatgcagctattcttgaagagtccatgcgtgcgcgtgatctgctaatggagcaaaatgttgctctggatttagctcgacgtgaggctgaaatggctatccgtgctcatctttccaaacttgaggatggtagccttgaattggagattaaagcattcaatcttcatgctgttttcaaggaggtaatgagtttcatcaagccaatcgcagccatcaagagactgtctgtgtcagttatgttggcaccagacttgccattatgtgccatcggtgatgaaaagaggctaatgcaaactattttgaatatctctggcaatgctgttaagtttacaaaggagggccacatcacacttgtagcttctgttgtgaaggctgactctttaagagaattcagaaccccagattttcacccaactgcaagcgatgacaatttttatttgaaagttcagattaaagatacgggctgtggcattagccctcaggatctacctcaagtatttacaaagtttgctcaatctcagcctggaggaaacagaggatacagtggtagtggtcttggccttgccatttgcaagagtggggatgctgattttgttggtccggtgccaaatgctcctaatgaagagaaagacacagcttggcgccacgtgaacgtgaccgcaatcctttcgtgctccgctcaggttgcgtgtttggccctagggtttacttcgccgtcctcctctcgtccctctcctcccgcggtcccgtcgtcggcgaggccaggggatcgagcggccggcggccgatcgaggcggcggcggcgatggcgcacaagatccccctggaggtggcgcacacgctcgtggagatcgcggaggtggctcgctacgccatcgagcaccgccgcggccacggcccggcccacgacggcgtctcccccccggcggtggacggggaggaggccgagcggctgcgggcggagaacgttatcctccgcgctcgcctcgccgacgacctctccatcctccgcgagctccaaggcgagccctgtgtttcccaggagtgccctgccgatctgcataatcgtcttgtagcagcagttaacaatgctagcttcttggctcagcttgagaaaattcgagatgagtcaaggcatcaacaaacagagctatctcctgataacatgacagaactggatattgcagatattccatacactgaaggtggcgggaagaatggatcttgggtcttggttgcctgtgataaacccggggcaaatatggaggaaatcagtggaattgataatgaaaattatgtacttgttaatgatgatgacattattgatggtatgacctcctttattgctaggtgcattcttgaagatccaaagtccaagtcaatatcaccagtggagctgcaaaaggctgttgcaatggcattgagcacccttaatgataagtggaaatggatgagtatttgggaggctggaaaagtgctttacatattggcaacatggggaatcacaatagtggggttgtataggagtcgccacgtgctgaaaattgcagccaagggagctgtcgtgtctgccaaattcgtcatgaaggcactgaatcatttgaaagaaacaagggaatcatcggaattcgaacaaaaagcgtcagacgacgcctggaacgagcccaatccaaggcccacaactccacaactccacaagcttcctgtccagtctccactcgcaaacccttctcgccgccattccttcccttccccaaagccaccgcaatctttctcctcctcgtcggcggcggctgcgaattccgacttcatattctccgagactccgatggccaccaaatcacagaagaagaagaggccttccgggcctaatccttctatcaaatccaaggcctcgtcctccgaccaaaaacctaagccttcgaaacccacggaggaggagagggaggagaaagcggcggcggcggtggcggcggagaagccgaagaagaagaaggcgaccaacgagatcgacaagatcttccaggccaccaagtcatccggcaagaagcgcaagcagcagcagcagcagggggaggaggaatctgtgcgagccaagaagcccaaggagaggtccgagggggccaagaagagcaataaggctaagaagggtagcaagggcagggacacggacgacgacgacgaagtcgaggagaagcggccgcggcggcgcacggcggacgggctggcgatatactccgccgacgagctcgggttcggcaagtccgacgccggcggcaccccgctctgccccttcgactgcgactgctgcttctga

SEQ ID NO: 38441 - DNA, 361 bp, Oryza sativa
  Clone ID: PAT_MRT4530_42076C.1
attggaagaggagactagagtccatatagaaatacaatttagaaataactgaaattcggaataaaaaaaaaagaattttagaagaagagtatagagtccatatagaaatccaattaagaaataatagaaattcggaattgaaaaaaataaggaatattgaaagatgagtttagagtccatataggaatttaaaactaactaaaattcggaataaacataataaaactaaaagtagagtttagaatccgtataaaaatacaatttagaagtaactgaaattcgaaataaaaaattaaagaatattgaaagatgagtttagagaccacatagaaatacaaaaaaaaaaaaaaaaaaaaaaaaa

SEQ ID NO: 38442 - DNA, 181 bp, Oryza sativa
  unsure (1)..(181): unsure at all n locations
  Clone ID: PAT_MRT4530_42078C.1
atgaaatntaatgtgatagcaacgctttgctgttcagagatgtgattctaaatagaaactacagtgttttttttttgttgtcttcagcatttacctgtgacttgtcagatgccccattgtaccgtccaaaaatttcctctattgacggttaccccttggtcgcaaaaaaaaaaaaaaaaaa

SEQ ID NO: 38443 - DNA, 535 bp, Oryza sativa
  Clone ID: PAT_MRT4530_42079C.1
attatgtacttgttaatgatgatgacattattgatggtatgacctcctttattgctaggtgcattcttgaagatccaaagtccaagtcaatatcaccagtggagctgcaaaaggctgttgcaatggcattgagcacccttaatgataagtggaaatggatgagtatttgggaggctggaaaagtgctttacatattggcaacatggggaatcacaatagtggggttgtataggagtcgccacgtgctgaaaattgcagccaagggagctgtcgtgtctgccaaattcgtcatgaaggcactgtgaagtgtgaaagcagtgaaattatgcatgcgcgatgatcagcaatttgtacatacaaaaactatccttgtcaattgtacatatgtgaaattgtgaattatggtttgttctgaactgtttgttcagaagcgtcataactcataaattatgaaatgtgaaatggtggaagaattcgtttattgagtctgtataatgatacatctgcttgacaagttgacatattctctctttcc

SEQ ID NO: 38444 - DNA, 1470 bp, Oryza sativa
  Clone ID: PAT_MRT4530_4207C.1
tcactggctctcttcttcttcgtcgtcctcctcgtcgctgctctgttcgccgtcgctggcagcggccgctgcagcgacggcgatgttattctcatggtactgatagtgcgggcgcgacggcggtggctgcgggtggtggcggtgcctgccgccgtcgctgacgcgataccggcggtggtaatttccactggcgctagcgtcgttaaccgacgccattcttctagaggtgccaccggcgccgccggtggcaccaggcggcgcggcggcgttggcgggagaggaggagtggtccttcacctgcgagagttccatctgcgtgttgaggaagaactgcacgcgctgcgactccagctcgctggcgaagtcgaggcggcggcgctccatctccgcggattgctccagcttcgccgtctccacgcgctcgtacgcctcgccgaagcgccgtatcgcctgcgcgagctcccgtagcccctgcgcgcggtcgccgcctccgccggcgccgccgccgcgcccctcgtccgctctgctcctcttgccgttcggcggcggcggcagcgggagaggcgggaacgccggctggcgctccggggggaacccgtcggacgactcggacgacgccgacggctccggggacggcgccctccgcttgaccgcagacaccggcgcgggcatcagcggcgtgcggctacgctgggggaagcccacgcgcagcgccgccggcaccgggttgcgcccgttcacgctggccccgacgccgccgccgccgttgccgccgggcttctggttgaacgtgggggcgaggaggtcatcgaggcggccgaagaactgccacgacgaggccggcttggccctctcgatcttgtacttcttcttgagcgtgtcgatccggttcttgcactggacgtcggacttgggcgccttggcgtacccctcccgcgacgacaccgcgtcggcgacctcctgccactgcgggtggcggaggctcccccgcccgagcgccacgaacctctccccccacgcgtcgatcagcgccgccgtcgccccctcgctccacgcatcctccctcccgccacccccacccccaggattcggcgacgccgcgtgctgctgcttctggatcgggagggccagcgcgaggaggccggagggaggccccgcggcgacggtgacggggtcggcgacggggagcgcggaggcgacgggggacggcgagggggaaggcgaggcggaggcggcggcgtcgtcgtcgtccatctcggcggcggcggcggcggcggcgggattgggggatctatccgatctggtttaggggcggcggtgagggggtggtgggattgaggcgagggggatccggtcgtgacccggcggggcgagggggttgacttgggccaggccggtgggatggatgggccggcgccgaggaggtggtgggttaggtcaggtcggggtggggatcgggatcgggaacga

SEQ ID NO: 38445 - DNA, 928 bp, Oryza sativa
  Clone ID: PAT_MRT4530_42080C.1
gagcatctcggtgaacgggcagtcgtgcgtgccgccggggttccggttccacccgacggaggaggagctgctcaactactacctccgcaagaaggtcgcctccgagcagatcgacctcgacgtcatccgcgacgtcgacctcaacaagctcgagccatgggacatccaagagaggtgtaagattgggtcagggccgcagaacgactggtacttcttcagccacaaggacaagaagtacccgacggggacgaggacgaacagggcgacggcggccgggttctggaaggccaccggccgcgacaaggccatctacaacgccgtccaccgcattggcatgcgcaagacgctcgtcttctacaagggccgcgccccccacggccagaagtccgactggatcatgcacgagtaccgcctcgacgaccccgccaccgacaccgccgccgccacacccacggttacttctgctgctgctgcggcggcggcgatggcggcggcggcggacggcgggcaggaggatggctgggtggtgtgcagggtgttcaagaagaagcaccaccacaaggaggccggcggcggcggcggcaagcacggcggcgacggcagcgccggcgccaaggcggcgcacgcttactcctccagcgacgacgcgctcgaccagatcctgcagtacatgggcaggtcgtgcaagcaggagcacgagctcccctcgccgcaggccagcggcggcgccggggccggcgcagggagcaggccggcgtcaaggtacctcccgccaatgtaccccagcctgcgggcgtctggttttggaaatcggtccctctttcgccgcccgcgtgggggctccgcggcgattggctactcgtcagttctgcctgataataatattgtttacatcctgtacgtcgtctcaggctcatcagcagattaa

SEQ ID NO: 38446 - DNA, 1840 bp, Oryza sativa
  Clone ID: PAT_MRT4530_42081C.1
gcgaagccaaaggaggcggcgccgaggtgggaggcggtccggggcgacgatggcggcgtacaagagctcggcggcgacggcggagagagaaagcgattgagcatcacttccagaaatgatcttttgggacttggttaggtcagcgacattcttgatagccgatttaagccttgctttttgctcttcgacagattttgggagatcggctagctttttgtgctccatatccaattcagcattgcattcttcaagctgtgccaagagatcgttcttgcgggcttcaagccaatcgatattggatttgattggaccttcggatagctgatcgagtttgactttgtcttcatgcacaagctgccgattgacttggattgtggcttcaatctctttgcgctcacggcgttcggctaatcttagcttggctttttctagtttaaattgatgctgctcaagataagcggctgcagttaggacatcggccagttcttcaggaattagagcttgtacttcgtgcaatcgtgtcctaatcgatccacagtcgaccactaagctatccagagaagaggcctctagctgacacgagatatcttcaagtgttttctttgcatcgtcagataagggagctagagctttgcttgaagtatcttcttctgcctcatcaagataatctttgatatcaaaagagaagagatcggctagaactgggatagcaggagcagccgattgttcttcttccacaatatgatgactccccacggccgatggagctcggtcactcgatgattgttgtacaggagaaaaagaaggagcaggctgtctgaagaagtgagtgggggcagaaggagttgaaggtatctgcttaggcgaagccgatggtgttttttcagtatcacttacttcggctgcagcctgatcaacatcatcctcaatatctttttcatccacagcttgttcaatggatggatccaaagcaggcatgtcgtcggttggcttggttttcttagacttggcctttttctttggagctagagtcaaggtgctcacaaccgatgatctagttttccttttcttggttacatcggttggttctctgatggcgccttggaggagggttgagaccttgggggcatgatagccgatgacagggggagacaattcgcctccattaggaatcagacctggggcatattcattgttcctaccaatattgctctgatgtggacgggaggactctgttgtctggggtatgatgtcagggaatagatctgtcatgtacattgtggccaattaataaaatagatgcaatttccattcaccccaccatctgtcaaagttcctgctcctgaatcttgctaactcaatattatagggtaatagaattcgtaggagacttggatatttcctccttggtgaataccgacaggtaggatgcatgggctgattgcagctgtaaagacttccctggacgtttgatatctttcatgattgatgtcttcaaatctgaagtctaataggagctcaaggtctgctgagtcttcataaagaaaccaaacctgggcatctttctggaagccttcaaaaaagctgcagaaccaatctttgagcagctcagccgatagttttgcaccagcatcggttggtgtggatgcatattctccatatgacatggatctgcgatgggtgcgttcttctccattgtcttctacaattgggtccaaccttgggaattcagcttctgttacagatggccgattgacaactttcatgactaccaagtttcgccaactggcgtaatagcgaagaggcccgcaccgatcgcccttcccaacagttgcgcagc

SEQ ID NO: 38447 - DNA, 111 bp, Oryza sativa
  Clone ID: PAT_MRT4530_42082C.1
atgagaaccgattccctcggtctcgagggaacgaatggcgaattcccatcgccgtcgccgcacggtgatcttcataaccggtgccttacaacaccgtaccgacgcatctaa

SEQ ID NO: 38448 - DNA, 2661 bp, Oryza sativa
  Clone ID: PAT_MRT4530_42083C.1
gcggtgatgtcgtcttccactatcccgtctactgcgccatcggccgagtatgctgagcacctttccaacctagttgcgattcccagcctatcgcacaaaaaccattattttcttggcccaatcgacaatcttgactccactgatttcatcattggtgaaaccaacagaatcccctttagactagccaaccctaacttgggtcactggaagaataccttcaataagaaaacccactgggatgagattgggatcggccaagcgcttgctctcaccatagccaattctgctaaggatgaacctctgatggctgccgccacctatttctggtccaacaccatcaatgccttcttatttaatcaagggccgatgactccaactttgattgacatcatcatgattactggattagatgtaacttcatcggctaaccctataagtatgaacaccaagaaccaatttgacttcaagaccaaaagcataggagggtggtctggttatgtagcgacatacatgggcaaagggcctgtcactcctcgggagcacgtagctttcttgctaatgtggctagaaaagtttctcttctgtggatccagctgtggtcccacaaccaattggcaatttgtagccgaagccttaggttcaaagaaacaatttcccttgggcaaaatccttctcggctatctataccaaatgttgaacaatgcatcggctaagatagccgtcggctcaatagttggagcaggtggaccatggtggctactgcagacctggctaaacctggtagtcatgaaagttgtcaatcggccatctgtaacagaagctgaattcccaaggttggagccaattgtagaagacgatggagaagaacgcacccatcgcagatgcatgtcatatggagaatatgcatcgacaccagccgatgctggtgcaaaactatcggctgagctgctcaaagattggttctgcagcttttatgaaggcttccagaaacatgcccgggtttagtttctttatgaagacttagcagaccttgagctcccattagacttcagatttgaaaacatcaatcgtgaatgatatcaaacgtccagggaagtctttacagctgcaatcagcccatgcatcctacctgtcggtattcaccaaggaagaaatatccaagtctcctacgaattctatcaccctataagttcagctagacaacttggattaggccaactcccaatcggctttttctttgctgacaagatccaatgccgaggagaaatttcttcaactctaatgatggatcgactgcttaacctccaaggacctcccttaggcagtatcgacaatattgagttagcaggattcaggagcaggaactttgacagatggtggggaatggaaattgcatctatttcatcaatcggccacaatgtacatgacagatctattccctgacgtcataccccggacaacagtgtcctcccctccacatcagagcaatagtggtaggaacattgaatatgccccaggtctgattcctaatggagggaaccaaccgatgtaaccaagaaaagaaaaactagatcatcggctgtgaacaccttgactctagctccaaagaaaaaggccaagtctaagaaaaccaagccaaccgacgacctgcctgctttggatccatccattgaacaagctctggatgaagaagatattgaggatgatgttgatcaggctgcagccgaagtaagtgatactaaaaaaacaccatcggcttcgcctaagcagataccttcaactccttctgcccccactcacttcttcagaaagaagaaaactgctataaagaagaaatcagcagcaccaattctcaaaccagcttcaccacctcctcctccttgttctcctgtacaacaatcaccgagtgaccgaactccatcggccgtggggagtcatcatattgtggaagaagaacaaccggctgctcctgctatcccagttctaaccgatctcttttcttttgatatcaaagattatcttgatgaggcagaagaagatacttcaagcaaagctctagttcccttatctaacgatgcaaagaaaacacttgaagatatctcgcgtcggctagaggcctcttctctggatagcttagtggtcgactgtggatcgattaggacacgattgcacgaagttcaagctctaattcctgaagaactagccgatgtcttaactccagccgcttatcttgagcaacatcaatttaaactagcaaaagccaagctaagattagccgaacaccgtgagcgcaaggagattgaagccacaatccaagtcaatcggcagcttgtgcatgaagaaaaagtcaaactcgatcagctatccgaaggtctgatcaaatccaatatcgatcggcttgaagcccgcaagattgatctctttgcacagcttgaagaatgcaatgctgaattggatatggagcacaaaaagctagccgatctcccaaaatctgtcgaagagcaaaaagcaaggctcaaatcggctatcaagaatgttgctgacctaaccaagtccctgaagatcatttctggaactgatgctcaagatgcccaagccattgaagaagtggaacaaattaggaaaagagctatttcggctatccagcagtacttgtctcaa

SEQ ID NO: 38449 - DNA, 1281 bp, Oryza sativa
  Clone ID: PAT_MRT4530_42084C.1
acgcgtccggcttttcaaaacacctgttgatttgaagagtggggactggatgcttaaggttgaccatggattggtgggtcgtattatctcgatgacacatctcccttctgattcccagtggcttcatagcaggattgaaatcaatggttatgaagaatacagtgggactgaatataggtccgctggatgcactgaagaatacaatgtcatgaggtaagtatggtagactgacttttgtcatgtttggtatgatgatcaatagttttttgcttagctccaatgttggccattattaactaccacgagaaaagttgctgatatagttagcttgagctggtccattgcctatatattctcgttcaggaggtatctcgtccgcccacgcgtccgggaatctgtttgtttggaaggagatattggtggtggcctagttctccagcgtcacatatccatcttgaaagataacccgaagattttccagattgactcaagcattcaagcaagaaatgttggagctggttctggtgggttttcaaggttggtatgtttgcgagttcatccaactttcacacttctacacccaacagaagtggttgtggcttttacggctatcaatggttcaaagcaagagatctccccagaatctggagtagtattagagggagacatgaggcccgacggggagtggatgctagtggacaactgcgtaggactgagtttggtaaatcgttttgatcccagtcaggttagcaaatgtttggtgcactggggaaccggtgatgtgaacatggagctttggtcggaggaaataccagtttccaaggagactccgttgagaatatgccaccagtacgaggtgagacaaacaaactagactgaatcccgcctggatcagcaaataaatgtgctacctcggagcgggtcatctaaatcaaaatttggaggtgttcgccacgtccttcgctctaaagagtgtggtgctgctaaaacttgtgggcattgctattgaggttgcattggtaggaactcgctctcgttgcttggttgcatgctatgcgataataatgaactagtaactgctatagttcgagctagtcttggcaaaaaggaataaagacgaatgttgcacttccctgtgattgtacactgccaattcctgaaaagggcgtcttgactgaccggcgaacagccacaccgagtaatagaaacaatgtaataaacgcatcgagtaattgaaggctgaagctctctatgtggttgtcaaaaaaaaaaaaaaaaaaa

SEQ ID NO: 38450 - DNA, 178 bp, Oryza sativa
  Clone ID: PAT_MRT4530_42085C.1
gcacaattaatatctttgctaaaaaccgcggggtcaacttcggcaacatgagtttccacattggggcgttacaaccaatgcaatctttgaacttcagatgtttgccaagtggaatggtatgtacaggtacaaaaatgagttccttgccaatgtcaccatcgctagctaataatggtgc

SEQ ID NO: 38451 - DNA, 1935 bp, Oryza sativa
  Clone ID: PAT_MRT4530_42086C.1
atgtcgtcttccaccagcccttctactgcgccatcggctgagtacgctgagtccaacaccattaatgctttcttattcaaccaagggccgatgactccaactttaattgacatcaccatgattactggattagatgtaacttcatcggctaaccctatgagcatgaacaccaagaaccaattcaacttcaagaccaaaagcataggtggctggtctggctatgtggcggcatatatgggccaagggtctgttacccctcgagagcatgtagctttcttgcttatttggctggaaaaattcctcttctgtggatccagttgttgctctacaaccaactggcaattcgtagccgaagccttagaatcaaagaaagaatttcctttgggcaaaatccttctcggctatctgtaccagatgttgaacaatgcatcggctaaaatagccgtcggctcaatagttggagcaggtggaccatggtggctgctgcaaacttggttaaacctggtagtcatgaaggttgtcaatcggccctctgtgacagaagctgaattcccattgccagagccgattgtggaagatgatggagaagagcgcacccatcgcagatgcatgtcatatggagaatatgcatccacaccaaccgatgctggagcgaagctatcggctgagttactcaaggactggttctgcagcttctacgaaggttttaagaaagatgcacgaatctggtttccctacgaagactcagcagaccttgaacttccattagactttagatttgaagatattaaccataaaaaattccaaaaatccagagaaattcttatagctgcaatcagcccatgcatcctccctgtcggtattcaccaaggaagaaacatccaaacaacagagtcctcccctcctcatcaaagtaacagtgtcaagaacattgaatatgcttcagatctaattccgaatggaggtggactatctccccctttcatcggctaccatgcccccaagacttcaactctccttcacggcctaactagggaaccagccgacgcaggcaagaaaaggaaaaccagatcatcagccatgagtaccttatccttggctccaaagaaaaagaccaaattcaagaaaactcaaccacaaccaactgatatgtcgactgatgatctgcccgccttggatccatctattgaacaagctttagatgaagaggaaattgatgaagatgttgaccaagctgtagccgaaatgagtgacatagaaagaacaccatcggcttcacccaagcaaacgcctccaactccttctgcccccgttcattttacaagacaatcttcaagtgatcaaactccatcagctgtggggagtcatcacgtcgaagaggaagaacaaccagctgctcctgctattccagcactagctgatctcttctcttttgacatcagagattaccttgacgaagcagaagaagacacttcaagcaaagccctagctcccctattcgatgatgtgagaaaaacacttgaagacatttctcatcggctagaagcctcttctttagacaatttggtagttgactgtgggtcaattaggacaaggctacatgaagttcaagctctgattcccgaagatctggccgatgtcctaactccagccgcttatctcgagcaacatcagttcaagctggaaaaagccaagctaagactagccgaacgccgtgatcgcaaagagattgaggccacaatccaagctaatcggcagcttgtgcatgaagaaaaaaccaaacttgatcagctatctgaaggtccgatcaaatccaatattgactggctcgaagctcacaaaattgagctcttggtgcaacttgaagaatgcaatgccgagctagatatagaacacaaaaagctagccgatctcccaaaatcaattgaagaataa

SEQ ID NO: 38452 - DNA, 262 bp, Oryza sativa
  Clone ID: PAT_MRT4530_42087C.1
attgtcaatcttctaaaatgaacaatcgggaaaaccacaaagacctacacaccaactggcagcaacaacagtggaaccacaagctatcaaaggtacaaagggcaagaacgggaggaagcaccaccccttgggggggatgtgctggtccccaaaagaacagaaggaaaacaggaaaagggagagaaagcaagccacgtagcgacagaaggaaaaaaccaaactaaacaagggagcaggaaaaaacataagcaagaaaaaggcc

SEQ ID NO: 38453 - DNA, 1845 bp, Oryza sativa
  Clone ID: PAT_MRT4530_42088C.1
ctagctcggtattgcattcttcaagttgcgccaagagctcaattttgcgagctttgagccgatctcaattttgcgagctttgagccgatcaatattggatttgatcggaccttcagatagctgatcaagtttggttttttcttcatgcacaagctgccgattagcttggattgtggcctcaatctctttgcgatcacggcgttcggctagtcttagcttggctttttccagcttggactgatattgctcgagataagcggctggagttagaacatcggccagatcttcgggaatcagagcttgaacttcatgcagtcgtgtcctaattgacccacagtcaactaccaaactgtcaaaagaagaggcttctagccgatgagagatgtcttcaagtgtttttctcacatcatcggataggggagctagggctttgcttgaagtgtcttcttctgcctcatcaaggtaatctctaatgtcaaaagagaagagatcggctagagctgggatagcaggagcagttggttgttcttcctcttcgacatgatgactccccacagcggatggagtctgatcacttgacgattgctgtacaggtggagaaggagggggaggtggtggagccgatttaacaattgttgctgctgtttttttcttcatagcagttttcttctttcttgtaaaatgaacggggacagaaggagttggaggcgtttgcttgggtgaagccgatggtgttatttctgtgtcactcatttcggctatagcttggtcaacatcttcaccaatttcctcttcatctaaagcttgttcaatagatggatccaaggcgggcagatcatcagtcgacgtatcagttggttgtggttgagttttcttgaatttggtctttttctttggagccaaggctaaggtactcagggctgatgatctggttttccttttcttgcctccattcggaattagaccagaagcaaattcaatgttcttgccactgttactttgatggggaggggaggactctgttgtctggggcatgacgtcagggaatatatctgttatatacattgaagccgattgatgaaatagatgcagcttccattcaccccaccatctgtcaaagtttttgcttctaaatcctgccaactcaatattatcaatgttgcccagagggggtcctggtaggttaagtagccgatccatcattagagtggaagtgatttgtcctcggcactgaatcttgtcggcaaagaataagccgattgggagttggcccaatccaagttgtctagccgagttcattgggtgataaaactcgtaggagacttggatgtttctcccttggtgaatgccaacagggaggatgcatgggttgattgcagctataagaatttctctggatttttggaatttttcatgattaatgtcttcgaatctaaagtctgacggaagttcaaggtctgctgagtcttcgtacggaaaccagattcgtgcatctttcttaaaacctttgtagaagctgcagaaccagtccttgagtagctcagccgatagcttcgctccagcatcggttggtgtggatgcatattctccatatgacatgcatctgcgatgggtgcgctcttctccgtcatcttccacaatcggctctggcaatgggaattcagcttctgccacatagggccgattgacaaccttcatgactatcaggtttaaccaagtttgcagcagccaccatggtccacctgctccaactattgagccgacggctattttagccaatgcattgttcaacatctcggcgtactcggccgatggcgcagtagaagggctggtggaagacgacat

SEQ ID NO: 38454 - DNA, 2688 bp, Oryza sativa
  Clone ID: PAT_MRT4530_42089C.1
gtaattaatagatacaattgtcttctcaggactctatccacgtgcggcaatcatcttgaagcacctcaattcaacccaatgtcatacaccaaattatactgtcagaatcggctgcatcggctcacctagtctgactcagacccagccgatcttaatcgtagccgatcctaacttgggtcactggaagaatactttcaagtcttggccatctctcgaaaagcctacccttgataagagctggaccacctggtaccaacgcatatcggctagtaagaaagcctagtgggatgagattgggatcggccaagtgcttgctctcaccatagccaattctgctaaaaggatgaacctctgatggctgccgccacctatttctggtccaacaccatcaatgccttcttatttaactaagggccgatgactctaactttgatcgacatcatcatgattactggattagatgtaactttatcggctaaccctatgagtatgaacaccaagaaccaatttgacttcaagaccaaaagcatagaagggtggtctggttatgtagcaacatacatgggcaaagggcctgtcactcctcgggagcacgtagctttcttgctaatgtggctagaaaagtttctcttctgtggatccagctgtggtcccacaaccaattggcaatttgtagccgaagccttaggatcaaagaaacaatttcccttgggcaaaatccttctcggctatctataccaaatgttgaacaatgtatcggctaagatagccatcggctcaatagttggagcaggtggaccgtggtggctactgcagacctggctaaacctggtagtcatgaaagttgtcaatcggccatctataacagaagctgaattcccaaggttggagccaattgtagaagacgatggagaagaatgcacccatcgcagatgcatgtcatatggagaatatgcatccacaccaaccgatgctggggcaaaactatcggctgagctgctcaaagattggttctgcagtttttatgaaggcttccagaaagatgtccggctttggtttctttatgaagactcagcagaccttgagctctgattagacttcagatttgaagacatcaatcatgaaagatatcaaacgtccatggaagtctttacagctgcaatcagcccatgcatcctacctgtcggtattcaccaaggaagaaatatccaagtctcctacgaattctatcaccctataagttcagctagacaacttggattaggccaactcccaatcggcttattctttgctgacaagatccaatgccgaggagaaatttattcaactctaatgaaggatcgactgcttaacctccaaggacctcccttaggcagtatcgacaatattgagttagcaggattcaggagcaggaactttgacagatggtggggtgaatggaagttgcatctatttcatcaatcggccacaatgtgcatgacagatctattccctgacgtcataccccagacaacagagtcctcccctccacatcagagcaatagtggtaggaacattgaatatgccccaggtctgattcctaatggaggcggattgtctccccctgtcatcggctatcatgcccccaaggtctaaaccctcctccaaggcgccatcagggaaccaaccgatgtaaccaagaaaaggaaaattagatcataggctgtgagcaccttgactctagctccaaagaaaaaggccaagtctaagaaaaccaagccaaccgacgacctgcctgctttggattcatccattgaacaagctctggatgaagaagatattgaggatgatgttgatcaggctgcagccgaagtaagtgatactgaaaaaacaccatcggcttcgcctaagcagataccttcaactccttctgcccccactcacttcttcagaaagaagaaaactgctataaagaagaaatcggcagcaccaattctcaaaccagctccaccacctcctcctcctccttcttctcctgtacaacaatcatcgagtgaccgaactccatcggccgtggggagtcatcatattgtggaagaagaacaaccggctgctcctgctatcccagttctagccgatcttttttcttttgatatcaaagattatcttgatgaggcaaaagaagatatttcaagtaaagctctagctcccttatctgacgatgcaaagaaaacacttgaagataaactggccgatgtcctaactccagccgcttatcttgagcaacatcaatttaaactagaaaaagccaagctaagattagccgaacgccgtgagcgcaaggagattgaagccacaatccaagtcaatcggcagcttgtgcatgaagaaaaagtcaaattcgatcagctatccgaaggtccgatcaaatccaatatcgatcggcttgaagcccgcaagatcgatctcttggcacagcttgaagaatgcaatgctgaattggatatggagcacaaaaagctagccgatctcccaaaatctgtcgaagagcaaaaagcaaggctcaaatcggctatcaagaatgttgctgacctaaccaagtccctgaagatcatttctggaactgatgctcaggatgctcaagccattgaagaagtcgaacaaattaggcaaagagatatttcggctatccagcagtacttgtctcaa

SEQ ID NO: 38455 - DNA, 151 bp, Oryza sativa
  Clone ID: PAT_MRT4530_4208C.1
gcttttacctcctgttagatcacacctcctcacacaacacattttgaagcgccaagtggagcaaagaaaaccaaacaatggcccatattatgattcaagcaacccgaacggctgatgaccactttatgcattggatgggctcaattaaaat

SEQ ID NO: 38456 - DNA, 237 bp, Oryza sativa
  Clone ID: PAT_MRT4530_42090C.1
atggccgcgtcatttgcagtcgacacgacgacggaggtggggcttcgcactgcaccatgcggtggtggaggcaggagctacacacaacaatactgtcggctcagcgccaagcgcattggcgctgaggttggccgtctcagcgccaacgggattaggcaaaatggcgctgagatacctaggaccaagtcacatctcaggtccctaggtccagcgccgatgcggctggcgctgaggtag

SEQ ID NO: 38457 - DNA, 2412 bp, Oryza sativa
  Clone ID: PAT_MRT4530_42091C.1
ttattgagacaagtatcgctggatagccaaaataggcctttgcctaatttgttctacttctacaatagcttgggcatcttgagcatcagttccagagatgactttcagggacttggttaggtcagcaacatttttgatagccgatttgagccttgctttttgttcttcaattgattttgggagatcggctagatttctgtgttccatatctagctcggcattgcattcttcaagttgcgccaagagctcaatcttgcgagcttcgagccgatcaatattggatttgattggacctccagatagctgatcaagtttggttttttcttcatgcacaagctgccaattcgcttggattatggccttaatctctttgcgctcatggcgttcggctagtcttagcttggctttttccagcttgaactgatgttgctcgagataaacggctggagttaggacatcggccagatcttcgggaatcagagcttgaacttcatgcagccgcgtcctaattgacccacagtcaactaccaaactgtctaaagaagaggcttctagccgatgagcgatgtcttcaagtgtttttctcacatcatcggataggggagcttgggctttgcttgaagtgtcttcttctgcctcatcaaggtaatctctgatgtcaaaagagaagagatcggctagagctgggatagcagaagcagctggttgttcttcctcttcgacgtgatgactccccacagccgatggagtctgattacttgacgattgtggtggagccgatttaacaattgttgctgctggttttttcttcacagtagttttcttcttgggggcagaaggagttggaggcgtttgcttgggtaaagccgatagtgttctttctgtgtcactcattttggctacagcttggtcaacatcttcaccaatttcttcttcatctaaagcttgtttaatagatggatccaaggcgggcagatcatcagtcgacatatcagttggttgtggttgagttttcttgaatttggtctttttctttggagccaaggctaaggtactcatggctgatgatctggttttccttttcttgcctgcatcggctggttccctagttaggccgtgaaggaaagttgaagtcttgggggcatggtagccgataaaagggggagatagtccacctccattcagaattaaacctgaagcatattcaatgttcctgcaactattactttgatgaggaggggaggactctgttgtctggggtatgacgtcagggaatagatctgtcatatacattgaagccgattgataaaatagatgcatcttccatttaccccaccatctgtcaaagtttttgcttctaaatcctgccaactcaatattatcaatactgcccagagggggtcctggtaggttaagtagccgatccatcattagagtggatgtgatttgtcctcggcactgaatcttgtcggcaaagaataagccgattgggagttggcccaatccaagtgggtgataaaactcgtaggagacttggatgtttctcccatggtgaatgccgacagagaagatgcatgggctgattgcagctataagaatttctctggatttttggaatttttcatgattaatgtcttcaaatctaaagtctgatggaagttcaaggtctgctgagtcttcataaggaaaccagattcgtgcatctttcttaaaaccttcgtagaagctgcagaaccagtccttgagtagctcagccgatagcttcgctccagcatcggttggtgtggatgcatattctccatatgacatgcatctgcgatgggtgcgctcttctccgtcatcttccacaatcggctctggcaatgggaattcagcttttgtcacagagggccgattgacaaccttcatgactgctccaactattgagccgacggctattttagcagatgcattgttcaatatctggtacagatagccgagaaggattttgcccaaaggaaattctttctttgattctaaggcttcagctacagagtgccagttggttgtagggccacaactggatccacaaaagaggaacttttccagccacatcagcaagaaagctacatgctctcgaggggtaacagacccttggcccatatatgccgccacatagccagaccagccacctatgcttttggtcttcaagtcaaattggttcttggtgttcatactcatagggttagccgatgaagttacatctaatccagtaatcatggtgatgtcgattaaagttggagtcatcggcccttggttgaataagaaagcattgatggtgttggaccagaagtaggtggcggcagccatcagaggttcatcctcagcgtacttgcccgatggtgcattagaagggctggtggaagacgacat

SEQ ID NO: 38458 - DNA, 955 bp, Oryza sativa
  Clone ID: PAT_MRT4530_42092C.1
atgtcgaccgtctcctccgcgctgtcgtcgttcctctactgctgcttctcccccaccggcggccaccggcacggccaccgcgccggcgcgtactactacagcagccacccgacgagcaccaacacctactactacgagggtggcctcgccggacgcaggatgggcaggagcaggccactgtcactgcagacagtggagctcaaggttcggatgtgctgctcaggctgcgagagggtcgtgaagcatgctctcatgaagctcagaggggttgattcggtggaggtggagttggagatggagaaggtgacggtgacggggtacgtggagaggcagcgggtgctgaaggaggtgaggcgggcggggaagaaggcggagttctggccaaacccagacctgccgctctacttcacgtcggccaaggactacttccacgacgaggagtccttccgccccagctacaactactaccgccacggctacaacggcgacaagcacggccacctcccggagccccaccgcggcgccgaccccgtcagcaacctcttcaacgacgacgacgtcaacgcctgctccatcatgtaaaaaaattcccatgcccgcctcgcattgcacgcgtactactactactactagtagcagtgagatcgatcgagtgtgtgtgatcatcattgtgtgttctctcttgtgctcggcgccgtggtgacaggtcaggtagtgtgctgtgtgtccatggagtagtagtagtagcagatgctaaagtcagtcagtcagtgtggcaatatcgaatgagtagtggcgccctttacgggttacacaatggaaagccaggctctgtgtacgtacgtactctctgtcgatctgcaaattgtcaatgggcccgaaactaaagccaattgatcgaatatcgttttttaaaagtagtatttttttgtttctaataaaaaaaaaaaaaaaa

SEQ ID NO: 38459 - DNA, 1872 bp, Oryza sativa
  Clone ID: PAT_MRT4530_42093C.1
atgtcgtcctccaccaacccatctgatgtgccatcagccaaattaaccaacccagatctaggtcactggaagaataccttcaaatcttggccgtctctagagaaagttccacccgaaaaaagttggaccacatggttcaaacgtgtatcagcaagcaaaagggttcactgggatgaaattggaatcggccaagcacttgacctcactatagcaaactcggccaaagatgaacccctgatggcagctgcttcttacttctggtcaaacaccgtcaatgcctttttatttaatcaagggccgatgactccaactttaatcgatatcaccatgattactggattagatgtaacttcatcggctaaccctatgagtatgaacaccaagaaccaatttgacttcaagaccaaaagcataggtggctggtctggctatgtggcggcatatataggccaagggtttgttacccctcgagagcatgtagctttcttactcatgtggttggaaaagttcctcttctgtggatccagttgtggccctacaaccaactggcaatttgtagccgaggccttagaatcaaagaaagaatttcctttgggcaaaattcttctcggctatctgtaccaaatgttgaacaatgcatcggctaaaatagctgtcggctcaatagttggagcaggtggaccatggtggctgctgcaaacttggttaaacctgatagttatgaaggttgtcaatcggccatctgtaacagaaactgatttcccaagattagagccgactgttaacgatgacggagaggaactcactcattggagatgcacatcatatggagaatctctttccagatattgtccctcaaacaacagaatcttcgccccctcaccaaagcaacagcagcagggatatcaagtatgccccaggactgatccccaacggagagaaccagccgatgccggcaagaaaagaaagaccagatcatcggctgtaaatatttcagccccagctccaaagaagacagctaagacaaagaaaactacaccagctgatgatctgcctgctctagatccatccattgaacaagctctggatgaagaaataattgaagatgacgttgatgaggctgcagccgaaaaaaagaaaactgctgtcaagaaaaagccaccaacaatgattaccaagtcgactccaccaccttcgcctgcttctcctcctgtacggcaaaaatcaagtgaccagactccatcggctgcgggaagtcatcacatcgaggaggaagaacaaccagttgctcctgctatcccagttctagccgatcttttttcttttgacatcagagattaccttgatgaagcagaagaagatatttcaagcaaagccttagctcccctatccgatgatgtgagaaaaatactggaagatatttctcattggctagaagcatcactagataacttggtgaccaactgtggctcgatccgggcgaggttcacggacatccaagctctactcccagatgaactagctgatgtccttactccagccgtttaccttgagcaacaccgattcaaactggagaaggctaggcagagattagccgatcgccgggaacgcaaagacattgaagctacaatccagcacaatcggcagcttgtgcatgtagagaagtccaagcttgaccagctgtctgaaggcccaatcaagtcaaacatcgatcggcttgaagctcgaaagattgatctcatggcacaacttcaagaatgcaatgccgagctggatatggagcacaaaaagctagccgatctcccgcaagctcttgaagaacaaaaggcaaagttatccctggaactgacgctcaagatgcccaagccatag

SEQ ID NO: 38460 - DNA, 1881 bp, Oryza sativa
  Clone ID: PAT_MRT4530_42094C.1
atgtcgtcttccactagcccgtctactgcgccatcggccgagtacgctgagcacctttccaacctagttgcgattcccagcctatcgcacaaaaaccactattttcttggcccaatcggcaatcttgaccccactgatttcattattggtgaaaccaacagaatcccctttagactagccaaccctaacctgggtcactggaagaataccttcaagtcttggccatctcttgaaaagcctacccctgataagagctggaccatctggtaccaacacatatcggctaaagctgaattcccaaggttggagccaattgtagaagacaatggagaagaacatgcatccacaccagccgatgctggggcaaaactatcggctgagctgctcaaagattggttctacaacttttatgaaggcttccagaaagatgcccgggtttggtttctttatgaagactcagcagaccttgagctcccatcagacttcagatttgaagacatcaatcatgaaagatatcaaacgtccagggaagtctttacagctgcaatcagcccatgcatcctacttgtcggtattcaccaaggaagaaatatccaagtctcctacgaattctatcaccctataagttcagctagacagcttggattaggccaactcccaatcggcttattctttgctgacaagatccaatgccgaggagaaatttcttcaactcaaatgatggatcgactgcttaacctccaaggacctcccttaggcagtatcgacaatattgagttagcaggattcaggagcaggaactttgacatatggtggggtgaatggaagttgcatctatttcatcaatcggccacaatgtacatgacagatctattccctgatgtcataccccagacaatagagtcctcccctccacatcagagcaatagtggtaggaacattgaatatgccccatgtctgattcctaatggaggcggattgtctccccctgtcatcggctatcatgcccccaaggtctcaaccctcctccaaggcgccatcagggaaccaaccgatgtaaccatgaaaagaaaaactagatcatcggctgtgagcaccttgactctagctccaaagaaaaaggccaagtctaagaaaaccaagccaaccgacgacctgcctgctttgcatccatccattgaacaagctctggatgaagaagatattaaggatgatgttgatcaggctgcagccgaacctcctcctcctccttcttcccctgtacaacaatcatcgagtgaccgaactccatcggccatggggagtcatcatattgtggaagaagaacaaccagctgctcttgctatcccagttctagccgatctcttctcttttgatatcaaagattatcttgatgaggcagaagaagatacttcaagcaaagctctagctcccttatctgacgatgcaaagaaaacacttgaagatatctcgcgtcggctagaggcctcttctctggatagcttagtggtcgactgtggatcgattaggacacgattacacgaagttcaagctctaattcctgaagaactggccgatgtcttaattccagccgcttatcttgagcaacatcaatttaaactagaaaaagccaagctaagattagccgaacgccgtgagcgcaaggagattgaagccacaatccaggtcaatcgacagcttgtgcatgaagaaaaagtcaaactcgatcagctatccgaaggtccgatcaaatccaatatcgatcgccttgaagcccgcaagatcgatctcttggcacagcttgaagaatgcaatgctgaattggatatggagcacaaaaagctagccgatttcccaaaaagctatcaagaatgttgttga

SEQ ID NO: 38461 - DNA, 257 bp, Oryza sativa
  Clone ID: PAT_MRT4530_42095C.1
gccgaaaaaaaaaaaaaaataaaaaaaaactacacttcattaaaacgccaatttaattatctaaaaactaatcataatacttcgtagtgactaacaacaattcaaagtgcaccccatcacttaacctttctcctcttcactttttggcccccgcttttttattccaccctattttacatcctttcccttcctaccaaatatccctttattttgcccccccaaaatacattttactcccttcaatttaacaccttatt

SEQ ID NO: 38462 - DNA, 2607 bp, Oryza sativa
  Clone ID: PAT_MRT4530_42096C.1
atgtcgtcttccactagcccgtctactacgccattggccgagtacgctgagcacctttccaacctagttgcgattcccagcctatcgcacaaaaaccactattttcttggcccaatccacaatcttgaccccactgatttcatcattggtgaaaccaacagaatcccctttagactagccaaccctaacttgggtcactggaagaataccttcaagtcttggtcatctctcgaaaagcctacccctgataagagctggaccacctggtaccaacgcatatcggctagtaagaaaacccactgggatgagattgggatcggccaagcgcttgctctcaccatagccaattctgctaaggatgaacctctgatggctgccgccacctatttctggtccaacaccatcaatgccttcttatttaaccaagggccgatgactccaactttgatcgacatcatcatgattactggattagatgtaacttcatcggctaaccctatgagtatgaacaccaagaaccaatttgacttcaagaccaaaagcataggagggtggtctggttatgtagcggcatacatgggcaaagggcctgtcactcctcgggagcacgtagctttcttgctaatgtggctagaaaagtttctcttctgtagatccagctgtggtcccacaaccaattggcaatttgtagccaaagccttagaatcaaataaacaatttcccttgggcaaaatccttctcggctatctataccaaaagttgaaaaatgcatcggctaagatagccgtcgactcaatagttggagcaggtggaccatggtggctactgcagacctggctaaacctggtagtcatgaaagttgtcaatcggccatctataacagaagctgaattcccaaggttggagccaattgtagaagacgatggagaagaactcacccattgcagatgcatgtcatatggagaatatgcatccacaccagccgatgctggggcaaaactatcggctgagctgctcaaagattggttctgcagcttttatgaaggcttccagaaagatgcccgggtttggtttctttatgaagactcagcagaccttgagctcccattagacttcagatttgaagacatcaatcatgaaagatatcaaacgtccagggaagtctttacagctgcaatcagcccatgcatcctacctgtcggtattcaccaaggaagaaatatccaagtctcctacgaattctatcactctataagttcagctagacaacttggattaggccaactcccaatcggcttattctttgctgacaagatccaatgccgaggagaaatttcttcaactctaatgatggatcgactgcttaacctccaaggacctcccttaggcagtatcgacaatattgagttagcaggattcaggagcaggaactttgacagatgatggggtgaatggaagttgcatctatttcatcaatcggccacaatgtacatgacagatctattccctgacgtcataccccaaacaatagaatcctcccctccacatcagagcaatagtggtaggaacattgaatatgccccaggtctgattcctaatggaggtggattgtctccccctgtcatcggctatcacgcccccaaggtcttaaccctcctccaaggcgccatcagggaaccaaccgatgtaaccaagaaaagaaaaactagatcatcggctgtgagcacattgactctagctccaaagaaaaaggccaagtctaagaaaaccaagccaaccgacgacctgcctgctttggatccatccattgaacaagctctggatgaagcagatattgaggatgatgttgaacaggctgcagccgaaaagaagaaaactgctataaagaagaaatcagctccaccacctcctcctcctccttctcctgtacaacaatcatcgagtgaccgaactccatcagccgtggggagtcatcatattgtggaagaagaacaaccggctgctcctgctattccagcagaagaagatacttcaagcaaagctctagctcccttatctgacgatgcaaagaaaacacttgaagatatctcgcgtcggctagaaacctcttctctggatagcttagtggtcgactgtggatcgattaggacacgattgcacgaagttcaagctctaattcctgaagaactggccgatgtcctaactccagctacttatcttgagcaacatcaatttaaactagaaaaagccaagctaagattagccgaacgccgtgagcataaggagattgaagccacaatccaactatccgaaggtccgatcaaatctaatatcgatcggcttgaagcccgcaagatcaatctcttggcacagcttgaagaatgcaatgttgaattggatatggagcacaaaaagctagctgatctcccaatatctgtcgaagagcaaaaaacaaggctcaaatcggctatcaagaatgttgctgacctaaccaagtccctaaagatcattcccgggactgatgctcaagatgcccaagccattgaagaagtcgaacaaattaggcaaaaagctatttcggctatccagcagtacttgtctcaataa

SEQ ID NO: 38463 - DNA, 1744 bp, Oryza sativa
  Clone ID: PAT_MRT4530_42097C.1
gggtacaaggcgattgattaggggtttcctgacaatatcctgaaacggagggagtaccatactagaaaaatagaaagaaagaaaaaggaaaagacagcgctggtgattagcgacggcgggcagcgaacgaaatacttgccgtgcttgacagaacgcggtgactcgattggcttccatgtgtgcctgttcctggcaatgatctcgtcgaacttcttcttaaaatcgtccacctctcttggagagttggcactcatcgagatctcgtatccacagtcgttcgtcgatgctgctctcctttttggcgaatcctgaattcctgatcgtgatctgcttcctgaacctggcgatgaagttattggccctccggtccacctcgtcctcatccaccttcggtgttgacgcgttggcccttgtagagaactcgccttcgtcgtcggctattccctctgtttcgtcggacaagtcatcgctgtcttggacggtctcagccagagtctccgacagcgacttcagttgcgtgccctgcaacctcaagtaccgtaaattaggtagacattctatagatgccggcagtttggtgattgtgggacgtccaaggtcaagaacagtaatgttgtttgaaccaatgaggattaagtccaacaagtgacaacgggccgttacagcttcaagtaacatcggggcgcggagaagccggaaattcagtttggatatatcagtgtccctccactcataagatggcagacgagcatacttgttgatttgtatcattatgctaagatcatttgaagagccgaacttctcgttttgcacagcacgaggagcaagttcaggcaagtggtcctgtatcttggatgtgctcacctggccaagcccatcatagtccacaggcacattcctgattattcgctcggccgcatcctctgccctgcacttttcaatgcccactacgaagccttctgcgacccgttgctcccttgacatagtataatcttcaggaaacacgccactatcagcaatattcttcatagttttgccccacactgctttcttttcgacagaatgctgcttttttgagtccccatttttttcgctaattgaatcttcaatcttgatcttgtgttttttcttaatacacttatactcttccttaacacattctacccttgctatgtcgagatcatcaagaaacattagatgctttctaatggcttctttcaacgcagcctctgcagccatcctgtcagactccttggcttcagcagctcctccaattcgaacagcaatcttcttgaggtttaataggtgctcaatgcctacaagaatattgtcatacttctcccctttatgggcattgaaacctagcttgagcctgtgaagattggccatggctcctgcctgaaaagccatgcgcagtgtgccacatataaacttgaaatacttgagaactggaaatgcttttctgttgaagacaatcctttccataggagctttcatgatatgcattgagagaacaatgaggtcaggcagtcctgcaagactatcaatatcattttctatcagttctctaacagcaagattcaatgtgtggagtttacggagttgaccaatccagtcaggaagtctagcaaatatgcaaatggatggcaactctaatgtcctaacagagaaaggaagagaggacgctgttctggaacgatcaaccgaaataccaattccataaaggggatcctctagagtcgac

SEQ ID NO: 38464 - DNA, 2667 bp, Oryza sativa
  Clone ID: PAT_MRT4530_42098C.1
atgcacgaggtttcaatgtctgcatatttgcatatggccaaactggatcaggaaagacttttaccagtgagtggaccgaaagttttgacagaggaaagcctcggtgttaactatagagcactaaatgacttatttaatattaaagcacagagaaaggggacaatcgattatgaaatttctgtgcagatgattgagatctacaattgagcaagtgagggatctccttcaggatggtggaaacaggagattagaaataagaaatactccacagaaagggcttgctgttccggatgcaagcatagttcctgtcacatctacggccgatgttgttgaactgatgaatcaaggccagaagaatcgtgcagtgggttcaacagccatcaacgatcgaagtagccgctctcatagctgcttgtctgttcatgtccaaggaaaagatttaacatctggggcaatgttgagaggttgcatgcatcttgtggatctatctggtagtgaaagagttgataagtctgaggttgtaggagacaggctgaaggaagcacagtacaaagcatagttactgatttttctatagagtctaatgagatgactacttcagactcccttagcattcttttgcgtaaagttctcttagataagaaaccagaggaagtcccattgattgttgagtcgatcctaagcaaagttattcaggaatatgagcatcgaattgcaatccagaacaagatggatgaggaggagcaaaatctcttgaatatcacggaacaggtcaaccatgtagttgtaaatggtgatggtgaagttaaacagttccaactagaggcacagacaaattttgatgtgcaacaaaaacagatccagaagtatttaatatatccatttttttaccatgttgtaaaagggaaacatttctacactctctccaatgcggcttccagctaccataaagttcttgaggaaaaccgcaaattatacaaccaaatacaggaccttaaaggaaatattagagtatactgtcgagtgaggcctttcctacctggacatagaagtttatcaagcagtgttgctgacacggaagaaagaacaatcacaataatcactcccacaaaatatgggaaagatgggtgcaaatcattcagttttaacagggtctttggtccagcatctactcaagaagaggtcttttcagacatgcagcctttgatccgttcagtccttgatggtttcaatgtctgcatatttgcatatggccaaactggatcaggaaagacttttaccatgagtggaccgaaagttttgacagaggaaagcctcggtgttaactatagagcactaaatgacttatttaatattaaagcacagagaaaggggacaatcgattatgaaatttctgtgcagatgattgagatctacaatgagcaaaaagggcttgctgttccggatgcaagcatagttcctgtcacatctacggccgatgttgttgaattgatgaatcaaggccagaagaatcgtgcagtgggttcaacagccatcaacgatcgaagtagccgctctcatagctgcttgtctgttcatgtccaaggaaaatatttaacatctggggcaatgttgagaggttgcatgcatcttgtggatctagctggtagtgaaagagttgataagtctgaggttgtaggagacaggctgaaggaagcacagtacataaacaagtcactttcagcattaggagatgtgattgcatctcttgcacagaaaaattcgcatgtcccttaccgaaacagcaagcttacccagcttttgcaagattctctaggaggacaagcaaaaacgctgatgtttgttcacgtaagcccggaactagatgctgtcggtgagacaataagcacattgaaatttgctgaaagggttgcttcagttgagcttggtgcagcaaaagcaaacaaagaaggcagtgagattgctaccctcaaggcggcattggctaaaaaggaaggagaaccagaaaacattcaaagcacacagtcaagccctgacatgtatagaattaaaagaggcaatgcaatacctgccttccctaaaaatagacagccaatggaagaagttggaaacttagaggtccggaacaatgccactccaatgcaaaagaaggccagctttcaattttctggtgtcctcagtgagaacaactcatccgacttggctgaaaattgcaatggcattcagaagaccgatagaatggctgtcggtaataatcaatttgagaatggaaattccattctagagctggagcctggcgcaactcagcttccaacatttttctaccaaagatatgatcccgacaagcaaaggcgtagggctgaaccagtagaaactgatgactcagatagctttgatgctgctactagctcgccttccgaccaagaaatgttgttgtccaccagtggcctcaaagctgatggtattgccagcagaggtgcctttattataaagaaacctcaaacaaagaatacgaaaattacagcaacgaagattccaaatcttgcaatgaagtcgccaatgtcagagaaaaggctgcaaaccccaatcaggaacagcaagcagctacctttcagcactacgggtggaagaagaactcgaaatggcaaaattaacactccaaaataa

SEQ ID NO: 38465 - DNA, 2528 bp, Oryza sativa
  Clone ID: PAT_MRT4530_42099C.1
atgtcgtcttccaccaatccatctgatgcgccatcagccaagtatgctgagcatctctccaaccaagtcacgattcccagcctttcgcacaaaaaccactattttctcggcccaatcggcaatctcgaccccactgatttcatcattggtgaaaccaaccggatccccttcaggctagccaaccctaacctgggtcactggaagaatacctttaagtcttggccatctctcgaaaaatccacacctgataagagctggaccacctggtaccaacgcgtatcggctagtaagaaagttcactgggatgagactggaatcggccaagcacttgctctcaccatagccaattctgctaaggatgaacctctgatggctaccgccacctacttctggtcgaataccatcaatgctttcttattcaaccaagggccgatgactccaactttaatcgacatcaccatgattactagattagatgtgacttcattggctaaccccatgagtatgaacaccaagaaccaatttgacttcaagatcaaaagcataggtggctgctgtggccctacaaccaactggcagtttgtagccgaagccctagaatcaaagaaagaattccctttgggaaaaatccttctcggctatatgtatcaaatgttgaacaatgcatcggctaaaatagccgtcggctcagtagttggagcaggtggaccatggtggctgctgcaaacttggttaaacctgatagtcatgaaggttgtcaatcggccctctgtaacagaagctgaattcccactgccagagccgattgcggaagatgacggagaagagcgcacccatcgcagatgcatgtcatatggagaatatgcatccacaccaactgatgctggagcaaagctgtcggccgagctgctcaaggactggttctgcagcttctacgaaggttttaagaaagatgcacgaatctggtttccttatgaagactcagcagaccttgaacttccattagactttagatttgaagatattaatcatgagaaattccaaaaatccaaagaagttcttatagccgcaatcagcccatgcatccttcctgtcggcattcatcaagggagaaacatccaagtctcctacgagttctattacccaatgagctcggcccaacttggattgggtcaacttccaatcggcttattttttgctgacaagattcagtgccgaggacaaatcacatccactctaatgatggatcggctactcaacctaccaggacctcctctgggcagcattgaaaatatcgagttggcaggatttagaagcaaaaattttgacagatggtggagtgaatggaagctgcatctatttcatcaatcggctacgatgtatatgacagatctattccctaacgtcataccccagacaacagtatcctcccctcctcatcaaaataacaatggcaagaatattgaatatgcttcaggcctaattccgaatggatgtggattatctcccctgttatcggctaccatgcccccaagacttcaactctccttcacagcctaaccagggaaccagccgatgcaggcaagaaaagaaaaaccagatcatcggccgtgagtaccttggccttagctccaaagaaaaaggccaaattcaagaaaactaagtcgactgataagccggctgatgatctacccgccttggatccatctattgaacaagctttagatgaagaggaaattggtgaagatgttgaccaggctgtagccgaaatgagtgacacagaaaaaacaccatcggcttcacccaagcaaacgcctccaactccttctgcccccgttcattttacaagacctcctcctgcttctcctcctgtacagcaaccgtcaagtgaccagactccatcggctgtggggagtcatcacatcgaggaggaagaacaaccagttgctcctgctatcccagttctagccgatctcttctcttttgacatcagggattaccttaatgaagcagaagaagatacttcaagcaaagctctagctcccctatatgatgacgtgagaagaacacttgaagatatctctcatcggctagaagcctcctctttagataacttggtagttgactgtggatcaattaggtcacggctgcatgaagttcaagctctgattctcgaagatttggccgatgtcctaactccagccgcttatctcgagcaacatcagttcaagctggaaaaagccaagctaagactagccgaacgccgtgagcgcaaagagattgaggccacaatccaagctaatcggcagcttgtgcatgaagaaaaaaccacacttgatcagctatctgaaggtccgatcaaatccaatattgatcggctcgaagctcgcaagattgagctcttggcacaacttgaagaatgcaatgccgagctagatatggaacacaaaaagctagccgatctcccaaaatcaattgaagaacaaaaagtaaggctcaatcggctatcaagaatgttgctgacctaa

SEQ ID NO: 38466 - DNA, 1544 bp, Oryza sativa
  Clone ID: PAT_MRT4530_4209C.1
gtttggtttggtttggctttgcttcttcctcgcgcggcgcctcccatccgcatggatgatgccttctccttctccttctccttctccttctccttcttgatatttccatttcctccccattgttccctccttctgcctcctccctcctcaatctacacctatccccaccaccgccctagcttcttctcctctcccgcagccgcccgctagatcgttctgtcactcatgcccgtgcagctgggaggagggggcaaggtggcggaacccaaggacctctccgccaccgacaaggaccgcccctcctccaagaagaaccgccgccgccaaaagaagcccgctacttccgccgccatctccccgccggtcgccgccatgcagaccctcttcgacaccagcagggaggtcttccaggattctttgccgggattcgtgccgccgccccaagccgtcgcccgactcgccgccctactcaatgatttgaaaccacatgatgttggaattgagccgagtatgtcgtgtttcaagaatgccgattctaaagggcctcctcgggtgacttatctacatttttacgattgccccaagttttcgtttggtatcttctgtttaccgaagtcagctgtcattcccctccacaatcatcctgggatgacagtattctgcaagatactgtttggctccatgcacctcaagtcctatgactgggctaaaagtgccccagataatgataataatgcacttgagacctcagatggagctcgtttagcaaaggtcaatacagatgctgcatttgatgcttcatcggagaccacaggtctataccctgaaaatggagggaatttgcactgttttactgcaaggacagcttgtgctgtgcttgacgtgatgggacccccgtacaaccgcgcggatggaagggattgctcatattacgacgaatccccatacttgagttcatctggtggagatgcacggtactcgtggctcaaagaaaatcatagtacgttcgagatgaaaggtgtacagatgccacaaaggtttatcgtttagaaatgacatacagcatcattttgtggcaacacctgcaaccatttccgccgaagaatggtcctcctctagcttgctgtagatacctgtaactgcaaagacaggcagatggtacaagggaagatgtggccactaagctcagactagcaaactcttgagtgacacagacgttacatttgtttggcttcttattttggtcagggttgaaacaatctcttgtgattttcagataactctgttcctcatatgttatcctcgtctggcagtgcaaaattgggattgggtgatacagtgaacaagtgttttgtttttgggccatgatcatctttttttgtttccctgtagaactgtatgcaggcgttttttgaaagtgatcatgtaccgaattcagagtgtggtttgcttggtttgttgaacagggaagctattcctttttgcctcttactgtagtagacaagaggcatatacatacataacatagcctttgtttcttgagc

SEQ ID NO: 38467 - DNA, 357 bp, Oryza sativa
  Clone ID: PAT_MRT4530_420C.1
atggagagggggacggaagcgcacgcgccaagttgtatgccagctagtaaggctgtagcaatgttagctctcgtatggatggagttctccggcaactctacgctatgcaagaagaagataggagtcaaaactcaagacacctatgcactgttgactatgataaatcattgtcggagtatactttacatcgaaactcaactattgaaatacgttaccgagaaagagtcggacagtctgtatgtagggattatacaggttgtattacgccaacccgccatgctacaacacatactaccctacaacattggtcatcgtctcaacaaggacaaagaaatagagaggatgtccccagattga

SEQ ID NO: 38468 - DNA, 307 bp, Oryza sativa
  Clone ID: PAT_MRT4530_42100C.1
ggcaaaccccaacttttttaagtttttgaattttggatggatcattttaaattcatcacagcattgtacaatttgggcaagcattggtacattcagcgatggaaaaagagagttttttacaatggggggtgggccattaacgagcccggggtgaacttggtggcgtaaacccaggcgtttttggcaacggggtccgagagggggtcaagcaggtttttcaaggggcccttgccggtgacaatggcctggacaaaaaaacccaacatggaaaacatggggagggggccatttttgatctccttgacct

SEQ ID NO: 38469 - DNA, 370 bp, Oryza sativa
  Clone ID: PAT_MRT4530_42101C.1
gggccaacaagaaaacatagcttattcattcttttggggaagaagttcgttccgggagcctatgggcaaatattccaattcttgcagcaatgaaaaatttcatgaggggctattggagtaatccagcttacaatgagaggctaaaagggggaagttgtaacaagacagggaccaattggaaggctccaaaagcccatcctttattcaggactgaaatcttaaaaaggggcgaacttcgaacatgattggcctaaacccaagccgggtgagaaaagaatgacccccccagccgtaagtacatggaatttgaatacgggcacgcctcgcacactaaaatttttctttttcaggggaaaactcctatacccaa

SEQ ID NO: 38470 - DNA, 251 bp, Oryza sativa
  Clone ID: PAT_MRT4530_42102C.1
tctccgccgcgccgccgccttcgtgccaatgcaccgtcgccccggatccgccgcgccgtgcgtcgtcgccttgcaccgccgtcgagcccaagggagttgcggatccaagacaggaccaagacccgcaaagcttcgagcaaggcaagtcatcactattccttgaacatgttgatcccaattgcgaaattattttatttacaaataagattgcatgcaatgatgaacatcctatttgtgaatatgccatgcct

SEQ ID NO: 38471 - DNA, 552 bp, Oryza sativa
  Clone ID: PAT_MRT4530_42103C.1
atgcatacgattcgatgcatctcggccggcgctctggtgctgatcatggttgtcaatctcaacctgaaagaggagctctatgttgtcgccggatccaatcaatttttcaactcacagcatctctccttacctcatctttatctcctctcctctcctcatactcccccctctctctcaaactctctcccggtcgaccgagtggcggcggccggcgggcatccgacggtggcggccgtcctccacccagaggccggtggcggtaggagcatagcggaggtggtggcgagaggagtttggcgatggcgggaggaggcggcggcggcagccatcccccgcgtggatctggcggccgatggatttttttcgcgtgcggacgacataagcacccgcacgcggaaaaccgatttttccgtgcggatggatggtatctcctccaccgggcgatccgagcagatcgagctcgccgcaccaccatcgtcggcgccggcgtcggaactcggaagccatccatccaggcgacaccgtcgtcgccatgattttgggacgccggcc

SEQ ID NO: 38472 - DNA, 484 bp, Oryza sativa
  Clone ID: PAT_MRT4530_42104C.1
gaaacaaggtaaggattgttagaaactggagaatttgggtcccccaaaagcttcaaaagtattgaaattgtctaaggtttcatattttgcaggtaaacctgataatactttcctagtgtatcatttgtttaacgggatgcatttctggtgttaaaatgtggtactcgtcatgccaaactgtgtgcatggggttccaaattgtgatagactggaggaagcctgtgtgcacgcatggaactgtgtcttcatgcacaagattgatgggcagcaggcaagcctgatgctcaatggcccccaatcctcccaggggatgaggatcaaaaccatgctggcatgtggcacaagcttgcctccccactgggatccatgcaaaatggtggtaatgcttagcaattgtaatgtgtagtgttaaacagttggggtcatttttgtgagatctgaatactgattccataaatcggggctggccagaaaaaaaaaaaaa

SEQ ID NO: 38473 - DNA, 886 bp, Oryza sativa
  Clone ID: PAT_MRT4530_42105C.1
attgaaaaaggtttttaaaagtctcttttggctttgggccgaaagtcggcccaaaacctcctctctctttcccccggcccaagtcggcccagtccgcagccgtccgcgcgcgcgcgctcgctgtcgctgacaggtgggtcccacctgccttttccttctccggtgaaatcaatagaggggaaatgatctccgggatctcctccaccttttctcttttggaatcatcggctaatttcgtttggaaatccatggattcgaggtcgattcggatcggtctctctcctccgaaccctaacctttccttcttgtcgctggtcgccatgggccttcgccaccgcctccttgcccccgtcgccacccttgccttcgtctctcgccgtcggaagcgccctagcgccgtgagaccttgtgccgttgtcgtcgccgtcgctccagccgtgcttcgccgtcgttccagtcgtcgccgtcgctcggggagaccgccatcgtggtcgtcatcgcgtcgccgtcctcgtccgccccttcgccgtcgctgtagaccgccggagcatcgccgtcgtcgtcaagccgaaggaccccgccgccttttctttggtcatcggtgagttcgccgcgtcgcgctctacgtcctggtgccctccgtttatgccgtagcgccgtcgttcgccggcgagcttgcgctcccgagccgccgccggaggtgacgtcgccgctgacgtcatcgggaccgtccgccgtggcccggtcgtggaccgttcgatctcagccgtccgttttggataggatcgatcccgaccgttcgttcccgcgaaccgctgccgtgcacccggtccaccgcaaaccctagccgctgacgcaataaaccctttttccttttcaaaaataa

SEQ ID NO: 38474 - DNA, 613 bp, Oryza sativa
  Clone ID: PAT_MRT4530_42106C.1
agacggtccctgatgacgtcagcggtgacgtcacctccggcggcggctcggcggctcgggcgcgcaagctcgccagcgaacgacggcgcttcggcacgaacggagggctccaggacgtagagggcgacgcggcgaactcaccgatgaccaaaacgacggcggaagatgaacggacggcggcggcgtcgaggaaaaggcggcggagtccttcggcttgacgacgacgacgatgctccggcggtctacagcgatggcgaaggggcggacgaggatggcgacgcgacgacgaccacgatggcggtctccccgagcgacggcgacggctggaacgacggcgaagcacggctggagtggcggcgacgacaacggcacaaagtctcacggcgctagggcgcttccgacggcgaaagacgaaggcgagggtggcggcggaaagagaaaaggtagaggagatcccgaagattgttttccctcaattgatttcaccggatcgggaaagacgcaaccgaatttggaaggagacgacggcggcgcggcgctagggtttcgggcggcggccgacgcgaggaagacgacgactccgacagtccagttggttacggattccacatta

SEQ ID NO: 38475 - DNA, 220 bp, Oryza sativa
  Clone ID: PAT_MRT4530_42107C.1
aagcttgattgcccaaaccatatggaaacttgagcatgcatgtagtactgcttctataaattcatgtttgaattgaatctctaatgtatacgctagaattctataaattttccaatcgactttttatgtcctgtttctattaaaactccactgtagtcatagcactgttttgaatttttttcaattaaattttagcaatatttcccaaaaaaaaaagctt

SEQ ID NO: 38476 - DNA, 574 bp, Oryza sativa
  Clone ID: PAT_MRT4530_42108C.1
gggttccggaaaagggtccctaaaaaggggggagtcctttggcttgacgacgacgacaatgctccggcggtttacagcgatggcaaaggggcggacaaggatggcgacgggacgacgccccccgatggcggtctccccgagcgacggcgacggctggaacgacgggcaaagcacggctggagtggcggcgacgacaacggcacaaagtctcacggcgttagggcgcttccgacggcgaaagacgaaggcgagggtggcggcgggtaaaggagacactgggggtccttttataggggcaaggaggcggcggcgaaggcccatggcgaccggcgacgcgaaggaaacatcggggtttggaggaaagagaccgatccgattcgacctcgaatccacgaatttccaaacgattctagccggtgattccaaaagagaaaaggtagaggagatcccgaagattgtttcccctcaattgatttcaccggatcgggaaagacgcaaccgaatttggaaggagacgacggcggcgcggcgctagggtttcgggcggcggccgacgcgaggaagacgacgactc

SEQ ID NO: 38477 - DNA, 288 bp, Oryza sativa
  Clone ID: PAT_MRT4530_42109C.1
atgacgaagctcgtcgccaccggtcaaaacacccacctgccgccggtcaaaccaccgaaaccttgccggtcagaccgcccaaacacctgcggcactggcaacccgctgttcccagatggcagttatgacggttgtgagaaggggaaatgtccgaactgccccgcaactgtgagttggacgccctcgcaccctcagcactgcccgcaagagtacacgaccccgggcaagaagcccaagccagatccggaggccaccacctctgagccgtggggactcagatttgcatga

SEQ ID NO: 38478 - DNA, 365 bp, Oryza sativa
  Clone ID: PAT_MRT4530_4210C.1
caccgagccagcgtccagaaggaggggagcggagcgccatcagccgtccgatcgagcgatcccatagctgtcgctctctccacctctgctgctgctgccgctgccgccgcggcgcgggcgctcgcggcgagggtgacgacgacagggggttacaccgcgtctgcggcgtcgacggcgatgaggcgggcggccgcggcggtggaagggaagggcgctgcggggatgacgcatgcgaaggacgggccgaggccaaacgtcccagatagaggcgagctgaactctcccgcgccgatggcggcagcggccctgtgcacagtcaacgcgcggcacgacgcggccatgatctccacccttctcagccactc

SEQ ID NO: 38479 - DNA, 373 bp, Oryza sativa
  Clone ID: PAT_MRT4530_42110C.1
atagaggaatttctttcatacgtgggaattcagccgggtatagccaaagtcttgtttacaccggttaaccaatgttaatttggcaaagagagttttgagatagtttcattacaatttacaaattcaggttttgtacataaatgtccacaaaataaacaaaagtttcttacattgcttactagggcaacaaagcaaaacaaattggaatttttactataaaaaaatgatcaagaaacatgtaaaaactagactttttgctgggggaggaaaatgggaatagacatgttcaataatgggttgggattttagctcctatggattgggcccaacttttggggcccccttttttttttaacaaaaatttaacaaaggg

SEQ ID NO: 38480 - DNA, 764 bp, Oryza sativa
  unsure (1)..(764): unsure at all n locations
  Clone ID: PAT_MRT4530_42111C.1
atccccagtcccgcgcaaccttcagctcttcggtctgcgttagctcctgaagaatcgaagcaatggcggacctcttcttcggtggccccttccggcgaatcctctacgggcggcccttcccgccggattgggcgtcggcgtcggcgacggcggcgatggactgggtcgagacgccgacctcccacgtgctcaggatcaacgtcccgggactgggcaaggacgacgtcaaggtgcaggtggaggacggcaacgtgctcaccgtgaggggcgcggcgccgcacgcggcggcggagaaggagagggagagggagaaggatgtggtgtggcacgtggcggagcgcgggcggccggagttcgcgagggaggtggcgctgccggcggaggtgagggtggagcagatcagggccagcgtcgacaacggcgtgctcaccgtcgtcgtgcccaaggagcccgcgccggcccggcccaggaccaggcccatcgccgtctccagcaagctctgatcctgatcaagcccgaccctttgtgcattgtgcgcaagtgtttctgtgtttgtgaactgtagtcgattatagccaaccatcagtcgaatgttgtgaagggcgaatgtgtattggaagtccaaatcttaatgttgaaaattttgaaaaattttagaggtttgaattactagtatatctatgtaataatctaattaataaaggtgggtcttctgcaaaanccnanaaaaaaaaanaaaaaaaaaaaaaaaaaaaaaaaaaaaa

SEQ ID NO: 38481 - DNA, 384 bp, Oryza sativa
  Clone ID: PAT_MRT4530_42112C.1
atgggtggtggcgacgggtggagacagtgcggcccatcggcggcgatcgcatgcggcgggaggagcggcggccgccctgaggtgaggtccggccggccgcctccctgccgtccgggacgcatccgcctccacgctgccggatctggcggtggcgaggtccggccggccgcctccacgctgtccgggccaccgcccctcctacccctgccggttagcagccgcctccactccaccggatctggcggaggcgaggtccggccggtcgcccccacgccatacgggccgccgccttgctgccgcgcgcccgcgcccctcgccctcggccacgccacgctagcgccggagagtggagaagcggagtcggagggagacgcagaccggtag

SEQ ID NO: 38482 - DNA, 147 bp, Oryza sativa
  Clone ID: PAT_MRT4530_42113C.1
atgaagttttcctggggccacatgaagaccgagtgcatgttgattcttatctgggttatgttcgactcggccctcaccgtgaagatcatccttggaatgctgctcaccgtgatgggtatggtgcttttttacttcttcctcctttag

SEQ ID NO: 38483 - DNA, 333 bp, Oryza sativa
  Clone ID: PAT_MRT4530_42114C.1
atggcatcaccgtcacgtttcccatcttctttcccatctttggtgccatcccatcgctgctatggaagcaaggagtccgggtctgagccgtcggagctgaagcctgaggcatccaagctggagatggactcgatgaacgcgacgcgggcgaagggcggcaacatgatgaagcaggaggggcacacggcctgcgcgtgtgcgatggccaccgactccgccacctggggaaacacgtgtaggcacttcggcgtctccactgcccagccagtccagccactcacctcacccccgaggcctagtgcttcctccgcatcgtcgacgaaagtaaagtga

SEQ ID NO: 38484 - DNA, 966 bp, Oryza sativa
  Clone ID: PAT_MRT4530_42115C.1
caacaaagaagctaatcttggatctccgaatcgtttgtttcatagtgccaattcacactaagattccaactgtacatatagcaattaacaacaacacatttactcacttcgaaattactcatcgaatagataatatatatatatatacccctttcacttccatcatctaagaaaatatagatagctgtatacatacaagaagaagcagaagcagcaatggtggtcaagccgcggcggcggtgccttcctcctccttcttcttcttggcctcctctccctcctcctccttggccacatcgtcctccatctccgcggcgagggactcgagcagcacggacttagggttcaccatgggcgggcccttctccctcccctcgagctcgtcgagatcgaaggtgatgagcctgtcccagatccccccctcgaacagcaccccgaccttgccgtcggtgacgcgctgcacgatgccgcagtacatgtggtaggcgttgttggggttcttgacgagcaccaccatcccggggaggaacagcggcagctccggcgccctcggccgctccaccgtggcggcggcggcgagacctttcctgtgcgccggcttggggggaggcgggttcttggcgacgaagtccttgaggccgacctcgccgccggggaatccgccggtgaggcccatcatctccttgtcgaacgcgtccgggtccaccccggacgcagccggcggcggcggtggcgactccgcgggctcgtcggaagaagtggtggtggatggcggcgcggcgggggagtcggaggcgagctccttgcggatgccgacctcgccgttgcagagaccccggccgccgaggaggtcagcgacgcggaaggtcgccgagggagggggcaggcggacgatgcgggggtggtggtggtggggcagcggcggcgggcggaggaaggaggcgggggtggtgggcgccattggtg

SEQ ID NO: 38485 - DNA, 176 bp, Oryza sativa
  Clone ID: PAT_MRT4530_42116C.1
ttggctgaagtacagtggcgtggctgctgctgtacagacactgtgctgcacacaccaaaaacaaggttgatatgcagggggaaatgatatgaatgttgcagtgttggatggcacagtgactggtgatggtgcatggtgatgcatggtgcactggtgatgcagtgaggacacgtgcc

SEQ ID NO: 38486 - DNA, 441 bp, Oryza sativa
  unsure (1)..(441): unsure at all n locations
  Clone ID: PAT_MRT4530_42117C.1
ggccgcttttttttttttttttttggccaaaattatattagaattagcttaataaacacttgtcttgatagttgagacaaaaatcacaacaaaaagaaaatgacagcacttgctcagactgccacatcagattccaaaacctgatctaattaacctaaggaactttgcaaatcccttttccaggaaatgaaacctgcatcaacaccctcaatcatagaaagtttttttttttgaagactccatcatagaaaattggcagctttgtgctccaaaagtctgtagggacactccactagatggaccagctactttcatggattctaatcgggcaaatctcgaattggggaaatccatttcccagccatataataatctttcaaaggcaggntctaattgttggttatgtagcaaaaggtatcatacacatcantcctcctaatt

SEQ ID NO: 38487 - DNA, 125 bp, Oryza sativa
  Clone ID: PAT_MRT4530_42118C.1
gcacgaggttctgctcgtcagtagcaggaagaattcacacaattttctgttcagcaaggacctcttcgtcgtgtatgcttccaccaatcatatttaatgctggctcggataaaagaagtggacac

SEQ ID NO: 38488 - DNA, 361 bp, Oryza sativa
  Clone ID: PAT_MRT4530_42119C.1
aagggaggtgctgccaaatttttttatgaaagtattttggtgattctacataaatctaaggggtctaaaaggttaatgaactggcaatggatatacaccgtggaccgacggtcgaaggagtttattgatggagcacattattttttgagtgtgaccgatgcccacaaacctaagtgttttatatgttgtccaagaaaaaattgcaaaaatcagaagcattattctatatcaagaattcttcatatccatttgttgcaatcgggattcatgccttgctataattgttggacattcagataaaatccatccatagataacccagaaatactactgctaacctcagtgcagcagactgattgga

SEQ ID NO: 38489 - DNA, 796 bp, Oryza sativa
  Clone ID: PAT_MRT4530_4211C.1
ttccacgtgggaagactcgcccgcctcgcctcgcctcgctctcgcgcttcgaatccccacgcgacggacggcccaaccgcgccctcgcctcgccgccatggacgcccccgcgttacctcctccccctcgcctggtcgactatatctccagcctccaaggcctggtgcgcctgggggacctcgccgatctcgagccggacaagtccgtggtagttgttgtctccggctgttacccgctcgaggacgcacctatactgttcgatgatttgtctgcgagggagacctggtgcgtgatcgggatgccggagctttgtatcctccgggcgcgtgccatcagtcttttgcagcggcgggaagatctcagagctctcgtccgggacatgggacatgacttgctggtctgcgggacggagtcaggcaaggtcgagggagttctcgcgagggcactgaagcttccagcaggcatggatgcaccgcccgggatcagcctcgatctggtgggagacgctgacgagggacggcgcttcctccgccgcgacattgcccgcgcgcgtctgcagctcgccgcgctcgcgggccacaccgagcggcacatcctgaggcggctcgggagggagctcgcactgcgggcgagcaccggagtcgtggctccgcaggagctgtggccagacatccaggagcagaggcttcgccacgcgccacctgactccacatctgatgcggcgttgtatgcagaggctgcagaggaagctgcttgggtcgctcctgcgggcactcctcccgacagcgatgcctag

SEQ ID NO: 38490 - DNA, 468 bp, Oryza sativa
  Clone ID: PAT_MRT4530_42121C.1
atggggatgagctcaccggtgaacacggggagaaccggaggagctcgacggtggatggaacaagctcgaccacgccagtactgcaaccacgaggaggagcttgacggcggaggaaacgagcttgagctcaccagcaccatggggaggagctcatgctcactgctgggcggcgccataggtgggtcggtaggtggcgggctggggttgttggcgggcggtggcgtcgagcgttgtggtcgaacgctgggggagagcagcgacgtcgggcactgggggtgggtggtggcgacgctgcgtcgggcgctgggggagagcagcgacgtcgggtgctggggtgggtggcagcggcgccacgaacttgtaaaatcaaagattattggttttgatatttggaatattattctcgaagtggttttggagatgattggatttgcaggtgaattgataccgggagagtatttgcggtga

SEQ ID NO: 38491 - DNA, 636 bp, Oryza sativa
  Clone ID: PAT_MRT4530_42122C.1
gaccgggaaacagggggggagacccccacgggagttttcattaattaattcttgcttgcattaaccataaacaaaccggttcaaaatagccttacaatccaactaatgatgctaaaagaaagggataaaacattttaacaaacttcaactaatgttgctaaaagaaagggataaacagcagctctaaacaaccgggccacctggtcctgtacctcgtccggtaccgagctcatcccaccgattgcgccgatggaagggaattccccacataacatgggataggattgctctttcatgtacattaagtctataaactaaaagggagaggtcattattaaagagtaccctccaagaggaaacagaaggggggacattatcaacttcagcttcagtccatggtttatccaaacccaatatcaacttcaccttatattaggaagtgttgggggacagatggccatgatgggaccaatcactggtaatcgttaacttaaagtatgcactcggtttgcacccatcgttaaaagaaatatttatcatgggtaactagaggaaactagctccaatggcctaggcagcaattagtttaagggttttttaagaattatctcagggtcatagaagtgcactggactt

SEQ ID NO: 38492 - DNA, 527 bp, Oryza sativa
  Clone ID: PAT_MRT4530_42123C.1
gtttcggaattttggggttcgcccggggttccggttttacggaacttgccaagaaggcatgccccccaatggttaatcccgtcggccaggcccccagtttaacgatatttggaggtcagccccggggttcaagtgtaaacggaacttgtccagggaggcatgcaccccagtgggaggcatgcaccgcagtggtgaatacacgtcgaccaggctccagcttaacgatatttggaggtcagcacggtgctcacgtgtcgacggaacttgtccagggaggcatgcaccgcagtggtgaatacacggaggcatgcaccgcagtggtgaatacacgtcgaccaggctccagcttaacgatatttggaggtcagcacggtgctcacgtgtcgacggaacttgtccagggaggcatgcaccgcagtggtgaatacacgggaggcttgccccggcagggggtgaatacacgtcgacctggaggatgcctgctgctcgggtacttggaggatccttttaaattacccaggttccag

SEQ ID NO: 38493 - DNA, 554 bp, Oryza sativa
  Clone ID: PAT_MRT4530_42124C.1
gatcctccaagtacccgagcagcaggcatcctccaggtcgacgtgtattcaccccctgccggggcaagcctcccctgaacaagttctgtaaacaaagtgagccccgtgctgacctccaaatatcgttaagatggagcctgctggagcctggtcgacgtgtattcaccactgcggtgcatgcctccctgtacaagttccgtcgacacgtgagcaccgtgctgacctccaaatatcgtcgacgtgtattcaccactgcggtgcatgcctccctggacaagttccgtcgacacgtgagcaccgtgctgacctccaaatatcgttaagctggagcctggtcgacgtgtattcaccactgcggtgcatgcctccgtgtattcaccactgcggtgcatgcctccctggacaagttccgtcgacacgtgagcaccgtgctgacctccaaatatcgttaagctggagcctggtcgacgtgtattcaccactgcggtgcatgcctccctccaaatatcgttaagctggagcctggtcgacgtgtattcaccactgcggtgcat

SEQ ID NO: 38494 - DNA, 250 bp, Oryza sativa
  Clone ID: PAT_MRT4530_42125C.1
tcgttgacgcctgggaccactcctggaccggtgcaagagtcattgaaggcgctgggctacaaggggcaccagggcaaatgtctgccacagtaaacgcttcgacgagcttcgatccgagcgccacctagccgcacggcggggaattggaccgcatcgtccgacggattacacggccgctgacccggagattgccagactgtggccgtctggggcgcatggaggcggtgcccgacaagcatagccatgccgt

SEQ ID NO: 38495 - DNA, 168 bp, Oryza sativa
  Clone ID: PAT_MRT4530_42126C.1
atggaggagaaactatttgagctcgcagacaccgttcacaagtatgatgacgcacgtagcaatggcaatgggttgcagcagcgtggtagaagctccattgagcccctcatcggcaacgaggaggtcgaccccaacaaagttgtcaccgtctccgcgcgtcctaagtag

SEQ ID NO: 38496 - DNA, 462 bp, Oryza sativa
  Clone ID: PAT_MRT4530_42127C.1
atggccacctccgaagcaggcaagggggcagagcaggcgtgtgctgctgctgcggcggcgacagatggagacgacggcggcgagcgtccaccacggatgattcagatgccgcaggagtacgtcgactgggtgctcgcccagaagagggaggcatactacgagagccccgaggactaccctctcctgaggaccaacaaccccgtcaaggtggatggcctctcggaggaatgggtcgagaagaacagcaagtccgtgataaagacggcaaatctcttgaagaaagcggatgactcgttcgaggagttccagaaacaggtccgcaaagaggtggagaaggggtattacgaggttggaatggacttcttcgtccaaagagctgcgtcccgggcattgtttgatgagcaatgggccaagatagatttcactggcattgacgttgaggaagatgacgacgatgagtag

SEQ ID NO: 38497 - DNA, 402 bp, Oryza sativa
  Clone ID: PAT_MRT4530_42128C.1
tcatcctgttactccgggttggatggcagcagccgaaccgtccatctgcgtctgtcctgatccatatcctccatccatccgccacggattgtccgcttcctccttctcgcgcgatgaacttgcgctgaccatgctggactcgcgctcctcctcgccccgattctcctcgccccgcctcagtccaacggtgctccagccgatgctcctcctcctccaccctattcctcctcgcattccccgttcgcgccgccggagggtcgtccccttccgccgacgccgccatactccaccgatgccctcgctggaaccgatttcttccccttccgccggcaccgcaatccacatcacaggttcacaggtcctcgccggaaccgatttcttccccttccgccgtgccaccgt

SEQ ID NO: 38498 - DNA, 1565 bp, Oryza sativa
  Clone ID: PAT_MRT4530_42129C.1
caagcgggcgcgggcgcgacgcgcgttgcgcgggatggagctcggaagcagtgcgcagcctccacgggcgcagtgcggggttgccgggacgcgcctgggcgggcgggcgggctcgaggttgtggtggggcgtgtggcaggatcctcctcgcgccgccatggatcagaggaaggcgttgttccgggcgaagctccgggagcgcgaggccaaggagaagcaggagaggcgcatcgacccctccctcgtcaggtacaatgaatttgatcagcccatctgcagaatctgcaatgttactctgaaatctgaagcactttggcctgcacatcaagtttcacgaaaacatcatgaggcaaaagccgctgcagctgcatctgctaaagctccatcaggtgcagggtctcgtggcaataaggccaatcatgaacaacctgcagagtctcagaaaccaaaatcttccacattgcctgccaacttttttgaaaaccagggaatgaagaggcatagtgatggcgctggttctgaaggaaggtctgtgcgtcgggaggtagctgatgttcagcaaaaaaccaaagaagcaagcaaaactaagccatctgtcaattttgagaaaataccaaagaaagaaagtcaagccaataccaatgtcaaaggtgttcttccagggaacttttttgactataatgatgaagatgaagatccagctcctactgaggcgaatagtgcacctggaaatcctccaatttcaaatcgcatgcaggtgaaaggtgtacctgatggcttctttgatggcaacaaaaacagcaatggcatgcaacccagtgaaccaagtcaatcgtctaaagccgtaaagagttcagaaacttctgaagtaaaaggatcgctaccagaaggtttctttgataacaaagatgcagatctccgtgctcgtggtatccaacctccgaaaatcgatatcaatgatgcttacaaagaatttgagaaggaaattcaggaggacttgcaggaagttgatgatcgccttgaagaagaggagattgatgctgctgctgagagagaagagtacttgacattagagcaagaggagtataggcagcgggtggatatgctgaagaaacagcttaccgagtcaaaagccgcccgtaccactaaagcaaacagcaaacctgttggtatggacatgttgtcaagcagcgactcatctagtgacgaggaagatgacagcacggattttgctgttgattggagagcacaacatttgaaatgatgtggagatttttgtgattggctacccaccgacgatgacaacatagatctgttagcatcccaccattgtgcatccgtgacaatcagatcccagcacctctaggtttctgcttgaggagaagatgatctctttttttttttctgttgcatcttgtcttttatcggaaaaatgttcgagctaatcatgaattaacacgatgagaatagttttggagaactggtgaatgagtataacccgtgccccgttctctctctctctctctccaaaaaaaaaaaaaaaaaaaaaaaaaaaaaaaaaaaaa

SEQ ID NO: 38499 - DNA, 1359 bp, Oryza sativa
  Clone ID: PAT_MRT4530_4212C.1
atggcggacaacatgccgccggccgtcgacgatgacctccaggagctcatcgccgagctgatggaggccgatctgcaggacccagagctggagcaatccttgacgacagtgctgtctctagccaccaactacctcgacgaccccgaccctccctcgccggagctggccgactgggcggccacgctagagaccaactccacaatcatcgcggatggcttggcgtccagactgctcgacttcaggaggggcctggccgtgttcgccgggacaggccgccccgagaaggcggtgctcaggaagcacgtcgcgtgggtcgacgcgcgccgcgccgacgccgcggacatcgcctccgccgcgcggcgcttgctggagaaggagctcaggtgcttcgcggcgagagaccaccccgtcgatccggaggttgcggagctgatcaccgccatgcgcgagtccaccaaatcgcgtgtcctgcaggactcctccggcggtgatgccgtccgtagggccgggttgttggacatcgcgatcaagttcgaggacgccgtggtggaagagatgaccgcgctgaaggagaagctcacgcgtggcgccgccgtcttctttgcgggcgaggaggagctcgtgcaggcgctgcagaagcacgccgcgacggccgaggcggagattgcggaagcacaagcgttctccgcagtcttgttagccgatgccaaccgaacagcaagtcccgtcgtcgtcgtgcagaagagggcggcgccggagacggagacggagacggaggaggagccgccacgacagaggcgccgcacaggagacgccggagacaagagcagcagtggccgcccaggagggagagagagagcgagaatggagcgcgaggcgcaggggttgagacgcaggaggagcatgggcggccggttcagagcggagatccagattgacccaggcgtcgccattcccagagggccggatgccgggttcgccgccgccgtgcgagagccgctggtgaagctgcagcgccccaagttcgagttcgagcagtgggattgggattacatctcctggcctcacgaccgtctcgacgcgaatctgcagatgagggacagtgatccggaggcgacatttgaggcagacaggaaggcgagcgacgagttcctgcgccggagtacactgcagctgaacaagtgtgagagggatcggcgaaagccggagcagcaggacatggagctggaggaccaagacatgttcgtggcgtccctgcttcatgtcgacgacgagcccaccggatgcaggagcagcagcgagccctggagaacggcagggcaacgcagcgccattactccccacatgggcgcagcatac

SEQ ID NO: 38500 - DNA, 517 bp, Oryza sativa
  unsure (1)..(517): unsure at all n locations
  Clone ID: PAT_MRT4530_42130C.1
ggttcattttattgattcactgccggaggtatatcctgtagttgaggaatgggtggaggatgttcttatggatgaggggaacgcaacaatatttactctcttcgcttgccttgtaactgtcctatatttgcgagagcgtcagaggcgtcaagctgcggccgccaaccctcaacagcctgatggtgcacccaactaatttcaacctttgcatcatgatgctgggattgaagtggacgttaagcttgaggtacatggtcatttattctcagccatatcataccatcaaagttttgtttgatgtctgaagtgttaatggaatgacaacgtccatactgtcatactggaaaagcgggtccttcaactgcaaaatgctgatggctttctgaggttaaaaatcggggtttaaaatgatagctctccttgacatctatgtacactanaattgactaggataagaactgatcatgactgttggatattgagatcatgttgtgggttctaacagagtagtgcttgt

SEQ ID NO: 38501 - DNA, 297 bp, Oryza sativa
  Clone ID: PAT_MRT4530_42131C.1
gaccggccggatctcgggcgcccacgcgtcggtcgttcggcccggtggtccgcatgaaccggcagaagaagatggacgtgagcgcgctgaccctcgccggcccgaccagaaccggaaagacggacctcgcacacggcaacttgccaccatgctaggtaggaaggacccactttgatctatggagggaacagaagagcattccacagaggccacgaaaacaagaggagctgatggaaaatataccatacaagctatccgtcttgcgaataaaacgaaaataaacgtcggcaccatgaa

SEQ ID NO: 38502 - DNA, 243 bp, Oryza sativa
  Clone ID: PAT_MRT4530_42132C.1
tgcttgaaagactgcttgtggacatcttcacagcggcatggctattgctcgtccctcttgtaaaaaatggtatcatcaccattgctcacactattgcagcacgctagcatttgctgtccttgctgacctgctctgttgatctacttgaatgccgtggcattgggctcccttaactgtctcatatacctatctggaaagcgttcttgatggcgtccattatgaatttggcgacctcgatgataa

SEQ ID NO: 38503 - DNA, 163 bp, Oryza sativa
  Clone ID: PAT_MRT4530_42133C.1
aaattgaacaacagaaatccaagcacacaatataatcaagcagctgcatcgatactctcggtatcaaatgcaacatcgtcgtcttcctcacgccgtccacgctgggtgctccttgacacgagcatgagcgccattggcgggctcgccgcgcagcaccagcttg

SEQ ID NO: 38504 - DNA, 1890 bp, Oryza sativa
  Clone ID: PAT_MRT4530_42134C.1
ttttttttttttttttttttttttttttttttttgagtgagaaacgaaaacaagaacttcaattatttatcttctcatagttatactagtagtacttgtcccagtacatcaaatgcttacaagtcacaactcacaagcatatcacttatcactacatgtttattcagtagaagcagaattagtcgcgacaacatacagttgcacccgtaattaattactaccagtacgtacgtcacattacagttacacaagtgacaagtcccatagcctgctcgatgcagtcgtcatctgccattatattgcagttgcaatctctcatccaagtttgatgcctgcagctgcagtctctgcagcattgcattcagaaactcgatacatcgtcacatgtccttgggaatgttcgagccggcgagcgtgacggcattgacgtagtcctgcaccctgtggaacggcaggccaggcagcgccaccgccgccgccctcgccgccatcagcagccacccttcccggcagtaggcgctcctccagtaccccaggtacgcgctccgggccagctcccacgccgcgttgatgcggctcgtcgcgaactccgccgccgacgacgacgagctcccatctcccggcaactccttcaccaccttgaggttgtataagctgtcgaagtggaggcggatgccgaagtggaggaagtgcgcggcggagctctcgtgcggaaggcgcggcagcgggtcgtcgccgtaggtgatccggaagtgcctcttcctcggcctgtccaggttcctctcggcgaacatggcgagcatggcgtcgccgacccgcggctgcccgaaggtgtacacgccggcgagccggtccagcgccgccttctccttgtggtacgccagcaccgtcgcgaacagcaccgccagcgcgccgccggagccatgcccggcgaccagcaccctcgccctgccgttcgcctccagcagccgcttcacggcgtcgcggatggcgtagtaggcgtgcacccgctgcggcttgcccttcacgtgctccacccacttgggccacccgatgttccgctgcgcgcccagcgcgtgcgtgtacgccgcgtgcgcgcgccccagccgcgggatcttgtaccacgacgggtccacgtcggcgcaccaccgcgccacgtccagcgccggcgtgccccggaacgccaccaccaccagctccgcgtccgccgccttgtcgcagaacacgaacgcctgcgccgtgtacgcgttctcgaactcgttccagcagttgaagaactggacgaactccatctgccagcggcgggtgacgacgtcgcggatgaacgcctcgttctcgtacgccaccttggacgccatgacgcagagcgcggcgtggtaccggctgtccgccggcgtgatgctcctctccagatcaaccctcgggtcgatgagcccggtgattgatcggtacgacgccgacttccgatcaggatactccattctcccatggaggacgttgctggcgaggttgagggcgaactcgagcgcgccgccgaggacggcgacgagggggccgactagcgagaggaggaagagctgcaggaggaggttgaggaagatggagaggcggcgccggaagctgtggagctcggtgctggtgaagcagtcgacggccttgttccggccgaccttgggggagaagaggaggtgcaggagctcgtacgcgccggccctgtcagggcgcagcaccatgtagtcattgctgaagcagtagtcgagcttgctcatggcggcgagaactcgatcgatcgattgctagtagagctcgtcgtcgtcaatggctatggatgacaagtcgacgacgacgacgacgacgactccagatatctatctagcattctcgctactc

SEQ ID NO: 38505 - DNA, 514 bp, Oryza sativa
  Clone ID: PAT_MRT4530_42135C.1
gcaacgcgttggctggctattcccctccccttttaccaccaccaccttccccttcggccttctccttctcctcctccttcctcctccttgcagcggccgggtcagggggttgattcgatttcgattccgatttcgcgtctccccagatttccccttccattccgcctcccgatcgctcagacagccaccgcaatccgctctccgaggccaacgtgcgcgcttcgctcgctcgcgggtcgcggcaccactccgcctcgccctttctcttattaattcgcctccaactccgcggttcaaaacctcctcggcttcttcctccaccaccaccaccaccaccaccactccgcgccgccgacgccgccgccgtcgccgtagacgcggtataccggtgattccttgcctgcatttttgatttgctgcttttgggttgggggaggagggctttgtttgtccgcacgcctgcttgctagtttgtcttgctgagcggcgcggggggatcggtggcagggggctg

SEQ ID NO: 38506 - DNA, 361 bp, Oryza sativa
  Clone ID: PAT_MRT4530_42136C.1
ggaacaaggatgttcaaaaatccacccttaaaaccaaagccgggggttagggaaaaaatcccccgagttttggaacaaagccccggaaaggggggtttcaaatccaaggggatttcttccccaaaagccccaaaaatttagcgggctttttgggggggggatggtcccaagcctaaaactcgttgaagggaagggggccgaccttcacaacatggggtctgggcgcccaacatgagaggggtgattagcgtaaaggggggggtaataacaataacttggggggggggggggagggcctggaacgtacccccttcttggggaaggccaaatttgttgtcctcaaaaagggtccttgggggcc

SEQ ID NO: 38507 - DNA, 316 bp, Oryza sativa
  Clone ID: PAT_MRT4530_42137C.1
acgatggaatagcatgtcattaataaataatcagtgttaagttgtcacacctgaaaatatcttctgctcacacatatgtagtggcaaacaagtaatctgatgctggtactatttcctgttacagtaatctgacatcggcaacattttccatttacagccttctatggatgtcttcaaaggcatgcttcatgacctagagattggccgtgccaactctgatggtgctgaccaagggtttcttgtcggctgctacccagacttgcttgatagaccaatgttccaccctcctgagaatggcagcaagctcaacgggaca

SEQ ID NO: 38508 - DNA, 468 bp, Oryza sativa
  Clone ID: PAT_MRT4530_42138C.1
ctcgcacatcgattggtggaacagagtatcccggtcaaagccattagccaccatcccgacgtcttcctccatctcgcatatctctgcaatggcagggaatgcgtcagtgatgcggaggctctacctctctttctacaactggattgtcttcatcggatgggttcaggtgtcgtggtccatgatattggcattgttggagaacggatatgaggccgtctatgctgccgtagagcagcatctgctgttcgcgcagactgctgccatcatggagattcttcactccattgtaggtgagatatcctctttctttataaagaaaataataagtaataagggttggtgaggtctccagtgtcttctactattccacaaatcactggaaggttgttcatgatctggggcatcttgtggagcttccctgaggtaatatcaggaccttactccaagttataagaaggtttatatctt

SEQ ID NO: 38509 - DNA, 2178 bp, Oryza sativa
  Clone ID: PAT_MRT4530_42139C.1
gaagatgacatcattgttcagatggtaaacaaacttggaccaaagaaatggtcaaccattgctcaagctttgcctggacgtataggaaagcaatgtcgggaacggtggcacaaccatcttaaccctggcataaacaaggaggcatggacacaagaagaggaaattaccctcatacatgctcatcgaatgtatggaaataaatgggctgagctgacaaaatttttaccaggaaggacggacaatgcaattaaaaatcactggaacagttcagtaaagaagaaagtcgactcatacatgtcatcaggtttacttacccaagtctcgtgtctccctctaaatgaatactctgcacactgtaattcctcacctgcgttgacccaacaaaacagcgaagacagtggtagctatgctgttcgagaggttgaaaattcatcagtgtgtagtcaatcatcacttgccaaggtttcttgctcccaagtgcacaatgctaatgtggcattgggctgtgatttgcaagtaaatgcgaatgttgacaataatgaagcgcatgattctcaatcttctgtgggtcacgaagcatgctatacttctgtgggggctgttgcaactgctatacctgaggtgcactaccacgtttcttcctctaacttcgatccagatcaacacttgcaagaggagtttgctcaaggattgaatttgcatatgagtatggatgaagtgccaagtaattctagttttgcagacaacccaactatctgtagtatagaaaatcatgaaaggtcattggaaccatatgatgtagcaatggagatgcctctctctatgttaccaagtgattctggagctgagcaaaaactacattttatgtcggaggctgacttcaatagtcctaattgtctgaaatctgaactttggcaggatatttccttgcaaagccttctttctggacctgatgcagttgaaactgattctttttcaagatcaaatcatcaatcggatgtatattcctctcaagcagataatgaatttttagcaccaccctacctattacagacatcaaattcttccagtgtgatggaggctacttatggacagagtccacagatgtcagtaccaccatctcttatctgttcaaatgttatgactgatgtaccttctgataatagatcagaaccaaaagaaatgacagtttctcaggcagaaatggtcacacaatcttccagttcttcaggtgacgctgaaatgtctgctaaccctggtagtagtaatggcagtgatattccttcaatgatggaaaggatacctgaatgtgcggaccaacatgttactaatgcggaagaacctgaagccagtatagagaaagaaccatcggttacaccgagtgctacagcagatgaaaagcaggatgagggagccctattctatgaacctcctcgttttccaagcatggatgttccatttgtcagttgcgaccttgtaacttctggtgatctccaagagtatagtccccttggtattcggcagttaatgcggtcgaccatgaatgtctgcactccaatgagattgtggggctcccctacacatgatgaaagccctgacattttgctgaagagtgctgccaaaagcttcatatgcacaccatcaatactaaagaaacgtcacagagacctcgtgtctcctattccggataaaagaatcgagaagaaatctgggactgaaaaggattgtggggtatcagacacatcctccatcggcattcaaacatgttttattaatgccactaaagatgatgctgttataactaaatcagttttgcgtattgagcgatctgcttcttctaaacctctggaaaagaaacttgagttctctgatgagaacaaggaaaatttggacaacacaattgaacaggcaaaagatggacagagtgcaggaaattacaaacacattgacgagcaggcaaggggggaacggcgtactgcaacaaatataactactacttatgatgatctgccaggcaatttacaacctgcaggtattcttattgagcccaacggtgatgatcttgtttccccagattatgtctgtaaggagggagtgtctgctaaaaagcttgcggaacttattgtggagaaatcttcagcatgcataaatgtggattatgaatatgtgaacatgtaa

SEQ ID NO: 38510 - DNA, 309 bp, Oryza sativa
  Clone ID: PAT_MRT4530_4213C.1
atggcgacgacggagatggcggcgccgccgcgggccccctcgccggcacgcgcgtgcagcaaaaatgtttgcgcgctcctcctcctcgtcatgacatcattcctccgcaacagcgccatcttcagcgacgagctcttccttggcagaagttacggcggcctcttcctcggcagcagcggcagctgcggcggcctcttcatcagcaacggcgccggcgacatcttccttcacagcgacgctggcgacatcttcctcggcggcgcccttttcttcgcagcaaggttggtctcagtcgttgcttccgcttag

SEQ ID NO: 38511 - DNA, 2832 bp, Oryza sativa
  Clone ID: PAT_MRT4530_42140C.1
atgacaagcgacaacggaaaggctccagagaagggtggagaagcttctggaccttcatcagctccccaagaaggtgaaatcagcaatgaaccacaaaggcgccggccgctcagtgggaggaccactggtccaacacggcgttccacgaaaggaaattggacccctgaagaggaagatgacatcattgttcagatggtaaacaaacttggaccaaagaaatggtcaaccattgctcaagctttgcctggacgtataggaaagcaatgtcgggaacggtggcacaaccatcttaaccctggcataaacaaggaggcatggacacaagaagaggaaattaccctcatacatgctcatcgaatgtatggaaataaatgggctgagctgacaaaatttttaccaggaaggacggacaatgcaattaaaaatcactggaacagttcagtaaagaagaaagtcgactcatacatgtcatcaggtttacttacccaagtctcgtgtctccctctaaatgaatactctgcacactgtaattcctcacctgcgttgacccaacaaaacagcgaagacagtggtagctatgctgttcgagaggttgaaaattcatcagtgtgtagtcaatcatcacttgccaaggtttcttgctcccaagtgcacaatgctaatgtggcattgggctgtgatttgcaagtaaatgcgaatgttgacaataatgaagcgcatgattctcaatcttctgtgggtcacgaagcatgctatacttctgtgggggctgttgcaactgctatacctgaggtgcactaccacgtttcttcctctaacttcgatccagatcaacacttgcaagaggagtttgctcaaggattgaatttgcatatgagtatggatgaagtgccaagtaattctagttttgcagacaacccaactatctgtagtatagaaaatcatgaaaggtcattggaaccatatgatgtagcaatggagatgcctctctctatgttaccaagtgattctggagctgagcaaaaactacattttatgtcggaggctgacttcaatagtcctaattgtctgaaatctgaactttggcaggatatttccttgcaaagccttctttctggacctgatgcagttgaaactgattctttttcaagatcaaatcatcaatcggatgtatattcctctcaagcagataatgaatttttagcaccaccctacctattacagacatcaaattcttccagtgtgatggaggctacttatggacagagtccacagatgtcagtaccaccatctcttatctgttcaaatgttatgactgatgtaccttctgataatagatcagaaccaaaagaaatgacagtttctcaggcagaaatggtcacacaatcttccagttcttcaggtgacgctgaaatgtctgctaaccctggtagtagtaatggcagtgatattccttcaatgatggaaaggatacctgaatgtgcggaccaacatgttactaatgcggaagaacctgaagccagtatagagaaagaaccatcggttacaccgagtgctacagcagatgaaaagcaggatgagggagccctattctatgaacctcctcgttttccaagcatggatgttccatttgtcagttgcgaccttgtaacttctggtgatctccaagagtatagtccccttggtattcggcagttaatgcggtcgaccatgaatgtctgcactccaatgagattgtggggctcccctacacatgatgaaagccctgacattttgctgaagagtgctgccaaaagcttcatatgcacaccatcaatactaaagaaacgtcacagagacctcgtgtctcctattccggataaaagaatcgagaagaaatctgggactgaaaaggattgtggggtatcagacacatcctccatcggcattcaaacatgttttattaatgccactaaagatgatgctgttataactaaatcagttttgcgtattgagcgatctgcttcttctaaacctctggaaaagaaacttgagttctctgatgagaacaaggaaaatttggacaacacaattgaacaggcaaaagatggacagagtgcaggaaattacaaacacattgacgagcaggcaaggggggaacggcgtactgcaacaaatataactactacttatgatgatctgccaggcaatttacaacctgcaggtattcttattgagcacaacggtgatgatcttgtttccccagattatggtaaaaacaccatgaaacagaagcaaaacacaaatatggaatctttgtcagtctgtaaggagggagtgtctgctaaaaagcctgcggaacttattgtggagaaatcttcagcatgcataaatgtggattatgaatatgtgaacatattggctgataccccaggcatcaaaagaggactagaatctccttcagcatggaagtccccttggtttgtagatatgcaatttcagggttcatacttcgtcagcccagctaatggaagttacgatgcgctaggattggtgaagcagataaatgtgcagactgctgctgctttggcagaagcccgtgaggtgctggcaagtggtggccaatctgagaacataaattctgataaggaaaacctggagaatccagatgccaagaaggaaccaggagcaacaaccaaattgcaagcaaaaatcaagaccgaggggaaaatcctggatttcaacgaatgtgccacacctataagatcatcagataaaaaagctggcagcagtctgggaagatctttgagctcccctattccttcgtcccatctcctgaaaagttttcgatag

SEQ ID NO: 38512 - DNA, 546 bp, Oryza sativa
  Clone ID: PAT_MRT4530_42141C.1
agcaaacatggtatgatctaaacaatagttatctggtgaccacaaccagcacaaaaattcatttagttttggtgtatgacatccaaaagtggttgctcaatgaatgaatagcaattaccgtttgtctgtcaaacaagtatcgagtgaattgagcaatgtacatgtatgcaaatatcattcagtgcaagaaaatggtgtcacttccaggagggtgtggcggttctgatctgtagattctgaggtggcaagccgttgtgttattactactcattaggttgatataggtcgtggtatctttgacaccttgtgtatgaaggagctgcgaaactgcaagatatgctgaatgatttgatgcagagttttagcacgacttcagaattaacctgttctatgtgcttcatggattcagtgcactaccattatgagacagatgcctttgctttgcttgttggtgtgatctaatgtaaacaacacaatgttgaagtatttgaggccataagaaaagtggcagagttggtataatatatttaatcatcttaagagcaa

SEQ ID NO: 38513 - DNA, 399 bp, Oryza sativa
  Clone ID: PAT_MRT4530_42142C.1
atgggcggtgacctggaggtggcttggaggcgacgtgggcacgggcggcgaccaggagccggcctggaggcggcttggaggcagggggcgccggcctgggggcgagggcgcaagggcgcgcctgcctggacgcgcggcgacaggcgcgcggcgatggggcgcgccacctgggcgcgcggcgacggggcgacggggcacgccggcctggggctacggggtgacgaggcgacaggccgacggggcgacggggcgccggcgaggctaggcgacggtgacggctccggcaaggtgactccaaacttttttgtggcagacaggtctcgcccgccgctgttccctgcctccggcagccgccccgcagccgctgctggcctaaatcggttctgtggctcctcatga

SEQ ID NO: 38514 - DNA, 201 bp, Oryza sativa
  Clone ID: PAT_MRT4530_42143C.1
atggctggtgggccccgtcacactgcgccatataaaacaggggtggaggccggcacggcacgagtcagtgacgggaagcgccaccgcccgccacaccttatcggcaggacatctacgaccctcactcccgcaggcgtcatcggcgtagaccttaccggtgccgcattcacgacaaccgagcgccaacgacgacgattgccg

SEQ ID NO: 38515 - DNA, 159 bp, Oryza sativa
  Clone ID: PAT_MRT4530_42144C.1
atggagcacggaggcaacggcggcaactggccttgcagggtgcccaagcacatgatggaggcggagctgctcaccacatttcaggaggtggccatcgtcgacgaggtcaccgtcatcaaggacaagagacctctttgtgatctgtacacccagatctag

SEQ ID NO: 38516 - DNA, 537 bp, Oryza sativa
  Clone ID: PAT_MRT4530_42145C.1
atgatgcccgggcagcggggcggcgaggcgttgtcggcgttggtggcggtgaggaagagtcaccagtgggcatcgacgtcggcggcgtggatggcgagaggcggcggggacggcgacggtgaagcacagagaggggcgagacgccgggggcagggacggcgagcgacggcggggggaggacggcgcgagacggcggcggccgacagcgccagcggcgccgcgccggtcggccacccggaagctcaggcagccgtgtgctgccgccagcggggaggacggactggaacacagtgctaccgccgtccgccggcgaggtcgagggcgaggactccgcaccgcctcgagtcctcgccctcgacctcgccggcggacggcggtagcactgcgttccagtccgacctccccgccggcggcagcgcacggctgcctgagcttccgggtggccggccggcgcggcgccgctgccgctatcaacgaatgggccagagagcaagcagagacatcgcacttgtggggtctgaggcgaggacggactga

SEQ ID NO: 38517 - DNA, 702 bp, Oryza sativa
  Clone ID: PAT_MRT4530_42146C.1
atgcccgggcagcggggcggcgaggcgttgtcggcgttggtggcggtgaggaagagtcaccagtgggcatcgacgtcggcggcgtggatggcgagaggcggcggggacggcgacggtgaagcacagagaggggcgagacgccgggggcagggacggcgagcgacggcggggggaggacggcgcgagacggcggcggccgacagcgccagcggcgccgcgccggtcggccacccggaagctcaggcagccgtgtgctgccgccagcggggaggacggactggaacacagtgctaccgccgtccgccggcgaggtcgagggcgaggactccgcaccgcctcgacttgctatgccgcattctatatgaatctgttggcaaagttctggtttcagctctgattttaattcttcagactacggatcgattccaatccaacctcgccggcgatggttccgagaaacagcagttgctgggcgatgggaccaacagcagacaccgaggcggtgcagagtcctcgccctcgacctcgccggcggacggcggtagcactgcgttccagtccgacctccccgccggcggcagcgcacggctgcctgagcttccgggtggccggccggcgcggcgccgctgccgctatcaacgaatgggccagagagcaagcagagacatcgcacttgtggggtctgaggcgaggacggactga

SEQ ID NO: 38518 - DNA, 2691 bp, Oryza sativa
  Clone ID: PAT_MRT4530_42147C.1
atggcgtcggctttgttcctttggctttcatggcttgtgctctccctcctctccatctacctcctcgatctcctcgcacactcccgccgccgcctcccgccgggaccccgccctctcccgctcatcggcagcctccacctgctcggcgaccagccacaccgctcgctcgccggcctcgccaagacgtacggcccgctcatgtcgctccgcctgggcgcggtcaccacggtggtcgtctcctcgccggacgtcgcccgcgagttcctgcagaagcacgacgccgtcttcgccacccggtccgcccccgacgccgccggtgaccacacaaggaactccgtcccgtggcttcccccggggccgcggtggcgcgagctccgcaagatcatggcgacggagctgttagcgacgcaccggctcgatgcgctccacgagctccggcaggagaaggtgtcggagctggtggaccacgtcgcgaggctggcgcgcgacggcgcggcggtggacgtcggccgcgtggcgttcaccaccagcctgaacctcctctcgcgcaccatcttctcgcgcgacctgaccagcctcgacgaccgtggcgcgtccaaggagttccagcaggtggtcacggacatcatgggggcggccggaagccccaacctgtcggacttcttcccggcgctcgccgccgccgacctgcagggctggcgccggcggctggccgggctgttcgagcggctgcaccgggtgttcgacgcagagatcgagcatcgcaggcgtgtcgccggagaggagcatgggaaggtgaaggacgactttctgagggtgctcctgaggctcgccgcccgcgacgacgacacggcggggctcgacgacgacacgctccgttccacgtcggtaattgataatgggatagcacaacttaaaaagcccaatgtgacctggatggcccacggttggtgggccaggctacgcactctaataagtggtatcatagctcagtttcttccccagtactgcaatggcggctttgtttctttggctttcatggcttgtgctctctccctcctctccgtctacctcctcgacctcctcgcacaatcccgccgccgcctcccgccgggaccccaccctctcccgctcatcggcagcctccacttgctcggcgaccagccacaccgctcgctcgccggcctcgccaagacgtatggcccgctcatgtcgctccgcctgggcgcggtcaccacggtggtcgtctcctcgccggacgtcgcacgcgagttcctgcagaagcacgacgccgtcttcgccacccggtccgcccccgacgcctccggtgaccacgccaggaactccgtcgccttgctgcccaactcgccgcggtggcgcgagctccgcaagatcatggcgacggagctgttctcaacgagccggctcgacgcgctccatgagctccggcaggagaaggtggtggagctggtggaccacgtcgcgcggctggcgcgcgagggcgcggcggtggacgtcggccgcgtggcgttcaccacgagcctgaacctcctctcccacaccatcttctcacgcgacctgaccagcctcgacgaccatggcgcgtccaaggagttccagcaggtggtcacggacatcatgggggcagccggaagccccaacctatcggacttcttcccggcgctcgccgccgccgacctgcagggctggcgccggcggctggccgggctgttcgagcggctgcgccgggtgttcgacgcagagatcgaacatcgcaggcgtgtcgtcggaaaggagcatgggaaggtgaaggacgactttctgagggtgctcctgaggctcgccgcgcgcgatgacgacacggcaggcctccacgacgacgcgctccagtcaattttcacggatttgtttgctgctggaagtgacacaagctctagcactgtagaatgggcgatggcagaattgcttagaaacccattaccaatggctaaagcatgcgatgaactgcaacgagttattggatccacaagaagaattgaagaatctgatattggtcgactgccctatttgcaagctgtcatcaaagaaacatttcgattgcatccacctgttccatttttattaccacgtcaagctacaacaacaattcaaatattgggctatacaatacctaaaggtgcaaaagtgtttataaatgtctgggctatgggtcgagataaagacatatggccagaggcagagaagtttatgccggagagatttctagaaagggcaactgactttaaaggtgcggattttgagctcattccattcggagctggaagacggatctgccctggattgccattagctgttaggatggtccatgtggttcttgcatcactactaattaatttcaagtggagactcccagtcaagttgcttcagtccaaggagaaggataggtctgatttggcatatgttatcaatgcagtcaaggatcttatgggcgctgcagccgccaccaccgccaccaacctcaccatccttccttctcctagggtgaggaaatccaagtgtgaggaagcccatgttatgcccaccaccgcaaagctccacacccccgccaccacaaagcacggcctcaccgattatgtcgctagttgtgataatgaagcccacattcaagataacaagtggccacctagctga

SEQ ID NO: 38519 - DNA, 356 bp, Oryza sativa
  Clone ID: PAT_MRT4530_42148C.1
cctcccccaaggccccacgccggtgccccataatgataatagcgggaacagctaatcttaaatacttacggcatcccgggttctgtaccacggacggtcctggatcaggaactacagcagcatctggggtcagactgatgggtctaatcgcaccctcagaccccaaccccacttgaccttgggcaagttacctccctaggactcaacttcctcatctgtgaaatggggacgctaggaacaaccatctcctaggattgtagtgtggattaaacgaatagtcataaaatgcttatgtttcattctcctcttccctatccatttctctatccagacccctctcctcaaatctcattcct

SEQ ID NO: 38520 - DNA, 401 bp, Oryza sativa
  Clone ID: PAT_MRT4530_42149C.1
atatgcaatcatattaataaatatcatagccaagcaaatgcaatcacagtgtccctaccactttctttcttacaataaggaggccaaaataatcatctccattgcaatgtcattagtaaccaggaccttggctcctgactgttgtttcctctaaagttttgtttgtccccatattacctcagctcttgttgctatgatcccaaaaggaaataatttatgacataaaatttggtagatttacttgaggcaataacagcgctaagttattagacatacaaagatttccttgtacaataccaagaaaaagaaatgcacaaattttcatgacactcatctatttcagcataataaagtgctatctgaagcatcaacttgcataatgatctatatatcttattatt

SEQ ID NO: 38521 - DNA, 187 bp, Oryza sativa
  unsure (1)..(187): unsure at all n locations
  Clone ID: PAT_MRT4530_4214C.1
gtggagagagtgagcaaaagctagagagagagagtgagtgagagaaagagagatcaagtgagtgctaccttgttgcttggttgctagtatagctagcttgcttgggtggaagatcatatcagcatatcaagggagagggaatatggataggggagccctccacanaccatcagctctagcgggggag

SEQ ID NO: 38522 - DNA, 404 bp, Oryza sativa
  Clone ID: PAT_MRT4530_42150C.1
agacaaataatattctttttttttctttatactagcataatgtacaggtccaactgatatttgttaagtaggaaaaaattaacaaatgattacatttatgttgatacatcgagtcatcaactgcttgatacattactgtgcaagaaactacactgttttacaatgaaataattaaattcagcaagctggagtatgacggtttgtctacattcctgtgccactcgagctcttgaaatgcggtcggagcttgagctacttgtttagcttccagcatatccatcatgaatgcctcattagctgctacaagactttccaaagcagtaacacaaaacatgggataggaaaaaaaaaggaaacatataaagtgcgaattaaagacaaatcatgaattacagctggtaatg

SEQ ID NO: 38523 - DNA, 358 bp, Oryza sativa
  unsure (1)..(358): unsure at all n locations
  Clone ID: PAT_MRT4530_42151C.1
cctgtggagcggtacgccccgcccgctcgtgccctcgcacagcccgtggaagggttttcccaaaaatcgtcctccaaaatcgcggcaacaaatcaacgaatcgacagcagccgtcctcctgcttctcntcctcttccttgcggcggcggcggcggcggctgtcgcacgagcaggtggcagccggtgccgcgcggctcctccgcggggtccggaggcgtggaaggagcaagcggcgtgggcggcgcggctcctccggaggccgtcgtcgaagaagagagcgccacctcgccaatgcangcaccccaacccggtgctcacctcgnctgcttcttcctcaccgcccgttcttaagccgccg

SEQ ID NO: 38524 - DNA, 261 bp, Oryza sativa
  unsure (1)..(261): unsure at all n locations
  Clone ID: PAT_MRT4530_42152C.1
gaacccaaccccaacaacactcttccgctcccaccccccgcacactccccgtatttnggaacacgtccccgacggcccgactgcngcacgcgggaggaggccgggtaattacgggcttagtccgagggggagaacgcaaaaanaccaggagaagacgaccagggagcgcacggcaccgcctcccccccacctcgccgccggggtncttccngcngccgnctgccattgggagacgtgggctggaganaggcgggagagcgc

SEQ ID NO: 38525 - DNA, 672 bp, Oryza sativa
  Clone ID: PAT_MRT4530_42153C.1
atggcgtcatcgacacaagcactaggcatctctttggccctgacgatcccgctacccgcgcaagaatcggtgctcccaccacctacacccaacacgcttgtttgtgtgacacccgcgctccctaccctgatgtctggcgctctcagcatcccaaatgtcaagatggacatgtccatcgtcctcgacataaaatttttgaactacaccaacaagtttggcttgctaagccacatgttcaagcctcctcctccactcgacactgccaggatctgggcgcaaaaggacttcgctgtactcatcgccctgtactactccatcggatgtcctcaacgtcatcatagagcccatgatctccaaccacacccttgtcctcaacttcatccacggcctcagccctcacttcaccacccaggcataacttctgcatctgcaagtcgcctttcccaccttcacaagtgtccgctcgacgcttcttctagcggaaatgcactgtcccaccaactcttcgctgccacctcgaccagccaatcaaactccaccaacaaagggaaaaatggcaagggaaagggcaaagggaggagtagcggtggcaatggcaacactaggaatagccgtgatagtggtagcgatggtagaggcggtgattaccctaggtctggcagccagaagtaa

SEQ ID NO: 38526 - DNA, 109 bp, Oryza sativa
  Clone ID: PAT_MRT4530_42154C.1
tttattcgcctatggcgttaatgagcgtgaagtaccccctggcgagacccggggattggatgggaatgggaaagtggcctgcccacgttatatggactattttgcagac

SEQ ID NO: 38527 - DNA, 204 bp, Oryza sativa
  Clone ID: PAT_MRT4530_42155C.1
atggttgtcaaggcgtcgccaaagcgtcactatgacagtaaggcgctaccaggagtcagtgcgtctagcccgccttaccatattgcttatggtgtccgccttatacccaatgcgccgttatggcgtctatatcgcgtccttggcgctacaacagctaaaggtgacgccacaggaagtcgaggacacggtttttgccccgattag

SEQ ID NO: 38528 - DNA, 1077 bp, Oryza sativa
  Clone ID: PAT_MRT4530_42156C.1
atggagcttctagcatacaaggaaggaattgctttggcgattcaatggactctaaaaccgatcgtggtggaatcagactgcttggaagcggcgcatgctaaagttggggtggcggcggcagaaatattagtcccacggcgaccggtgataacggggaaagggatgtggcacctgcaactcttccacctgcacgactctaggttggataaggtgttcattgttgttgcattgattatgttcgcctaccgcgagatcaccatggtctggttacgggtgctgtcgcctcctagctggactgccctctcgccccccgtggcagctggctctagggttggtggccatcttccagtgctgagtatggatttctacttcttctcctcgtcggcgccggcgccggagaagaagacgaggcggcagcagcagcagcagcagcagcgggagcaggaggggggtggaggagggaacgaggcgagatacctcggcgtgaggcggcggccgtggggccggtacgcggcggagatcagggacccggcgaccaaggagcggcactggctgggcacgttcgacacggcggaggaggccgccgtcgcctacgaccgcgccgcccgcaccatccgcggcgccgccgcgcgcaccaacttcgcctacccggacctgcccccgggctcctccctcacgccctacctctcccccgacctctccaccaacgacctccaccgccactactacggcgccggcgccggcgccgacacccagaccgccgccgcgctgccggcgccggctcagcccgcacacggcggcgacgcccaggaaatggcttacggtggcggtggcggtcagaatgtgggtggcgtgttcgacgtcgtcggcggcggcggcggcgcggcgtggtgcgacgcgtcggagctggagttcggcgggtacgacgacgcgggcgcgtcggcggcggcggcggcggtgtacttcgaggaggggtacgtgcacagcccgatgttctcgccgatgcccgcggccgacgaggtcgccgccgacggcttccagctcggcgggtcgtcgtcctcctcgtattactactga

SEQ ID NO: 38529 - DNA, 419 bp, Oryza sativa
  Clone ID: PAT_MRT4530_42157C.1
ccgccctcttttttttggtttttttaaattttttgggttttaaatttcttttttttttttttttctttccaaaaataatcatcacctttatccaattaaaattcccatttttaacctttctaacccagggcatccataaaaccccccctccttttattaaacaaattcaaaatactcaccaattgtttctagcctattaacttcataaggtaggggcacaataattggtccaaacactaaatactctgcttaaaaacacattaattgcaacataaaagcaatctaataaaaatttgtccccccctccatcaattccttcaaaaaggaaaacaaaccccaattatttccattccctaggagcccccaatgctccaaaatttaccaaaaactttttacctttttagcctttaacccattat

SEQ ID NO: 38530 - DNA, 170 bp, Oryza sativa
  Clone ID: PAT_MRT4530_42158C.1
tgatgtctaatgatgcgatactggggtgagctcaacaaaatcctggacggccccttcgatggtgggaagcatcgccttcccgccaatcctgaaccatgccgccgtaattggatgggaagcgctcacaatggacctatcttctttcctggtctttggcgtcccaatcctgt

SEQ ID NO: 38531 - DNA, 785 bp, Oryza sativa
  unsure (1)..(785): unsure at all n locations
  Clone ID: PAT_MRT4530_42159C.1
ctctcgccaatctcacttcatcctcctcctcccatcatggcggcggcgctcgcgttccccacctgctgctgctgccgccgcccctcgctgcgtccttccgcgggtcgccgcggccgtcgccccgtcgcccgctgcacgctcccctcctccgagaagaattcatttagctggaaagaatatgcaatttctgtagcattatcggctggattaatcactggcgcaccaacgttaggatggccagcacatgcttctcctcttgaaccagtgatcccagatgtttcagttttgatctctggacctcccattaaagatcctggtgctttattgagatatgctttgccaatagataataaagctgttcgtgaagttcaaaaaccactagaggatatcactgacagtcttaagattgctggtgttagagccttggattcagttgaaagaaatgtaagacaagcatcgagggcactgagtaatgggaggaacctaattcttggcggtcttgctgaatccaaaagagcaaatggggaggaattattggataaattggctgttggacttgatgagcttcaacggattgttgaggacagaaacggggatgcagtagctccaaagcagaaagaacttctccagtatgttggaactgtagaagaagatatggtcgatggattcccctatgaagtgccagaagaatacagcagcatgcctcttctcaaaggaagggctaccgtggacatgaaggttaagnataagggcaatcctaatttagaggattgcgtatttcggat

SEQ ID NO: 38532 - DNA, 636 bp, Oryza sativa
  Clone ID: PAT_MRT4530_4215C.1
gcagaaaaagtttattgcaaaaaaaaaaagacgatgtttctcagtttcgatcattcaattacaagaaatcaagaaccagccgtaaactcaagacttgacattgggggggctaatagacaagattaggctcaaactcggcgaaatcaacagagccagactcaacaggaggcatgagataagcagccaagatctcagaggctaaagaagtaaccaaaggaatcctcttgagggtcttgatgaaggaagcatcatctgtttctcctatagccagcagcttctcatagctcacaaccattctatccagtttcctcttgaactcagggggctcaacatccagcaccgcagggaatattcttgccggggttcggtttgtctcgatgatgacatgcatatcgaactcctttgggtttaacccgataccctcgtaaaaattagttctttggcagtcattgaggtacattgtcacataaaccgagaggcagaagaagcgagaccagagcttggcttgccagtcattgaggaactgaggctgagctttcttcaaagcagagaagaaataccatgacggttctcgtcttgacaccagttctcaaagtacttgaagattgggtaacattggaactcagggttttcctt

SEQ ID NO: 38533 - DNA, 303 bp, Oryza sativa
  Clone ID: PAT_MRT4530_42160C.1
atgaagttcctggagcaattgccgcaaccggcagcacttggcgacggcatgggcaacaacacggacgccagcgatgctcctgtactccgaagggtcggcaacgggcaagccgtcagtggtggagagcttggcacgagtgtccactggtgtcgaggtagagtggcactcggccatgccggcccgctggagaagatccacagcatctggcgttgcgagaggaagaggccgccaaaggaaggcgtgacggagacgccgagaaagaagtggagggcaccaaggtctgtcatggcaaactcggtgtga

SEQ ID NO: 38534 - DNA, 1611 bp, Oryza sativa
  Clone ID: PAT_MRT4530_42161C.1
atggcggcggcgctcgcgttccccacctgctgctgctgccgccgcccctcgctgcgtccttccgcgggtcgccgcggccgtcgccccgtcgcccgctgcgcgctcccctcctccgagctaaacctttttcttttgcgaaagattagatttagttggcaaactttcctatgcttgttcttggttgtagcaaatacggaaccatccaggcatccaaagaattcatttagctggaaagaatatgcaatttctgtagcattatcggctggattaatcactggcgcaccaacgttaggatggccagcacatgcttctcctcttgaaccagtgatcccagatgtttcagttttgatctctggacctcccattaaagatcctggtgctttattgagatatgctttgccaatagataataaagctgttcgtgaagttcaaaaaccactagaggatatcactgacagtcttaagattgctggtgttagagccttggattcagttgaaagaaatgtaagacaagcatcgagggcactgagtaatgggaggaacctaattcttggcggtcttgctgaatccaaaagagcaaatggggaggaattattggataaattggctgttggacttgatgagcttcaacggattgttgaggacagaaacagggatgcagtagctccaaagcagaaagaacttctccagtatgttggaactgtagaagaagatatggtcgatggattcccctatgaagtgccagaagaatacagcagcatgcctcttctcaaaggaagggctaccgtggacatgaaggttaagattaaggacaatcctaatttagaggattgcgtatttcggattgttctggatggatacaatgctcctgtgactgctgggaacttcttagatctggtggaacggaagttctatgatggcatggaaattcaaagagctgatggttttgttgttcaaactggcgatcctgagggaccagctgagggatttattgatcccagtactggtaaagttcgtacaatacctcttgagttaatggtcgatggtgacaaagcgcctgtatatggtgaaacacttgaagaacttggccgctacaaggctcaaacaaagcttccttttaatgcatttggaacaatggcaatggctagagatgaatttgatgacaattctgcttctagccaaatcttttggttgttaaaagagagtgagctaacaccaagcaatgccaatatactggatgggcggtatgccgtatttggatatgtcaccgagaacgaggactacttggcagacctcaaggttggggatgtcattgaatcgattcaagttgtctcaggcttagacaacctcgccaacccaagctataagattgtaggataaaatgtttctttttttcaggagttccttgataggcaattattttaccatattgaaatcagtgtaaagtgctataatctctaaccctcatctcatgaccttctatgttttgtgagttttgcaatatgcgggattcaatattacttgaaagtaaagacgttcaccccttgtctctaaaaataaaaaaaaaaaaaaaaaaaaaaaaaaaaaaactcgagactagttctctctctc

SEQ ID NO: 38535 - DNA, 343 bp, Oryza sativa
  Clone ID: PAT_MRT4530_42162C.1
cggaccggaactgaatgttcggctcagacccacccgttttattttacgttcattaacactgttaaggatggctatgatgagacacatgcacagcgttgagaccaggcattatttcttgagcttttatgctaaatgctaaagatcaggagctcattagaacattgtgctgtttctatatcacgggagctagatgttgatgatcacacgactagatctgcactgctgtatatcatattaggaagtgaagaagcatacatctcaggcagcataatataaagcgagtcgcatatccagactgacaacctatatgttgtggattatagatgcaacattgactttcaat

SEQ ID NO: 38536 - DNA, 4198 bp, Oryza sativa
  Clone ID: PAT_MRT4530_42163C.1
atggcggggagctcgaggcccgacctcggcggtggcgggagcttccgcgagggcccgcagctctccggggcgggaaccccgagggcgctggcggagccgcccccgctggcgcagtacctccccctggagtcgttccccgtcggcgaccacaagcagtcgcgcgccacggagcttcggcgggtgctcggcgtcaccgtggaggcggagcagtcgttcgggctggtgcagaccaagccactcccttccatagcgtccgaggaactcaagcggatccgtgggggcgtcgtggagtcgtcggccaaagccaaggagaaaaccaagtcgctgcaggattctattcagaagctggataagtacaggaacgttgtcacgcggaggcggcagaggagcgaaggaggtgcgactgagaggtcatcagggagtgggtcgggttccctgaggatgggggctcagaacagtatggataatcctggccagcggctggaggagagggctaagagtgcgaccacaagcaagcgtgtccgctcatcgctagcagcagatgcacggttagaagggcgtggtaatgttcctacaaggcaaggtcctctggcggacagtgagaaaagttcctctttggagaaggaaaaaaactctttgaggaatgtcaatgctgcatcagggttttctgaagacaaattacggggcctagctcctggaggtgaaggttgggagaaaaagttgaaacgtaagcgctctgttggaactatgctgaacagaggcaatgacgtagaccgagatgttaaaccgttggttcaacatagaccaaacaatgaagctcgcatgcgatctagtgatggtcttccaattaggcatggagcttctgctggagcattaggaggaagcaagatggatggaggttctcaacagagtaatgcaggttcccgttatctactgaaggcagacatggactccacttctcttccaaatgaaagaagagagcgccatttagggatagacaaagaacgggttttggtgaaaggaaacaaggcaaatacctctgaggatatgcaacctggaactttaaatcctctgactaagggcaaggcatgcagagcaccaagaactagttcccttgttgttatgaattcatcatccactcttcagcgctcatctggaggaatcgatgaatgggaagaaacaccatccaccaataaatcctctcctttgggaggcactgcaaatcgcaagcgtcccatgactgcaagtgggtcttcacctcctgttgcttgggtgggtcaacgtccacagaaaatgtcacggacaagaagagcaaatgttgtttccccagtctcaaattttgatgaaggcctatctgaaggatcaccacttgatgctgctgttagaccagcggtagagtcacctggccttttgcttccaaggggtgtagctagtaataattcacaagttacaccaagaatggataatatttcatctccagctggtctgtcagaaagcgaagactctgctgctacggaaaataagaacaaggataaaatcagtaatagtggtgattttgagaacgagggcgcaaattcagcccataattcagcagacttaattatctcatcgaagaaaagcaggatactgttaaaagaagagcttgaagatggaagtattcgacggcaagggaggagcggaagaaacactatgcatgttaaagggtgtgcatccatgccaagagagaagttggacagcccagaaacaagaaagctgctgaagagcggaagacctgtatctgaaaagaatgaaagtaagttgggccgccctccaacgaagaagggttcagaccgcaaagcatcatctcgacactcggagatcctaaattgtgggttaacagatatatcaggtgaatcagaagatgaccgggaagagcttctagctgctgcaaatgctgcgcgcagtgccattgttaatgcatatgctggtccattttggaagaaaatagaaccgatgcttactttcatcagctctgaagatttatctttcttaaagcaccagattacatttttggaagagcttgagatgggcatgtctaagtcatccgatgaacataatttgaacacatcaactaactacagtgggccattatcaatgggtcaaaattcatctctgcctcagtcaaattcatgtgtgtcattggagcaaagcgaagcaaatggacccaggacaagagaatctattgatattttgtctcccaatgatgaaaacactgcatctcaaaagacacatgcagaagaattgtttggtggaatggcttccttgacacacaaactcttctctgcttttattgtagaagatggtgataattcttctgaatgcaatggaggagatatacttcttgagttctcaaatgacttccttccttatgctgccaacatgaacttagaaaatgattttgaagctagtgcagtaaaatccaactttggatcaagtcctgatttcaagcactcaaaccatagctcagtgcataacagcatgtccaatggttttacagcttccagcaatttgagggcctcatatagtccaaattcaatttgcagtgagaatgcatcggatgcgataaaatttgcagtatatccagaaaatggtggttttcatgaatttgtgccacatatctcacaacagtatcaaaactgtgcaaaaagtacgcctttaccaccatatgaatatcagtatgaccagttgcctgtgcatgacagagctttaatcgagctgcacagtattgacctttgtccagagatgctgaggggtttagaggtcttgaggataggaaagccaaagctggatgatggagaggatgaggacattgataaagttattacggagctgcagaaaagactgtttgagcaggcttcaatatcacataaaatttgtatgagaacacctacatttcattgtgatgtttcctggacagtatttcttttgttacttccagatgtattctgggaaattgatgtgctttttctaagagttaacacctatttaacacttgtgctcctcgacttatttcaggtgaatcaaaagaagtgccaattacataagttggacaaagcaatccgtgatactaaaaatatggaggagaggagtctggagcaacatgcaatgaacaagctagtggagatggcatacaaaaaactgatgggtggccgtggtagttctagtcataagggtggtctcaataaagctgctaataaggctgcaaaacaagttgcattggcttttgccaagagaacacttgcccggtgccagaaatttgaggaaacagagaaaagctgcttcagagagcctttcctttggaatgtgctgtctgcacctttgccaaagaatgatgcaatagatggtggtctcccaggatctgcagataggccaaagcttttaaagcttgacagaagtccattgagccaaggtactacaaaatggaaaaagagtgaccgagaaagggatcaaaacagagacgcgtctttgaagaattctaattcgaaatcaggacgcaattcgtccggcaatgcaaggagtgagcgtaaaactaagataaaaccgaagcaaaagctagcacagttgtcgacatctggaaatgttcttggaagagttacggagccatcaaatttcgcagcacccggccagagagaatcccatgattggacgagtacgtcgagcacaagacctactcaaccagtcagaaacagcgcagctactgttgcccaggataccttagatgctccattggcaaatttgcctgcaatagatccaatggacatcttggacgtgcctgaaggtaacgacatcagttcgtggtttactgatggtcttgatgattccttacaagattttgacttctccggaggcctagaaatcccagatgacgatcttacccaactgggattcatgtaaactgaaccggtaaatatgtacatgttcatattaattttaagtgttgatcctatgttagcactggcattgcttggttaccgtggtaacggtgactgattagtctcttgtgcccccaagggcagagcttgcaagttgcaactaggaattgattcatttatatatagcgtaaaacttgtagtcgccttgtcgcatatctgcgaccagattattggtcgtatgatgttttatctttctttggcccccaggaaaaaaaaaaaaaaaaaaa

SEQ ID NO: 38537 - DNA, 471 bp, Oryza sativa
  Clone ID: PAT_MRT4530_42164C.1
atggccgccgtcgcctacgacgtggcggcgcgcgcgctgcgtgggcccgacgcggcgctcaacttccccgatctggccgcctcgcgcaccgcgccacccgcgtccagctcagcggacgacatccgcgcagcggctgccgccgcggccgcctcgctgcagcacgaccgtgccggcggcggcattgcccctgccgcctctggatcagcgcaccagcagcgcggcgggagcagtgccgccgcgcgcaccacggcgggcagcggcggcgcgcagcaggaaggcagcagcggcgccggcgccgggagccaccagtatttcttggacgaggaggccctcttcgagacgccgcagttcctgcggaacatggccgccgggatgatgatgagccccccgaggctcagccccagctcctccgacgattcgccggacccgtcggaggccgggggcagcctctggagctaccgtgacccatag

SEQ ID NO: 38538 - DNA, 966 bp, Oryza sativa
  Clone ID: PAT_MRT4530_42165C.1
atgtggcgctcatgtctccacatgccgcatctcaattaccttcccaaaggctacccggggcggcgacggcggcggaacgagggaaggggcggcggcttaccgacgacggcggcggcgacggcggcgcaaggcgaggcgacgctcggcacggcacacggcgcggtgtggcggcttcgagggcggcagcgaggcggcacgagggcggcggcgcagtggcacgagagcggcggcgcggtggagagggaagaggggaggaggagggaaatggagtgggggaaagtggagagggggtggggtatttatagggaagagggggagaaggagaggggaaagggcggcggcttaatggcgacgcgacagcggcgcacggggctcgggacgacggcgacgcgcgggcggcgacgcgatggcggcgcggggctcggagcggcgatgcgacgggcggcgacgaggcgacgcgacgcgcgcggcggcacggggctcggcgcgatggaacgggcggcgcggcagtggcgcagggcgacggcgaggggacgggcgcgcggcggctcaaggcgcgaggccgacggcgacgcgacggtgacggcgcggcagcggcggcggcgcgcgcgacgagcgggcgatgacggggcggcagcggtggcgcgcggcacgaggcgggacgcgacggtgacggcgacagcgcggcagcggcggcacggggcgcaaggcgacgcgacgggcggcagcggcgacgcgacagcgggcggcgcggcgcggggtgcgatgacgcgacaacaacggcgacgacgacgcggcagcaacggcgatggcgcgcggtgggacgggacgcgatggcgacggcacgcggcgcggcatcgtcgacgagacggcgcgcggcgcggcacgatggcgacgggtgagggtgatggaatggcgatggcacgacgagacggcgatggcggctcggggctcaaggccggctag

SEQ ID NO: 38539 - DNA, 747 bp, Oryza sativa
  Clone ID: PAT_MRT4530_42166C.1
atgggtttgaaaagctggatctccaccgggcggccggcggtttataaccaggggttcccccgtaattatgggttccaaggctacccggggcggcgacagcggcggaacgagggaaggggcggcggcttaccgacgacggcggcggcgacggcggcgcaaggcgaggcgacgctcggcacggcacacagcgcggtgtggcggcaccgagggcggcagcgcggcggcacgagggcggcagcgcagtggcacgagagcggcggtgcggtggagagggaagaggggaggaggagggaaatggagtgggggaaagtggagagggggtggggtatttatagggaagagggggagaaggagaggggaaagggcggcggcttaatggcgacgcgacagcggcgcacggggctcgggacgacggcgacgcgcgggcggcgacgcgatggccgcgcgggacggcgcgcggcagcacggggctcggggcttcgaaggcgcggcagcgcgaggggcgacggctcgcggcgcacggcgatggcgacgcgacggcgacggcgtgcggcgcggcacgatggcgacggcgaatggcggctcggggctcaaggtgatggaatggcgatggcgcgacgagacggcgacagcgcggcagcggcggcacggggcgcaaggtgacgcgacgggcggcagtggcgacgcgacagcgggcggcgcggcgcggggattaaatatattcccgtgacgcgacaacaacggtga

SEQ ID NO: 38540 - DNA, 1498 bp, Oryza sativa
  Clone ID: PAT_MRT4530_42167C.1
ctggcagatcgcgatgacgaatagatcctcaatgactagatcgcagagggcagaggtcagtattggatggataaggaggggaacgaggaccccaacgaagagggcaaccaggatggcaacatggagggaaacgaggagggaactgacaggcaacgaggtgctgcgaggaagctggagggcagacacattattgctgatgttgccccaaacggcgaaccagtagccccggctggtatactaaggaagtttgtgggactcagtggttgggtcgtgagggatcacgtgcccatcagcatagtgtactggcgtcaaacaaggtcatgtggagatgaccaaagttttctcccagatacggagaaagagatgctgtggaccaccatgctctagactttcatgatccctgaggcagattaggccagagtgaaagaatggactatgaagaaaatggccaaatagttccagagctacaagtcatatatgtacaagacatacatcgtgaagggcataacacctgatttcgacgagtttacgaagctaatggatcattgggatgcgtttgtcgcatacaggacaggagagcgtggaagtgcagatagaaaagaataaagccagtgcaccagctagggttagggggttataagaagacaatccccaaataggaaaaaatggaagccggattgatagaaaaagatatcgtgccggccacaactaactggcttgaatgatgaaagaattggtactatgcacatggtggatcgctcattcccgttgatggctccctgatatacgcaatgagattcgcgaatcaacaagccgacttatagatgcagtggatggctatgctcggggaatagggaacattccggcccaacagagagaaggacgagcttatgctcgcaatacataatcctgagcatccaggacgaacgcgaggcaaatgcatggttccttggaaataaggatttcaagaggacatccgcacgtacaagagtcacataaggagcatgagagataccgaggctaagattatagatcttgagtatagagcctcgaactacgatgcaaggattacagagaaggtgtcaagacaagtggaccaactcctggccgaacagcggggacttgatacacaactgtctattatgcccgtcatggtgagcacctcaggcaatcgcagtagcagctacgcctcaacggggcaagtaggatcatagagcatggaagcagtgcaagcacatgatgaacccccctgccccattgatgaaatcacgcagcggataccatgtgagatgcatattcccatcaagaatttgtcaatcaaggtgacgtctgtcatggccataccaacggacccttcagggacataccatcgcaggctaattccacctggatacacaagggttgaaattgagctagtggaatgcaccttcgaggatctcgagttggacatccccggaggagacagggagacgaaactagtagacacaacccacgagat

SEQ ID NO: 38541 - DNA, 597 bp, Oryza sativa
  Clone ID: PAT_MRT4530_42168C.1
atggatttggaaggtaagcacaaatattatgctgatttcaagatggatttggaagatttcatgtggaggtttacagtccgcttgatccctcagatttcatttagccagtatacatacccagattctgattaccaaaatgctgaagtattgagtccaacgatttacccattggattgcatctcagatgtacccattggttttcatcttagattttggaaggaaccgaatgaatgccattcaattggtttgtctaatggaaatgagtggactacaacaatatcgacaatgagcttgctaacaataaaactatttactgcaattgcaccacactatactggtatatacaaaaagttaagtggagaggaacactttggtgatgacatgctgatgctgagaaaagaaggtcatatttgttattcttttgtagaaaaaagtaatgctacggtattaattaaattgtatagtgactctcctatgacttgtgagcactcaatcattctacaggtccaaggcaatctcttggcacaattagagatgttggattatattacttctctggctttcctggatagggagcaaagcattgttacgttctag

SEQ ID NO: 38542 - DNA, 756 bp, Oryza sativa
  Clone ID: PAT_MRT4530_42169C.1
atggcggccgccagaatgctcgtgctcctggcctctctctgcgctctcctgctcacggcgtccgcggccaaatggactcctgccttcgcgacgttctacggcggcagcgacgcctccggcaccatgggcggcgcatgcgggtacggcgacctgtacggcgccgggtacgggacgcggacggcggcgctgagcacggcgctgttcaacggcggcgcgtcgtgcggcgcctgcttcaccatcgcctgcgacacccgcaagacgcagtggtgcaagccggggacgtccatcaccgtgacggcgaccaacttctgccctccaaactacgccctgtccggcgacgccggcgggtggtgcaacccgccgcgccgccacttcgacatgtcgcagccggcgtgggagacgatcgcggtgtaccgcgccgggatcgtgcccgtgaactaccgccgcgtgccgtgccagcggagcggcggcatccggttcgccgtgaacgggcacagctacttcgagctggtgctggtgacgaacgtcggcggcagcggcgcggtggcgcagatgtggatcaaggggtccgggacggggtggatggcgatgagccgcaactggggcgcgaactggcagagcaacgcgcgcctcgacgggcaggcgctgtcgttccgggtgcaggccgacgacggccgcgtcgtcacggcggccgacgtcgcgccggcggggtggtcgttcggcgccacctacacctcctcggctcagttctactga

SEQ ID NO: 38543 - DNA, 120 bp, Oryza sativa
  Clone ID: PAT_MRT4530_4216C.1
cttccctaaattaatttgccattggtatttttacttgaccattcggcaaaatttacatgaattccccacgcaccgggccaacgatttattcatgtgaagggatgatttacatccctaaaa

SEQ ID NO: 38544 - DNA, 684 bp, Oryza sativa
  Clone ID: PAT_MRT4530_42170C.1
atgtcaggtctttctccttccccacgaccctacctctccctcctcctctcttatgtcgtccctctccgccgaccccgtggctgcggctatgcacgcagggattccatcggcatcgatgtcagtggcagggtcggcgtccaagacaggcgtcttcgtgcggtcgttcgtccaagagccgtcaagtttcggggaggaggacgcgaagccgagcaagcacgatgcaagggagggaacgacaggccaccaatggtggagcacatagaggaagatggtgacaatgccaatccaggagtgaagcaagtagaggttggggatgtcagcctcggtgtggtacttgcacacagcatagatgctgaggccgccgagggcgagggcgagggcgacggcgtgcagcagcatgtgcccaggtgtccacgtcagcaccttctcgaggtcagctggtcagggtgtccgccgacgctctcttcgtccccgtccccgttctcgtccgctggccgcacgctcccgctcctcctcttcctcgcggctcgcggcctcgccttcctctacccattcgtgcccatctcctgcgtggtcgagctatgtctcgaccgctcccgcgtcaacccgctgaggttgagaactgagaagggaggagtgggggcgacacagcagctcggtgtgcaccatgggtggaggctgtga

SEQ ID NO: 38545 - DNA, 153 bp, Oryza sativa
  Clone ID: PAT_MRT4530_42171C.1
cactcgccgaactttggcacggcggacgcgaccgagtgcttcctcggctggctgaggcgatcgcgggagaaagaaggctcgattgaccggcgttgccgtcgacgattgtcgattgaatcgcttgtgcgagaggcatctgctaattccgcgtga

SEQ ID NO: 38546 - DNA, 219 bp, Oryza sativa
  Clone ID: PAT_MRT4530_42172C.1
atgaaggctggagctctgaaaataccacggttgtacattaacgttttccatctcatcacaactttgagtgcaggtaagaggagagctctgatacctcctcaagtagtctacactgatgagagcgtgcggcccataccagaggagggcctaaccatggaaatagtttcagctcatcagaagtttgcattgctgtcatcccttctagccatcctcgagtag

SEQ ID NO: 38547 - DNA, 330 bp, Oryza sativa
  Clone ID: PAT_MRT4530_42173C.1
atgggaacttggaaagccaagccagaagaggagatttggctcacaggggaacgaagagaagtatactcgtgcttccgtggtgccaccggcggcggcagcagcggaggcggcggccaaacggcctccgcctggcgttggcgcatgcaatcttccgctgcgcatagctgcgatgctgttgctttcgcgtgtggcgatgacgacggcaccgggaccgtgcttttactcctgatgactgtagtaaaaatttctacggcagccatggagtggagctgtgctgtctgtcacttgcttttttgggggacggagatgcagaaattgatggacccgtca

SEQ ID NO: 38548 - DNA, 165 bp, Oryza sativa
  Clone ID: PAT_MRT4530_42174C.1
ccacccgattccccggtccacccacacctcccggatttccatccatggcgacctacaacctccagctggccctatgaaacccgtactggcgtttcaaacaatctcccccaccgcctccggcgcctacaccgcctgcaccactcctatgaaggagaccatccataa

SEQ ID NO: 38549 - DNA, 120 bp, Oryza sativa
  Clone ID: PAT_MRT4530_42175C.1
atgcggatgctcaccgggatgtggctgaagcagcaggacgacggcgcccctgttcctgctcctgctctgctcgctcgggagatggaaatcggcgcaggcgtgatttgctctgcgtcgtag

SEQ ID NO: 38550 - DNA, 312 bp, Oryza sativa
  Clone ID: PAT_MRT4530_42176C.1
atggaaagttcattcttcataccgttccaacttatatgcaagctaatttctaagaatttgggggtgggaatgcacatggtggtagctgagagggcgccgcgctctcgccggacagcgtccgtcaggacgttgccggttgccccgcccaactctgcgtcggcggccgcctcgcctcctgcgctcctcctccgcggcgggggccccgcttctatggtggtggtaaatgctccggtgagcctgcctcccccaccaccggcctacaccggcggcgcgccggcgccaggggcatctcactcacgaggaatccgatga

SEQ ID NO: 38551 - DNA, 571 bp, Oryza sativa
  Clone ID: PAT_MRT4530_42177C.1
aaaaaaaaaaaaaaaaaaaaaaaaaaaaaaaaaaaaaaaaaaaaaaaaaaaaaaaaaaaaaaaaaaaaaaaaaaaaaaaaaaaaaaaaaaaaaaaaaaaaaaaaaaaaaaaaaaaaaaaggggcgggccgttttaagggttcccaagtttacttcacccgtgcttcgcaaggtatatatcttttttttggggggggggaaattaaattaattgcccgtcgttttaaaacgtcggaactggaaaaaaccttggctttcccaaattaaatcgctttgaagaaaatccccttttggccagttggggtaatagcaaaaaggcccaaacgaatcgcctttccaaaaagttgggaagcttgaatggcaaatggaacgtgccttgtagcggccaataaagcgcgggggttgtggtgtttacgtgaagggggaccgttaaatttgtaaggcccttagggccggttcttttggtttttttcctttcttttttggaaagtttggggggttttcccggtaaagttttaaatggggggttccttttagggttttgaatttagggttttaggggatttgtaccc

SEQ ID NO: 38552 - DNA, 345 bp, Oryza sativa
  Clone ID: PAT_MRT4530_42178C.1
atgcaccgggagacgacgccccccggggcggccgccggcgagttggccttctcctcctcatgtcccgctagccgtcgtggtggaggaggagaaccagaacccctcccaatgattattctccggcgaggacgagcacgcgtgagcagcagatggggagaggacgacgagcaccgagcttgcgggatcgacgactacggcgtcgaggacaccaaggacggctcaacctgcgaccacaacaccgcgctggctccctcgtcaccatcgatgtcgcagctgcgctgcttcccggctgaaaacttccacatgatcgattccgacatgctcgtgttcatcttcttccactaa

SEQ ID NO: 38553 - DNA, 200 bp, Oryza sativa
  unsure (1)..(200): unsure at all n locations
  Clone ID: PAT_MRT4530_42179C.1
naggcgtcggcgtcggcntcggcgancnnncgggacncaccaccatggtcangtngntgggatgctcaantcccgnncgaagggttccatggtgacgcaccacgacatgcagatncacgcngncatgtanggtggcgggnggtgccgnnnanaagnattnctattccgnaccancangntttcnacnagntnatnngnag

SEQ ID NO: 38554 - DNA, 789 bp, Oryza sativa
  Clone ID: PAT_MRT4530_4217C.1
atggagagagaagcaggaggtactgaaccccagcctgtcctgggtcgcatggttgcgatcgaggactatattctttatggttttcttcctccgccttctgaatttcttctcttggtcttgaatttctacagccttttcttgctccatttgaaccccaattccatcgccttcctcagtatcttttcgcatctttgtgaggcctacattggggtagagccgtttcttgacctcttccgtttttactatgagttgcgctggatggaaccaaaaaaggtgtccggatgtgtcggtttccgacttcgggatggcctgaagtcgcgatacatccccttccagtgcccttcatctcgcagcaaatggcgggggaggtggttctatcttcagatagaagattcggatccggtcttcattgtttctaaggagcaaccagccaagatttcatcttggactgccaaacccgccttgaccccatccctcaaatctttcgtcgatatcattgatgacctccgagaacgggggttgtcggggtatgaagtcactaccgacttcattggcttgaacagcgcaaccgtgaagcgtcgcgtcggccaattgatgatcagcggcccgacaacgacgagcaacgtccccgtccccctttgcgagaagggggcagtcgaacgcgaagctgccatcaatctcgactacccattttgcaatgcggccgacaacgtctttgtttctcacgacttcaccgagagggaaggaggatacaactgtgaccttgtgggcttggaagtagtggcgtag

SEQ ID NO: 38555 - DNA, 123 bp, Oryza sativa
  Clone ID: PAT_MRT4530_42180C.1
atgcaggtaggcgggcaggtgcacaaagcgcgaggcggacgtgaacgtgcacacgggggtaatgccaagtggacgatgctggcgatggctgatgcagcagggaggtcgactgatgacatgtga

SEQ ID NO: 38556 - DNA, 490 bp, Oryza sativa
  Clone ID: PAT_MRT4530_42181C.1
ttaagcctcccaagctcaattgatggttgccaatggaagtattattatgaccaccatatttgtggtgttggtaagatgctttgggtgattagattgtccctcagagagatcccagccggaaaccctaagaggcaggacctaatgaacattattaatgtttaattaaaaggtcattatatacagctaaagtcccacagggtctaaagcttactcccatatcaaatggaatgacctcctaaaccgtgtcccgttcagacattacagagccccatagtttaaatgttctagaaagagataccttaatagtttaaggtgtaacttctggtgttaaggaatataaagatgccattctgaacccatccatccgtagtagccttcagcaaggaaaatgtaacaccattgattagctgttgtaatgttttgtatggtgattatattccaaagccaagtcacagctgtgagttgttttgaaaaaaaaaaaaaaaaaaaa

SEQ ID NO: 38557 - DNA, 1203 bp, Oryza sativa
  Clone ID: PAT_MRT4530_42182C.1
atggcagacaatttcagtagcttagaggaggaagaggagtatgctacgttcatggcaatgaggtttaagagcgagaacgacgggttcacgttctataacaggtatgcgaaagggaaaggatttagtataaggaaaaattttgctaggcgtgatcctgtgactgctgatgttatatttaggcagtacacttgctcaagagaaggggcacttatccattctacttatggtccggaagagtttgagaataagtgggttgagttcaaggacaaacataaagtggtcggaggggttgaagccacgtcggagtcggcggcgcagtcggcggggtcggagtcatcggcgtcgtcggcggggtcggaggggtcggcgtcgacggcgggatctgagggatcggagtcgtcggcgtcgtcggcggggtcggcggggtcggaggggtcggcgtcgacggcggggtctgaggggtcgacggcggggtcaggaccgtcggcgtggtcgtcggcgggggagtcgtcgtcggggtcgacggcggggtcggaggggtcgacggcggggtcggaggggtcggcgtcgacggcgggatcggaggtgtcggcggcggggtcggctggctcctcacatggtcggtcagatgggatgaaggttgtggatgggggaaaccctagagatctgatctcttatcgcatcaacatcgccagagaaatggaagacgacgaagtcagaaatgaagcacagtttgaaccttcggtccagccgcgctttgatgaaatcacaactgaagcactggtcactgagcataaggttgtggttgtcatagatgatcctgaagagatcaaaggggacattgtcccagtacaatgtgaaggccaaattgacgaaaaaaaaattgatggtttcatggaagataacactgtggatgtcatacacatcgtacctgagcctgaagagatcaaaggggacaatgtgtcagaagactgtcaaggcgccactgccgaaaacaataatgaccaggcgcgcggggggctgtcgctcggggcgacggcggcgccgcgagcaccgcaagcctcggcgctcggggaggttactgctgggggaggcggcagccggaagccacggggctcgcggcgacggcagccggaagccgcggggctcgcgacgacggcggggaggtcagtgcagcaggcggcggcgcagtacaagggttag

SEQ ID NO: 38558 - DNA, 2567 bp, Oryza sativa
  Clone ID: PAT_MRT4530_42183C.1
ttagcagtgaatactttccgctgcatcgtcctcgggggatagctctcttccattccagggttcaatgttcttgagtgtgcttggaagttcccatgtatattgacgacggcgagtattttggggatgaaaccggtacccagctgaaatgtcgtcatggcctccgcccgaagagaagaactgcatgggaatggaaggacaccggaagaaggtttcttggttgcccactggaggaagaggtccagtgcgaccatttgttttcggttgacgatgaattgcatccaatatttcaataggcatattgacagctttggcgagcattggacaatggtggtacaagtaactctacaaaggcggagtaataatggtaaaattttgaaaactgaacaatagtcgaggaagacaaaatcaagttagaatttcagatggcttcacagatctcggcaatcgaagcaaaacataagaagagagtttcgtggctaaaaaaggaatcagaagacctcaaggagtgtcggattgcttgtctatgatgatttgtatgtatgcatctatgacagtgccgttcaaccactttgctttggatggagcctgttttggtaggataagtggtttcagatgctgtcgaaaaatcttgattcctgcaattgttgatagcaattttttgtcttcactcttagagatgtaactcaaggttacttcatccagcaggcttagatcatgtggtttcggttccctactagatttaactggctttggaaatgtttttttgtagtagatgaaatcagtttgtgacttgtgtgttggcttgataatccttccctccggtcgtctaagccttccgccaattgttgataactgcagtgttggattttgctggctattgtcatcgctttcgattatgtgtggagaagtagctgttccatttggttgactatcgtagttctttgaatcatcaactaggtcttgtcggcaatctgccctggaatcaattactgtctcttcttgtttggctgctggtttaaatttacggaaagttcgtgaccttgaagttgtacccaacctgtactttattgcctgaatatctcttctattttgaatgcaagtattctctattgagattagttttgtggatatcttgttgtccagaaactgacaaccttgttgaatctgcatgagttgtgtcataattgcatcgaaattggctgattgatgtgcctcaggatctttgtaattttcaggacttgatgcctctggatatttgaaattttcaggacttgatggaacattaacatcgtcttctatgtaaacatggtgtggactctcatcatcatcgcctcttccatgtgagttgaatccgtttgcagccgttctttctttagttgctttgaacatataatccggttcttcattggtgggagtgtcgtctttgatgaaatcaccattattgttttcggcagtggcgccttgacagtcttctgacacattgtcccctttgatctcttcaggctcaggtacgatgtgtatgacatccacagtgttatcttccatgaaaccatcaatttttttttcgtcaatttggccttcacattgtactgggacaatgtcccctttgatctcttcaggatcatctatgacaaccacaacagtccctgtttcaagaatacatttcttgtcgtactttagccatgtcattacattcatttcattccaataggccattagcggcggtggccttccaacgtatgtcagtgtgcacattggatcgttaatgtgtacatgttcccatgcccaaaactgaagcaatggtacattcccttctagatttctccttcctcccttcaattcattcagacaattgattaagtaatctcttgtgattctagcccagttgatgttcttaatgttgtcaatgtctttcaaaagggctaggtactgagaactaactattggcttggtggtggggcataggatgtacccaatggtgaatagtacaaatcttctaagaaagtgctcatctgggtgttttgcactattgatttgtcttgccaactcatgtagggaaatgttcttccccttatgttgcttgtacattgaataatatttgtagtcttctccattcatgtgaggctttggcttgataatcataccatccgcaggcaaccccatgatacacttcacatcatgggttgttattggtattgctgttccttggatgttaattgtttcagttttactgtcatatctctcagcaatttgcccaatcagtttgcggtgaagggtgatatctggcagggcaagcatccggccaaatccaatcctctcaatttgtgatatcttactcttgtcaaaattagcaactacagcgagaaatctttgtattgaacatgcaatagtcatgtctttcataatgacaggcttatgctcagtgaccagtgcttcagttgtgatttcatcaaagcgcggctggaccgaaggttcaaactgtgcttcatttctgacttcgtcgtcttccatttctctggcgatgttgatgcgataagagatcagactgtactttctttgtaaataat

SEQ ID NO: 38559 - DNA, 1242 bp, Oryza sativa
  Clone ID: PAT_MRT4530_42184C.1
ccactttctcatatcaagttctaatatcgctacaaggtttcaatgttcgcggatgatgtagctttcttcataagaccagcactccaatcatagattgaaaacctaaagaccctactagctctctttggtaaagtctcagggctacaaaacaatattcagaaaactgagatccccaccattttgtgtgcacatttgaacattgaacgtgccatacaaagcttccctggaaaagtaaatgctttcccaacaactcatctaggcttgcccttgcatccaagaaagctatgcaagattgactttgtaccaccgttggaaaaatttggatcaagaattcaaggacggaaagggcgcaactatacctcagtgggaagaaaaacccttgtgaaatcagtcctttcttcaatgccaatttactagctaacttccttgcaaattctgaagtggatcataaaaaaattgaccaattgaggagcgcctttctctggaaaggaacagaaccggagaatacccactcatgaaatagcctgctgaactgacaaatggtttgccgaccaaaagaccttggagggctgggaattctggatctccaaaaattctcgagagcactacgtgatcaaatggaaagacgattctaggctatgggcctcaatggagcttcgctgcaatgatgtagatcgcaaactcttccatgcatgcacaaagatcttccttggaaatggtaaaaaaacatttttttggaaagataattggcttcaaggtcaatgtcccaaagacttgccaaatcttttcaatctggcgataaagaagaacagaacaatctctgttgagatccacaacaattcctagctcacttcctttagacaaataacaaatgttgaaacactccacgaattggttcaattgggcaatctactcacctgcatccagcttgctgaagacattgaggatgatatagtctggacaatgagctcatcaagaaacttctcaacaaaaagtgcatagcaagcacagttcttaggatcagcaatcaacacccaattcaagtacaattggtcttcggatgcgcaaccaaaccaacgctttctaggatggttaatcatgcaccaaaaggccctcacagctgagaatgtcctaattagactttggccgtgcgattggatatgctctttgtgcacaaacgcctttgaaaatacatatcatctattcagagcctgcgaatacacaagacaagtttggagctcg

SEQ ID NO: 38560 - DNA, 602 bp, Oryza sativa
  Clone ID: PAT_MRT4530_42185C.1
ttctctttctgcctgagctgcatccccagttggcgaacatgaaagacaagttacaccgttctggactttgcttggaagttcccatgtatattgacgacggcgagtattttggggatgaaaccggtacccagctgaaatgtcgtcatggcctccgcccgaagagaagaactgcatgggaatggaaggacaccggaagaaggtttcttggttgcccactggaggaagaggaccagtgcgacgctttgttttgggttgacgaagaatggcaaccaagaatacaaaaggcatttgagatgctctggcttgcattggaccatgcaagtacacgcaaccctaccaaggcgcagtaccaatggtcaaattttgtagacagaacaatagtcgaagaagacaaaatgaagttagaatttcagatggcttcacagatctcggcaatcgaagcaaaacataagaagagagtttccaggataaaaaaggaaacagaagacctcaaggcttggcttatgggttccctagtcgttattgcatttcttttatttaaaattatcgaaaatatgtatcagggatgttgatgcttcaaatatgtatgacgtgtgttgatg

SEQ ID NO: 38561 - DNA, 268 bp, Oryza sativa
  unsure (1)..(268): unsure at all n locations
  Clone ID: PAT_MRT4530_42186C.1
ttcacatagaaaaatgttctatacaattttaattttttacatcccaccnaaaaaaaacaggataatgggggattgttttaatcactacctccaacctcctataactttaatctcctcacatggctatatattaccttctcccacgcagttgtcttcttttttcaaaatcaaataaatgaggggcccctcttttatagagcccaattttttttccccccactacaaagtcctttcttttttttttggtcccccctatttatattttttg

SEQ ID NO: 38562 - DNA, 309 bp, Oryza sativa
  Clone ID: PAT_MRT4530_42187C.1
cagcccacgtgccactacagtagccgtgccggcccggcacggcccagcaccttcttgggccgtgcttgggccgtggccttggcacgtgggccggcacggcacggcccgctacaggagccgtgcctaatgggccgtgccctagtgggccgtgccgtcggcgtgccgtgtcgtgctgggccgggccgcccgtttggcctgctatatgttggtaaccactcaaaaaaggtaaggggaacctgacccgcagtgttgtgggcttctatttgtaccctcaaaatggatggtccagatctatttgttttgtgcacg

SEQ ID NO: 38563 - DNA, 162 bp, Oryza sativa
  Clone ID: PAT_MRT4530_42188C.1
atggcgttgaatgcatcagggatggaggctgcccacatccccgaggaccactgcacccacagtgcctactccgaacctcgatcgcaagcgccgcagaagccagaggcggcggcggagcggaatggcactcctcccttcaatggctctgtcctcccggggtag

SEQ ID NO: 38564 - DNA, 1051 bp, Oryza sativa
  Clone ID: PAT_MRT4530_42189C.1
gctcaatcttatctttattttcagcgatacgaagcgcacaatgcaatttcacctgcacagcatgaactgttaaatcgaatggcaacacagaagaaaggatcagatgcaattatctaacaaagaacaacacacgcatggcaacatctggtatccatgccattttgtggagaaaaacacacccatcacccccagctcattcagtgccatgtactgatgtacagactcacagcggaagacatttccaaagggtttaacctgctcatcgggagcacgcagtccacattctttttgcagatgcagaagcattgcttaacttcatacaatgaacaatctaagttctaagacctaccatcagtaactcctagctcaactagaacattggcagcaagagtcatcgttttctcttgccatgagtctttgacttgttctcaaggtcatttcctggtggcgccttaagagacttggatgcaactgctgagctccacagcgctctctcaacatcagaagtagtgaaaacttcttctcctgagctcaattccttcgatttagtttgcaacttttcagcaaaagcaagatactgcttcagagtgtactcctttgcattgcctaaggctgccaccatagcctcatcagacatgaacggtgcaacatcaggcgcgtaggcagcgagaacagcggatgccgtggcagggccaacgcccttcagcacggtgagctcggtgatggccttgcggaggtcaggcagcgctgcgaacgccttgcacgatgctgattctaccactgcatcctccaagcccttgacgaaatccatcagtctcggcctccacttgccgcgggagagcttccattggaggaggcgcaccagctcgggcttggcgaggaagggctccgggtcgcggcggcgcaggagatcggggaggtcgcggcggtagaaggagtcgacctcgacgaggtcgggcttgcccagggccgcgagccggcggtcgtacgccgccagcgccgctcgccactccgccgcgtcgccgctcgcgaagtccaccgtctcggccat

SEQ ID NO: 38565 - DNA, 492 bp, Oryza sativa
  Clone ID: PAT_MRT4530_4218C.1
atgtcggccgcgggctcccccttcatggcattccacgcgctcagcaacgagcttctcttgctcctcgctgaaggtggcagccgcagccgcaggaggatcctcctccacgaccacggccgcaggcgcggcggcggtcatgctcgccgccggtgcatcgctgctgctgccgctgctcatctcgtcctcctctccgacaaggaaggcagcagagagcaacctatcgacgtctcgaaaggccaggatagtgggcactgcgactctgcgagtgttgcattgtatccagcagagagaggtttgatcacctcatcacctcaccaggtagcaaaaggccaagatttcgctggattgacgtccggatccatggatggctcacgatcaaagggatacggctgccgttatcggcaaagggcagagaatatctgcaagtacagacaggcaacaccgacagcagaagcatgcaaccgagccttctccttgaaactttctgagtaa

SEQ ID NO: 38566 - DNA, 286 bp, Oryza sativa
  unsure (1)..(286): unsure at all n locations
  Clone ID: PAT_MRT4530_42190C.1
cgttatatttcaagatgcgccgccagcccngctgggagtcggacagctgtggatatcatggcgatgatggctatctttaccggggtcctgggaaaagtgagtcattcggtcccaaattcacttctggtgacacaattggtgctcgcatcaactatttctcacaagaatttttcttcactaaaaatggatctctagttggatccttacgaaacgaaattaaaggcccactatatcctaccattgctagtcatacccaagatgaagacgtgacagtcaacattggaaa

SEQ ID NO: 38567 - DNA, 261 bp, Oryza sativa
  Clone ID: PAT_MRT4530_42191C.1
atgcgactcctcccccacaacgactactcgccggatcccggaggcatcctcccaggaaggaagcgacgatacaggaaggggggggagtgggaggaggaagatcgattaccagttggatcggagcctcggagccggaggagatcgccggtgaaggagagcttcgcgcgcgctaggtttggcggtgggggagagcgcgtggggggaggcgagaggagaggccgtggacttcggccgcataacatgggaaatgatgggccatag

SEQ ID NO: 38568 - DNA, 296 bp, Oryza sativa
  Clone ID: PAT_MRT4530_42192C.1
attcctgcagccctgatctgacgagccacccttgttggagtggccttgcacgctcgaggaagtactcatgttgtcgccgccgccgcctctcaaatctagatctgacgagcctcgggctagatctaacgagctcggtgccacagagtgccgtgtcgggggcattggtcgagggggactcgctcaccaacaacccaattgcattgaatcaaaacttaaaccttgcccaaccggttgatggagaacccggccaaccactacgccccccgggccgtggcttcgccgcgtacctattttcc

SEQ ID NO: 38569 - DNA, 987 bp, Oryza sativa
  Clone ID: PAT_MRT4530_42193C.1
cccacgcgtccgcccacgcgtccgcccacgcgtccgatcgcatcagatggtatatgggatgcactaccctctgaagcagcagcaaaggcatgccgaggtttacctgcagaactggctgcaaagcttgtggttaagcaagctctcaaaaaaagtgggctgaaagatgacaccacttgtgtggtggttgatatcatcccttccgattatcgtttgacatcgccgcagttgtccccaaagagaaaccagagcaagttcaagtctcttcttttcggtagaaggtcacacagttcaattggaaagcttggaggcaagtctgcctcttttggctctgtggaggaattatttgaagaaggctctgcaatgttggaagaaaggttgggtaggaatttgtccttgaaagcaacctcggcacctcttcgatgtgctatctgccaggtggaccaagaaccatttgaaagtatgatgactgagaaaggaggcagttactgctcttccccatgcgccccctgaggaggtccatatctttgtttggagtgtcgaaaaaagaaagacgcaatggagggtaaaagatcaagccactctacagcgtgcaggtgaaacagagcaggggattctggacaaggttgatgttgagtgtaaaaactaaagatggaataataagttgctggattgaattattattttctgaaactaactgcatcctcagcctggtataaactatgtctggctgctgctaaccggtttatcgtctgcgcacaactctgatggatttttttttcttttaatattcttgaggaaatagctcacataacttggagcttgtagttttggattgtatcctctagtgtgtattgtgtaggaatgggcatgcctaatgctgtgtgtgactttttatttgagctagtataccagaaggctctttgtaatggatgaattaatgtactttgctggaatcaaattaattgtcaagcatatccagttcttaat

SEQ ID NO: 38570 - DNA, 348 bp, Oryza sativa
  Clone ID: PAT_MRT4530_42194C.1
atgggcggcggaggcggcagcctgagctgccttggcgataaggaaggggatggcgatgacaatgcctcgatctgcgccgtcggagttcgatccgccattgtcggagctcagtctcgccataggagctcctcgtcgccacttggaacgccccgtcgccagatctgtcccgagctcgctatcccacgctcccacgctgccgaccaagctgctgcttcgggagatgagagtagcggtgatgcaccggcgagcgctgggctggatctggccgccccgctgccgttctttcaggcgctgtcgctgcttgttccaccactctgcccggccgcccgccgcggtggaaggagatga

SEQ ID NO: 38571 - DNA, 497 bp, Oryza sativa
  Clone ID: PAT_MRT4530_42196C.1
cctttcctaccctcttctccccggccgcgcccggggccggtttcgtcggacgtcgcgatgcctgctccccgcttactccgggtgctcctgctgctcgtcgcgctagcctgcgccacgtcgggggtcgggtgctccgacccgcggttcccgctacctcggccgcgtccgggagctccaccgcggggagggtcgccccgcggccgagcaggaggccgtggcgcgcgggctcctagcgctccttcttccgtcgcactccgggagcttcgatttcagggtcatctacgcggaccaatgtggtggaaaggcatgcttcattgtggacaaccatccattgtttgatggagaagggactccacaagtacttttacttggaacaagtggggttgaaatctctgttggtcttcattgggacttgaaacattactgtgcagcacaatgtttcatgggataaaactggtggggcccattattatcagtgccaaggcctgggtcactac

SEQ ID NO: 38572 - DNA, 2559 bp, Oryza sativa
  unsure (1)..(2559): unsure at all n locations
  Clone ID: PAT_MRT4530_42197C.1
atgccggctccccgcttactccgggtgctcctgctgctcgtcgcgctagcctgcgccacgtcgggggtcgggtgctccgacccgcggttcccgcacctcggccgcgtccgggagctccaccgcggggagggtcgccccgcggccgagcaggaggccgcggcgcgcgggctcctagcgctcctccttccgtcgcactccgggagcttcgatttcagggtcatctccgcggatttcccactccccggtacagtagtagtacttatctgcaaggactcacaatctgttccatggaatccacaggaccaatgtggtggaaaggcatgcttcattgtggacaaccatccattgtttgatggagaagggactccacaagtacttttacttggaacaagtggggtagaaatctctgctggtcttcattggtacttgaagcactactgtgcagcacatgtatcatgggataaaactggtggtgcacaattatcatcagtgccacgtcctggctcactacctcgtcttccttctggtggcattttgattcaaagacctgttggctggagctactaccagaatgcagttacatccagttattcttttgcttggtgggattgggagcgctgggagaaggaaattgactggatggctcttcaaggtatcaatttgcctcttgctttcactggtcaagaagctatatggcagaaagtttttcagaggtacaacattagtaaatcagacctggatgatttctttggcgggccagcatttcttgcatggtctcggatggccaatatgcatggatggggcggacctcttcctcaaagctggcttgatgatcagctagctcttcagaagaaaatcctttctaggatgtatgcttttggcatgttcccagttcttccagccttttctggtaacatcccggccgcactaagatcaaaatttccttcagctaaagttactcaccttgggaactggttcacagttgacagcaaccccaggtggtgttgcacatatcttctggatgcatctgatcccttatttgtagaaattgggaagctttttattgaagaacaaatcagagaatatggtgggacaagtcatgtgtacagctgtgatacttttgatgagaacacccctccgctaagcgatccaaattatatctcttcgttgggtgctgcaacattccggggaatgcaaagcggtgatgatgatgctatttggttaatgcaaggttggttgttttcttatgatcctttctgggaacccccacaaatgaaggttggagttggcatgtctatggaaggtattgagcaaaatcctattgtttatgacctgatgtcggaaatggcctttcatcacagacaagtggatctacaggtgtgggttgagacatatccaacaagaagatatgggaagtcaatggtggggctgcaagatgcttggaaaattttataccaaactctttataattgcacagatggtaaaaatgacaaaaatagggatgtgatagtggcattcccagatgttgaaccttttgttattcaaacaccaggattgtatacaagtagtagcaaaacgtattcgacaaagttatctaagaattacattgcagtggatgcatccaatgatgaatatgaacatccacatctatggtatgacaccgatgctgttatacgtgccctagagctttttcttcgatatggagatgaagtatctgacagcaataccttcaggtatgaccttgtggatttaactcgtcaaactctggctaaatatgccaaccaggtctttgtaaagatcattgaaagctacaaatcaaacaacgtgaaccaagtgagcaatctctgtcagcacttcattgaccttgttaatgacctagacacactgttggcctcccatgagggatttcttcttggcccttggttggaaagtgccaagggtcttgccagagataaagagcaagaaatgcagtatgagtggaatgctcgaacacaaattacgatgtggtttgacaacaccaaaacgaaagctagcctgcttcgtgattatgcaaataaatactggagcggcctgctgcgagactactatggaccaagggctgccatctacttcaagtacttaatattgagcatggagaaaaaagaaccttttgctctggaggaatggaggagggaatggattagcctcacaaacaactggcagagcgattggaaggtctttccaaccacagctacgggagacgctctgaacatctcccggacactttacaagaagtacctgcacgacgctgacttaattcagccagaaggtattatacgactgcgaaatttgaagaatacaccttggtaaatgaactggggttgttgcagctgtaatgccttctttttcatgaacatgaaacgaaacagtgtcgtcgatactagtctatttctatttgtactgtatccgtatttggcatggctgagacggtaaatccgctgtacctactacgctgaacatgtttctgcaggctcggtatacatgatattcagatttttaaaaaaaaacaaaaaanaaaaa

SEQ ID NO: 38573 - DNA, 2868 bp, Oryza sativa
  Clone ID: PAT_MRT4530_42198C.1
atggcccagctgcatatatacgccagctgcggctgcgcacgcgcccgcgctgcgatcccgcttcccgcgcaggctcaggcatccgctgcggctctaccttgggtgatgtccgtgacttcgccgccgctgctccggcgaggagggtgggcgatgggcgcgagcgatcacgccgcggtggcggcggcggcgagcggtaacggcaagccgcgggcgaggaggccctcggtgtttgttgttgttggagtgttggagccgcgcgcgggcaggggcagggggaggtgagccgtggccgtcatggcccaggtgtatatatacgccatctgcggctgcgcacgcgcccgcgctgagatcccgcttcccgcgcaggctcaggcatccgctgcggctctaccttgggtgatgtccgtgacttcgccgccgctgctccggcgaggagggtgggcgatgggcgcgagcgatcacgccgcggtggcggcggcggcgagcggtaacggcaagccgcgggcgaggaggccctccgccgccgcggcggcccagctgggcgagccggaagcgacggacgttcgccccaccctcgtgcaccccagcggcggacgtccgctgccaggtccctcgtcaactccacgcagaaccctgacgaggtgtgcaccgagaatctggatgtcaccaaggggccgatcaagatcgtctggttcaaagggggcaagaccaatatatgctacaatgcggtggaccgcaacgtggaggctggcgacggcgagaagatagcgatgtactgggaagggaacgagcccggccaggacgcgaagctcacctactccgagctcctgaacaaggtttgccagctggcaaattacctgaagagcgtcggcgtcgggaagggtgatgccgtggtgatctacctgccgatgctgatggagctgcccattgcgatgctcgcgtgtgctcggattggcgctgttcattcggttgtgtttgctggcttctctgctgacgcactagcacaaagaatcattgactgcaagcctaaggttgtgattacgtgcaacgcggtgaaaaggggaaagaaactcatagctctcaaagatatagtagatgtgtcgctggctgacagtgcgaagaatggagtcgatgtaggcatttctttgacatacgaaaatcagtcggcaatgaagagagaagacacaaaatggacgtcaggcagagacgtttggtggcaggatgttgtgcccaattttccaacaaaatgtgatgtggaatgggtagagagaagacacaaaatggacgtcaggcagagacgtttggtggccaggatgttgtgccccaattttccaacaaaatgtgatgtggaatgggtagatgtgacaaatacggggtgacgatattttatactgcaccaacacttattcgtgcactcatgcgtgatggtaccgagtatgttactcggtattctcgtaaatctcttcgagttctaggaagcgtaggcgagccaatatatatactggtgcactgcagactgtgggtggattactgggcatagttatgtgacatatggtcctctcctgaatggagccacagttcttgtttacgaaggggctccaaactatcctgatcctagtcgttgttcggacgttgttgacaaatacggggttgcgctattttttactgtagatgagaaagggaaggcactggagggagaatgtagcgggtatgtttgcataaatacgtcatggcctgtggctttccgggcactttatggagacaaggacagatatgaaaccacatacttcaagccatttgctggcggtgatgcaagatgcccaatatcagacacttggtggcagactgaaactggtggttttatgatcactcctttacctggcgcttgggcctctgaaacccggatctgcgacatttcctttcttcggtgtacagccagtaatagtagatgagaaagggaaggaaatggaaggagaatgcagcggatacctttgcataaagaagtcatggcctggggctttccggacactttatggagacaaggacagatatgaaaccacatacttcaagccatttgctggctattacttctccggtgatggttgcagcagggacaaagatggataccattttctgactggacgggttgacgatgttatcaatgtcagcggccaccggattgggacagcagaggttgagtctgctctggtttcacatccaaaatgcgccgaggccgctgttgttggaattgaccatgaggttaaaggccagggaatttacgctttcgtgacattggtggacggtgttccttacagcgatgagctacggaaaagcctcgttatgactgttcgcagccagattggggcgttcgcggcgccggacaagatccactgggcgccggggctcccgaagacgcggagcggcaagatcatgcggaggatcctgcggaagatcgcgtccaggcagctggacgagctcggcgacaccagcacgctcgccgaaccaggcgtcgtcgaccagctcatcgcgctcgccgatagctagctttagctaaagccaccgtcgtctcgtcgcgcgcgaggaacctctgctcggccgagagtctcattttcgttatgagcaagattacattcttattccatcaaaaaaaatatgaatgatttttttatgtgtcagaaaaaatggacttttttatgtgctgccgcggcttacgatcggtgtaaatggtgtatcacagcacatattagagaagtatacttgtgtacaattgtatgcgtttgacattttgtacaagtcagtaattccaggccgtaaaggctacgcatactaaaaaaaaaaaaaaaaaaaaaaaaaaattcaagggggggc

SEQ ID NO: 38574 - DNA, 664 bp, Oryza sativa
  unsure (1)..(664): unsure at all n locations
  Clone ID: PAT_MRT4530_42199C.1
ttttttttttttttttttttgaattataaatgatnntaatacattgaacatataatattctggactaccaaatttttggcatccctgaatggacaacaaaactagatggctcatttcagttcccatccaatttcatttgggccacaggcatcaacacaagctccgtgcaattcatcatcacaccaccaaattggggcatcatcacgactaccatcttggacagcccaggccatccatttccgcacaccttgggtcagcttgcctcatcaagccatcaggcccatttccaatccagccttggctcaatagcccttcaatccaccgaaagcaagtacccacaacgtggcanctccttgactgatcgtacccagccggcaccgggtgactcgctggcactgccactgacggcgaagaaagactctcccgtntgtcactgtgggcgtgaccaactcgcatccaactggtgcatcctcatcaacttctccagcccatcagcagacacgcttatggagactgtcggattgacaagctttctccaccggtccaantgccgtggctctctttacggcttcacataaaatagggttgtccaaaacatcttctaagcctctcctccaccggatgtgccctatgttcngacagtgctatgacnatcttgcagggg

SEQ ID NO: 38575 - DNA, 864 bp, Oryza sativa
  Clone ID: PAT_MRT4530_4219C.1
atggatctcgacaagtcaacctccaccggtgcatcgctgaagaaactgcaggaggatggtgcccttcccggtcgtgggaccgcggagagggaagtaggaggtactgaaccccagcctgtcctgggttgcatggttgcgatcgaggactttattctctgtggttttcttcctccgccttctgaatttcttctcttggtcttgaatttccatggtctttccttgctccatttgaaccctaattccatcgccttcctaaatatcttttcgcatctttgtgaggcctacattggggtagagccgtttcttgaccttttccgcttttactatgagttgtgttggatggaacccaaaaaggtgtccgggtgtgttggtttccgacttcgggatggcctgaagtcgcgatacatccccttccagtgcccctcatctcgcagcaaatggcgggggaggtggttctatcttcagatagaggattcggatccggtcttcgttgttcctgaggagcaaccagacaagattccatcctggaccaccaaacccgccttgaccccatccctccaatctttcatcgatgtcattgatgacctccgagaacgggggttatcggggtatgaagtcactgccgacttcattggtaggcagatccagccgcttcaggctcgagctcatccgacctttgattattctgggacggaggacgcgacccggatttctcctcggggcttggacagcgcaaccgtggagcgccgagtcggccaactgatgatcagtggcccgacaacagcgagcaacgtccccgtccccctttgcgagaagggggcagccgagcgcgatgctgccatcaacgtaagtgcactccattag

SEQ ID NO: 38576 - DNA, 947 bp, Oryza sativa
  Clone ID: PAT_MRT4530_421C.1
gagcaaattagcctcgatcaaccagaattatgaactaacatcgtacgatgagttcaaacacaataccaaagtacgggatagagctggatgcaaacgatgccgaacattatggtaaggtaacagctaattgtaaataacaaaataccgatgcatgtttaacagacagaattgtgaaaccaaaaatggtttataggatcccccgagtaaacatagaaaaacttgcagtttcttgtccacgtctaactcgctccaaactcaaagcagtacataaattgatttctagaaccaggtccatatcgaagcatctaagagcacgccagtgttctcttaggccaccagagtgctggccgtggttgactcatacttccaggtgggtgggagcttctttgtgcgcttatagtagcgggcgaggcggtggatcctgctctcaacaagaataagcctgaacttggagtccttgtccttcctgttcctctccaagtgcttcctaatagcaacagccttcttgatcaagaagtagaggtcctccgggatctccggggcaagcccgtgggccttgaggatgcggaggatcttgctgccggtgacgctcttgacgagggggattccgtgctggtcacggagcaccacgccgatctgcgacggcatctgacccttcttcgcggccttcatgatcatctcctccacatcggaggcggcggtcttgagccagctcgggggagtcctcttgtacggcagcgccgacgacgagatacccttcccgcggctgtgcatgcgccccatggcggcgtcgaggggtttagctccggcgacggcgggcggcggcggcggcgcgcgagggcgagaggggcgcgagcggcggtaggatggcggccggcccgccgggccacgcgtgggactgcgcggcggaggagacggcggcggcgggaagagcgatcggacgcgtg

SEQ ID NO: 38577 - DNA, 555 bp, Oryza sativa
  unsure (1)..(555): unsure at all n locations
  Clone ID: PAT_MRT4530_42200C.1
ngcgttccagttagcnatgnnatgaacaacccctgcttttggtctnnnnnnnnnnnnnnnnnnnnnnnnnnnnnnnnnnnnnnnnnnnnnntaaagctgcagccatacagacaaacagcttttggaattcgcggtgcacttaaattacgatccaagttctatggacctttcaagatcatggagaaagtaggaagagtggcatataaactgcaattaccagaagggagtaacattcatcctgtgtttcatgtaagccaattgaagaagcacattggttctagagctgtaccaatggcgaatttgccttcagttggtccggacggacagatcaaaactgaaccggtggctgtgttgaaaagaagaatgattcccaggggaggagttgcagtaacacagtggcttgttttgtggcacaatctaagtccatcagaggcaacatgggaagatgcttcgatgatacaaagtatgtttccgtcttttaatccttgaggacaaggatcagctcaaggggaaggtaatgtcaggaattggacaagctttcttcgtgagaacaat

SEQ ID NO: 38578 - DNA, 777 bp, Oryza sativa
  Clone ID: PAT_MRT4530_42201C.1
atgacaagagtaggctgtggcagttggcttgaggtggcgacgactaggagtgacgatggcggtgttgaagtgaggctgcttgctcccttgttgacggtgatgtggttcggaggtctgctcgtaccttggaaacaacaaagcggcgcggaagccctacttggagaaggcgatgcagcatggacgacgagagctcgacaacacggcttggaggtgtggatgcgatgtcacgctcaaaagcccaagctcgcgtcgcaagcgcatggcagggaggccgagctcgctggtggtggctcgatttctcgatctggatctagggaggaagacccctgcgttctcgatccagatacaggtgatatggttggtcttcgtgaggggactggcagctggtgctcgactggtggcggtgacggtctggctccttggctcgacgtggagcttcatcagtccagctaggtggcgacacagatcatcatggcaatggccgttgtgcaggtagttgcggtgtgcaatagtgcatgtagcttcagtgtgctggcgacatttggtggcttccgttgtggacgctttggttggatgggactccaaggcgatagcctttctcggcttgtcggtgctaacgacagcgatgccttcatgtgttgttcttcttgaaggcgttgctatggagctctcattcaactccacttcaagagatctcagttgctcatgttgtttgcgcctcttgtaggtgatcaggggcatcttagagcagatctgagaatggtacctctcctgcat

SEQ ID NO: 38579 - DNA, 309 bp, Oryza sativa
  Clone ID: PAT_MRT4530_42202C.1
atggccactgaaattctcttcatctggccaaagagcaacacaatgcacatggagacccaggaggctgtccaccaagccacagccccaaacctttactacgacaggagcttgacatgccgatgcatcctcgtcgtggtcgtgctgctctccggaggttgtgtggcagtgttcaaaaagcagcgagttaacgcccagaggttgcctattggcccatttgaactggtgacatgcatgttcctgatgcctcctaggccaacatccatagccaccatctacatggctggagtggcctccatgaaacattgctga

SEQ ID NO: 38580 - DNA, 483 bp, Oryza sativa
  Clone ID: PAT_MRT4530_42203C.1
atggcagatccgccggcgacggccgcgggcggatccagcggtggcagctccctcccccccacctgccttcctcctgcggcctgttcatggtttgggtccaacccggtgaaaccgttaaaccaacccagaccgaaccgctcagccggttatacgtgggttgggttgggctactctaaaacccgtttaaaccgtataaaataccgcaaggttgatgaagcctgggatggtgccattgccggcgtccatgccgttgctgtacgcgaaggcaatgttgtcgccgtggttgcgttcggagacggcgaagttgacgcagccaagccgggaggtgatagcgccgaaatcggacgagacgagagacacgagccgcagcaggagcagtaccaacccctggcatctcttctgccatggcttggattagtagatcggcagtggtggctgcggcggcggcggcggaaccaccgcgcggcgccgcgaaccgcgtga

SEQ ID NO: 38581 - DNA, 595 bp, Oryza sativa
  Clone ID: PAT_MRT4530_42204C.1
cccacgcgtccgtcagcttccaactcgagctcttcttctacttaaaagaaaaaaaacacgcatatctagtagtactgttctagtgttcttgtacttctattcgtgtgctactactgcatctgtgagtctgtgtgactgtacacatctgtaatggagtgcgaaaccgggcttgttcgttccctgaacggcgacggccacgttctgccggcggaggcgacgcgcgcggcgatgctcgtccgcatcaacaccctcctccagggttactccggcatccgcttcgagatcctcgaggccatcaccaagctgctcaatgccaacgtcacgccgtgcctgccgctccggggcaccatcaccgcctccggtgacttggtcccactgtcctacattgccggcctcatcaccggccgccagaactccgtggccgtcgccccggatggccgcaaggtgaccgccgccgaggcattcaagattgccggcattgagcacggcttcttcgagttgcagcctaaggaaggtcttgccatggtgaacggcactgccgtcggctctggccttgcatcgaccgtgctctttgaggccaacgtccttgccattc

SEQ ID NO: 38582 - DNA, 2774 bp, Oryza sativa
  unsure (1)..(2774): unsure at all n locations
  Clone ID: PAT_MRT4530_42205C.1
cggacgcgtgggcggacgcgtgggtcagcttccaactcgagctcttcttctacttaaaagaaaaaaaacacgcatatctagtagtactgttctagtgttcttgtacttctattcgtgtgctactactgcatctgtgagtctgtgtgactgtacacatctgtaatggagtgcgaaaccgggcttgttcgttccctgaacggcgacgggctgtgcatgtcgtcggtgtcggcgccgccgcgggccgacccactgaactgggggaaggcggcggacgagctggcggggagccacctcgacgaggtgaagcggatggtggaggacttccgccagccgctggtgaagatcgagggcgccagcctgacgatcgcgcaggtggccgccgtggccgccggcgccggcgacgccagggtggagctcgacgagtccgcccgcggccgcgtcaaggccagcagcgactgggtcatgaacagcatgatgaacggcaccgacagctacggcgtcaccaccggcttcggcgccacctcccaccgccgcaccaaggagggcggcgcgctccagagggagctcatcagattcctcaatgccggcgccttcggcaccggcaccgacggccacgttctgccggcggaggcgacgcgcgcggcgatgctcgtccgcatcaacaccctcctccagggttactccggcatccgcttcgagatcctcgaggccatcaccaagctgctcaatgccaacgtcacgccgtgcctgccgctccggggcaccatcaccgcctccggtgacttggtcccactgtcctacattgccggcctcatcaccggccgccagaactccgtggccgtcgccccggatggccgcaaggtgaccgccgccgaggcattcaagattgccggcattgagcacggcttcttcgagttgcagcctaaggaaggtcttgccatggtgaacggcacggccgtcggctctggccttgcatcgaccgtgctctttgaggccaacgtccttgccatcctcgccgaggtcctgtccgccgtgttctgtgaggtcatgaccggcaagccggagtacaccgaccacctgacacacaagctgaagcaccaccctggacagatcgaggctgccgccatcatggagcacatcttggaaggcagctcgtacatgaagctggcgaagaagctcggcgagctcgacccgttgatgaagccgaagcaggacaggtacgcgctccgcacgtcgccgcagtggctcggcccacagatcgaggtcatccgcttcgccaccaagtcgatcgagcgcgagatcaactccgtcaacgacaacccgctgatcgatgtctcccgtggcaaggcgcttcacggtggcaacttccagggcacgcccatcggcgtgtccatggacaacacccgcctcgccctcgctgccatcggcaagctcatgttcgcgcagttctctgagctcgtgaacgacttctacaacaacgggcttccttccaacctgtccggtggacgcaaccccagcttggactatgggttcaagggcgcggagatcgccatggcgtcgtactgctccgagctccagttcttgggcaacccggtgaccaaccatgtccagagcgcggagcagcacaaccaggacgtgaactcgcttggtctcatctcctccaggaagaccgccgaggccatcgacatcctgaagctcatgtcctccacgttcttgatcgccctgtgccaggccatcgacctgcgccacctcgaggagaacatgaagaccgcggtgaagaactgcgtgatgcaggtggccaagaaatccctgagcatgaaccacatgggcggcctccacatcgctcgcttctgcgagaaggacctgctcaccgcgatcgaccgcgaggccgtgttcgcctacgccgacgacccctgcagcgccaactacccgttgatgcagaagctccgcgcggtgctcatcgagcacgcgctcgccaacggcgacgccgagcgcgtcctggagacctccatcttcgccaaggtggccgagttcgagcagcacgtccgcgccgcgctgcccaaggaggtggaggccgcccgcgccgccgtcgagaacggcaccccgctcgtccccaaccggatcaaggagtgccgctcgtacccgctctaccggttcgtgcgcgaggaggtcggcaccgagtacctcaccggcgagaagacgcggtcgcccggcgaggagctgaacaaggtgctcgtcgccatcaacgagcgcaagcacatcgacccgctgctcgaatgcctcaaggaatggaatggcgcgccactgccactctgctgaacagaaatggaatactaaaaaaaatgcaaaacaagaagacgtatagcaacacaaaactgaaagatagagagcatttcgagagtgtgaatgttttctactatgtctagatgaacatggtgatgatactattttacggttctttgtagttaacttgatgttactgttgctgtttcagcttctgcggttgccataacctgcagttccgcatggcctggcacgcagctttctgaaacttttggtgctgtaaatttgtataagttgggggactaaagtaaattattttgttttaaaaaaaaaaaaaaaaaaaaaaaaaatgaatgaatgaatcttagtgtgaaaaaannnnnnnnnnnnnnnnnncncccccncnccttgattggatggaccttagggggaaaaaaaaaaaaaaaaaaaaaaggcggccccaaaaaanncgggggggggggcccttgggg

SEQ ID NO: 38583 - DNA, 337 bp, Oryza sativa
  Clone ID: PAT_MRT4530_42206C.1
gttctttttgagtctgtgagttctgacttatcttaagctatgataggtgctgtccaatttatcgctccgaaggcaccaaaaaaatgttaacctgattcagacaagaccgaataccaatgaactattctaggggggggggccaatccccattttttctttgggcctaccccttaccccaaactttggatgaaaaaacctggaccactcctgcccttttatataacaccatccaccccacaaatgttcccaaaagttcaaaaggggtcaaaatatttacctcaaaaaaaattcaacaaacttttttttgggcccccccaatctcaaacaaggttccttt

SEQ ID NO: 38584 - DNA, 1525 bp, Oryza sativa
  Clone ID: PAT_MRT4530_42207C.1
atccttcccctcggctcgctcgctcgctcgtcggcggggagctcctggtcgggggaggcgtcggcggggagcagtggggagcttgggggcggcggcggcggcggcgagatcgcggaggcggagaagatggggagcggcggatcaggacgcggcgcgcgagctcgacgtctgcgtgcgccacggcgacgacgacgacgactacgtcgtcctccacggctgcgaccgccgccgccagcactacggccacgggcgctcctgcctccacggctgctccggcgtccgcgccgccggcggcctggtccgcatcgtcagcggcgcgcggcaccacgacgagctgtccgtgggcgacaaggtcctcatcgccgccgacgtcgtggtcggcctacgacgtggtcgtcggcggcatcgacgtcgtcgattggaaagaagaaagaagattgcggtcccaaacgaatccgcaagccagggacaaaagaggttcgatttgaagacctttctgagcttagctcttgatttagcaccaaaggaattcagggatcgccatgaccgctacatgtttccctttgaactcttggatggaaaagccgcatcttgcttgcagcaaattcaactaagttttgtatctctcaagccaccaacccaattcagtggtttcccaaagctgaaaaagcttagcctgcacctagtacaggtcatcgcaaaggatcttcaaggcttactttcaagttgttctaatcttgagtggttgagtattgttagatgcaatcttaatgatgatgaactgaaggttgattgtgcactgtcccgactgctatacttgcgtattgcaaactgtgagatatcaaagatagaaatgtatgctctcaagctcaagactttcatttacgaaggagcacagctgcctgttgatcccatccaagcacaggaactagaagttgcagatatcgttttcaagggtgatataacttttcagtatgctctcactgtgctccctgtggtgtttccaagcgtgcaaaatctgactgtgcatgctaattttgggctacaggtgggttccttggttacttcgcaaactaaatcaaagtttattcaacttaagtatttgaagttgctattgcctcaatgttctggagatatggacaacattgtctatctagcttcttttctgaaggctgcccctctccttgaagttttggagatccatgtaagtacttttttcaatgtacctggctacgaagatgcagggataccggttctcaggagcctcccaaagtgtccatacaagaacctgaagagcatatacatcacagggttcagaggcctgaaaggccaagctgaatttcttgtccacgcagtggaaaatgccccggctctggaggtgctaaccattgacacagcaacgaaaataggcgtccgttctgctcaacacatcgaaagcgccggtggttacgcaggagagtgatttctcttctgggcgcgcacccacccacgcgcgagagagagaggcagaggcggtcaggatcag

SEQ ID NO: 38585 - DNA, 1174 bp, Oryza sativa
  Clone ID: PAT_MRT4530_42208C.1
gcgatggccgccggggcatccgcgctgagctccaccagctggcagccgttcaggtgcccgaccgcgtcggcgagccgcgccatggcctcgccgtacctgccgtcgcaggcccggccggcccacctcctggtccggcgccgtcgcggtgcccacctcgtcggcgcacatctcggacatggctcgccccgtgctcgccctctcgaacgccaccgctgccgacatcatcggcacgtccgccccttcctccctagctccgaccaccgccgccgctccctcctctggctccggccaccaccaccgctgcccctccctcccctggcttcggccactgtcgctgctccctcccccggctctggccaccgccgctgctctctcccttggctccggccatcgccgccgccccatccccccgctatctggctccagccaccagcgcctcagctccgaccaccgccatcactctctccctcagctcagctccggccaccaccgccaccccctcctccggctctggcgccgcaccaccgccgccgctctccccccgctgccggctcggccattgtgcctcgtgctccacccggggagccggtcgatccacccggtcatgagctcctgcgccgtgtcgtacttcccctcgcaatagccgctcaccgtcgcaaggcccgccggcgacgacgggtccaccctcaccttctcggcggcgtcgtagctgaccccgtacgcctcccggttggcgcgcatggcggcggccacgaacccggtcacctcctccggctccggcgaggcgcccagctccctcacgcacagctgccacatcacgcccgccgtgctcgcctgcttgcacgcgtccaccgccggaacgtccctgacgagctccgccagctcgcagccgttcaggtggcccgccgcggcgcccatctgctgctgcgcgcgcgtcgcggtacttgtgcacgcaggcctgcgccgccgccctcgccgcgcccggcgccgacgggtccgtcgccagcggccagaggtagctacccacggtggcctcgtacgacctcgccgcggcgttcacggcggcgagcacgaacacggtcacctcctgctccggcgccgtcgcggtgcccccctccgccctctggcacaccgccgccgccgacatcgacggcacgtcccagtcgctgcaggc

SEQ ID NO: 38586 - DNA, 466 bp, Oryza sativa
  unsure (1)..(466): unsure at all n locations
  Clone ID: PAT_MRT4530_42209C.1
cccacgcgtccgcccacgcgtccgcccacgcgtccgcccaagcttaatgtggctccgccactgaatgccatgtgggtttgaacagcatgaaccatgtgctacatattaataagctgacacaaacattttaaatattactaaatatgctattggaattatctttaataaggaatgctttgcaactccattttttttctttgtgcttatgcagttgctacattatgttagttagccttctagtaataataggtaaatcttgtgatttgtggcataacattttctctattgttttctgtacattagttatgacttgcctttgttcccctcaaacaacacggttcttctgttatttattacatggatagatgagcatgccaatggcctggtgctacagctcatgaggaaactttcgaaatataatttaaatacgtgaatgnagtgtgctcattctggaaaagctgtttga

SEQ ID NO: 38587 - DNA, 1080 bp, Oryza sativa
  Clone ID: PAT_MRT4530_4220C.1
atggagagagaagcaggaggtactgaaccccagcctgtcctgggtcgcatggttgcgatcgaggactatattctttatggttttcttcctccgccttctgaatttcttctcttggtcttgaatttctacagccttttcttgctccatttgaaccccaattccatcgccttcctcagtatcttttcgcatctttgtgaggcctacattggggtagagccgtttcttgacctcttccgtttttactatgagttgcgctggatggaaccaaaaaaggtgtccggatgtgtcggtttccgacttcgggatggcctgaagtcgcgatacatccccttccagtgcccttcatctcgcagcaaatggcgggggaggtggttctatcttcagatagaagattcggatccggtcttcattgtttctaaggagcaaccagccaagatttcatcttggactgccaaacccgccttgaccccatccctcaaatctttcgtcgatatcattgatgacctccgagaacgggggttgtcggggtatgaagtcactaccgacttcattggcttgaacagcgcaaccgtgaagcgtcgcgtcggccaattgatgatcagcggcccgacaacgacgagcaacgtccccgtccccctttgcgagaagggggcagtcgaacgcgaagctgccatcaatgctctccctctgactgatatcatcgggccgctcgtggatcatcaggcggcggcgtcgctgaaggaggacgtcgccaaggaggcgtccgatgttgctgccgctgctgccacaacgagtggtggcaacgtcactgatggccttgtcaggacgtccagaaaggtgtcaggttcgagtggctctcgtctggacgcacgccgtgctagatcatccggttcgatgttgtccttgcgttcggaatcccctttcacgactagtcgcttgactccgagtgcagctgcagctcttatcccgctcgactacccattttgcaatgcggccgacaacgtctttgtttctcacgacttcaccgagagggaaggaggatacaactgtgaccttgtgggcttggaagtagtggcgtag

SEQ ID NO: 38588 - DNA, 558 bp, Oryza sativa
  Clone ID: PAT_MRT4530_42210C.1
atgtccgtagctcttacactgtcactactactgacggcggcctcgctcctcgccggcgtagcggacggctgcgacggcgtgccgcggatgtccgccgtggacgcgtgcaagcaggcgagcacggcgggcgtgatgtggcagctgtgcgtgagggagctgggcgcctcgccggagccggaggaggtgaccgggttcgtggccgccgccatgcgcgccaaccgggaggcgtacggggtcagctacgacgccgccgagaaggtgagggtggacccgtcgtcgccggcgggccttgcgacggtgagcggctattgcgaggggaagtacgacacggcgcaggagctcatgaccgggtggatcgaccggctccccgggtgcgacatcacggcggacatccgcgtcgacctcgcctccgccgccgccgccgtcgacgagtgcgccaccttgctcctccagaacggcggcgagcacacgacgctgtaccaaatggtgctgctggatcgggatcgcgccgtgctcgccgtcaggctcgccattctgcttgtgcccaacaaagtctag

SEQ ID NO: 38589 - DNA, 537 bp, Oryza sativa
  Clone ID: PAT_MRT4530_42211C.1
atggagaaacccgccgccgtctttgcagtgctctccatgtcagcgaccgccaccttgctcctccttctcgccggcggcggcggagtagccgacgcctgcagcgactgggacgtgccgtcgatgtcggcggcggcggtgtgccagagggcgagcacggggcgaaccatatcccagatatgcgccgacgaggggggcaccgcgacggcgccggagcaggaggtgaccgtgttcgtgctcgccgccgtgaacgccgcggcgaggtcgtacgaggccaccgtgggtagctacctctggccgctggcgacggacccgtcggcgccgggcgcggcgagggcggcggcgcaggcctgcgtgcacaagtaccgcgacgcgcgcgcagcagcagatgggcgccgcggcgggccacctgaacggctgcgagctggcggagctcgtcagggacgttccggcggccgtcgtcgccgtcgacgactgcgccatcgcgctgctgcaggtgttcggcgtgaactcggcgtggtacaggacggtggtaggtga

SEQ ID NO: 38590 - DNA, 698 bp, Oryza sativa
  Clone ID: PAT_MRT4530_42212C.1
cccacgcgtccgatccgataatcataaaatgcaccgcaatggagaaaaccacctttgcagtgctctcgctgtcactactgcttctcgccggcggcggtggtgccgacgcctgcgaagactacgacgtgccgatgatgtcggcagcggtggcgttcgagagggcgagcacggggcgagccatgtccgagatgtgcgccgacgaggtgggcaccgcgacggcgccggaccaggaggtgaccgacttcgtgttcgccgccgtgagcgccgccgcccggtcgtgcggcgccaccgcgcgcgccgtccgcgacatggcgcgggacccgtcgacgccgccgggcgcgagggaggccggccgggcctgcgacggcaggtacggcgaggccatggcgcggctcgccgacgcggtcgggcacctgaacggctgccagctggtggagctcagcgcggatgccccggcggccatcgccgccgtcgacgaccgcaccaccgcgctcctgcccgtcgtcgggttctcgccgttgtacaacaggggtaaatgccagaaggcagaagctcgtcgttacatggcattggtgctcccgcaccattctgttacatgcacctcctttctcacgctgtcactgaccgccgccttgctcgccaccggcggcgtggacgcctgcgacggcgcgccgcggatgtccgccgtcgacgcgtga

SEQ ID NO: 38591 - DNA, 486 bp, Oryza sativa
  unsure (1)..(486): unsure at all n locations
  Clone ID: PAT_MRT4530_42213C.1
gggtcggttatgacagccttgaatccacgcggcggcggccgctctaaatactggatcccccgggctgcacgaattcggcacgagacaactactccaccaaacaacgacacaccttggtgagctgcaccaccgccggcatgcccgtcgcccgccgctccggcaactccagcttcggcaacgtcagcaatggcggcaggatcaggtgcatgcacgtgtggccgattgaggcatcaacaacttcgagaccctctcttacctgccaccgctcaccgtggaaggacctccttgaagcacatcggatacctcctccgtttccaagttgggttgcccctgcctccgatttcaaccaaggtccggatttgtctacccgtgaaaaacacaggttccccccggatactaacacggcaagttacttggaccattttaaacctnccccatgttccgggatgcaccnaccccaccccngnttctcccnnggaacctcct

SEQ ID NO: 38592 - DNA, 531 bp, Oryza sativa
  Clone ID: PAT_MRT4530_42214C.1
ggccacccgcacgcgcgccatggacgccatgaggcagagcacgccgcgggccatgctgctcctgtgcgccgtgctgatgctggccgtggcgccgccgggcgcggcgacggcggcggcggtggccgggtgcgagtgcggtaatgcggcggcggcggcggtggcgggggaggacgcgcgcggggcgttgcggctcaagctcgtcgccatcgcgtccatcctggcggcgggcgcggcgggggtgctggtgcccgtgctggggaggtcgttcgccgcgctccggcccgacggcgacgtgttcttcgccgtcaaggcgttcgcggcgggcgtcatcctcgccaccggcatggtgcacatcctccccgccgcgttcgacgcgctcgcttcgccgtgcggcggaggcaggggcggcggaggcgggttcccgttcgccgggctcgtcgccatggccgcggccatggccaccatgatgatcgactccgtcgccgccgggtactaccggcggtcccacttcaagaagccgcgccccgtcga

SEQ ID NO: 38593 - DNA, 613 bp, Oryza sativa
  Clone ID: PAT_MRT4530_42215C.1
gtaatattcaatccaggatagtgtcgagcaaccatggatttgtgttttcaaaatcccgtaaagtgtggtgatcgtttgttctccgcattgaatacctctacgtattacaagctgggtacttcgaatttagggtttaatggtccagttttagagaatcggaagaagaagaagaagctgcctcgtatggttacagtgaaatccgtttcttcaagtgtggttgctagtaccgtacaagggacgaagagagatggaggagagagtctgtacgacgccattgttatcggttctgggattggtggattagttgctgcgactcagctagctgtgaaagaagctagggttttagttcttgagaagtatttgattcctggtggcagctctggtttttacgagagagatggatatacttttgatgttggctcttctgtcatgtttggtttcagcgataaggggaacctaaacttgataactcaggcattgaaggcagttggtcgtaagatggaggttatacctgatcctaccactgtccatttccatctccccaataatctttctgttcggattcatagggaatacgatgatttcatcgctgagcttacgagcaagtttcctc

SEQ ID NO: 38594 - DNA, 393 bp, Oryza sativa
  Clone ID: PAT_MRT4530_42216C.1
atggccctggtgggtatcatcataagacagttctgtgtcctctccttggcatcgatgaaggagggaggtatacgagccattgcgccttccatcttcgaacatgttcctgttcgaatccgcaaacgcaggacggtcgcggaagcactgctcaataaagcatggatcagagacatcagcggggcacttggagttcaggcaatccgagaatacctcaagctctggtcacttctgcaaaatgctggttgcaatccctctgagcaagatgtgatctgttggaaatgggacagctcaggacaatactcctccaagtcggcatacagagcattatttctaggtcgtgttccatttcaatcagcaccgatatggaaatctctagcgccgcccagatgctga

SEQ ID NO: 38595 - DNA, 579 bp, Oryza sativa
  Clone ID: PAT_MRT4530_42217C.1
aagagcccaaccatagggggattggaaggataaaagccacacaaaagttccctacaaggtcaagccttacaaggaagggccacccacggggggcacatttataaaagcaaaaaaactagataacttatccaacccccctacattggtccaaaaaacttggcactaaagaacatagcaacccaagggaacttggtttcgaagggaaggccattaaaagccctaacaagggggggggtagcccccaaaaaagcatagaaaaaagaaaaggggggggcccgaaaaccaaaaagggttttcaggggggaaaaaaaacccaccgggaggggattattggggtcaccagcctttactatagaagaaggaaggttggcacccacattggggattggcctaataagcccattattttcactttaaatgggttgggccttttttggcttgcttgcaaaaaaaatttcaggaacaaaaacaaaaggggggggagcacgaatcaccttttcggtttaaggttctacatcttcaggaccaaaaactgaacttgaggcctttggaaactttcctggagccattgggccccca

SEQ ID NO: 38596 - DNA, 465 bp, Oryza sativa
  Clone ID: PAT_MRT4530_42218C.1
atggcagaccatgacattgctagggaagagatgcctcactcgctggcgcggctggcggctattggcagcaattatgtcttcgatggcatgcagaggggcggtggcgtcacgtggaagggtggcgatggcggtgcacggtggagcggcggcgacggctacggccgcacggagggaggggtcagcaacgacaggcccgggcagtggagctcgagctgcggtcggcggattcggcgacagtgctcggcagcggcgggcaaatccggtggcggcaccgacgcgtggagggagggaggtggcgccagcacctacgcgagccacggggaggtaaggtgtggcatcggcgcggagggcgagggaggcgatgccggtgcaaggagggagaagattgcggcgctagcaaggaggcaacgccagcgccagtgcgtggagggagggggcgctgtcggccaaacttgtgtcgaataa

SEQ ID NO: 38597 - DNA, 568 bp, Oryza sativa
  Clone ID: PAT_MRT4530_42219C.1
atccggccgccacagcctcttcctcgacagacggctgccggatccggccttcacgaggttcgaagacgtggatccggcggccgccacatccatcccccaaccgccggcgtctgcagcctcttccccgactcctccaatgccacccgaccgccggctgccggatccggcctccacaaggttcggagacgtggatctggcggccgccgcctccatcccccaaccgccggcgtccgcggcctcttcctcgactcctccaacgcaacctgagcaccggccgccggatccagcctccacgaggttcggagacgtggatccggggggccgccgcctccatcccccaaccgtcggcgtccgcggcctcttccccgactcctccaacgccacccaaccggcgaccgccggatctggcctccacgaggttcagagacgtggatccggcggccgccgcctccatcccctaactgtcggcgtccgtggcctcttccccgactcctccaacgccacccgaccgccggcatccgcggcctccaccatctccttcacccacgggagccgccgccatttctga

SEQ ID NO: 38598 - DNA, 470 bp, Oryza sativa
  Clone ID: PAT_MRT4530_4221C.1
aggtatagtagtaatgagctatactattatccttgctcttagggcacccacaatggttagctataaggttggctatattgttcttctcttctatctatctctcacttatgcatttaatgtatttgtcttggagcttgtgataagctagctcctgcatgagagcctacacctttgatttttcactctctctttcctctatctaagtttatagtaggcttataagtaactattatacttgctctaatccaatcgacgttgcttgcacacgacacctcatcatgcgacccgtactgcatgtctcttttgctaaaataattactcgtacatttacatataactgcatgcatgatgctggtttaataatcccatctcatgctccgtgacaagatcccggggtgctcaccaaatctttgcatgcacgcaagttgccatgagctgctcctactagctagttgctgttgttgttgatg

SEQ ID NO: 38599 - DNA, 310 bp, Oryza sativa
  Clone ID: PAT_MRT4530_42220C.1
ggcgattggttttcttactcggccgggaatgcatgcctcaagtcacaaccatgggcacgccatgctagctgctcctgcccttgctctccctgatcatgtcctccggctccctggacctgaaccaggacttctgcgtcggcgacctggcccgcggcgacaccccgcccggctacccgtgcaagcccgagggcgccgccaccgccgtacactcctgctaccgcggccgcagccccgccggcccgaccgcctcccctcccccccccccccgcccccccgccccccccccccacgcccccggcgcgccccgccc

SEQ ID NO: 38600 - DNA, 556 bp, Oryza sativa
  unsure (1)..(556): unsure at all n locations
  Clone ID: PAT_MRT4530_42221C.1
gcacgagggtcggatcaggtagctagtgtgagggtggttaggcaattatcctgcagtgaaacacctcagttcagtacgcacagggctgggcatggaggtttttcacgcggtggccgtgtattgtgccgtgagccggtgggactgttcttgaattcttagcggtacaggttcacacaaagctagtgatgcggttttgagggttaaccgtttctcctttttttcttttgcctttggaaatggccaggtgtttattcagatatcctgngaaatgaccatgttttttattgataactgaagagttgagatgatcaaatcaatcttatgaaatgagtaacagtagagatgatgataccgaccggtgctagaacatgtagaaataaattggggcttgtaaaagtaacaaaagtaacaattttactccactgcagagaggctatacagtctggtaaaatcattcattgctccaccttcaccagatctctgaatctagagtgatggtatgaaaaaagtgctctctgaatctgccaacatgtctctacagactacagtatttgtg

SEQ ID NO: 38601 - DNA, 212 bp, Oryza sativa
  Clone ID: PAT_MRT4530_42222C.1
atcttttcgacgaggaaattgaaggacaaacaggagaaattcaactgcgtgtagcggtgaatgacagaatatacataatttgaatggagtttgagaaagtgatattcgatcaggaattctttgactctataaagataatggaggagaaaagaaaatttaacgaacaatcacctaagaaactgattaaagaaactgaacctacattcaatttg

SEQ ID NO: 38602 - DNA, 2786 bp, Oryza sativa
  Clone ID: PAT_MRT4530_42223C.1
atggggttccctgcttctgttgccaacctggggaccaacgggagggcccgcggcgagctcatcgcatttggcttcgaggatcagaagggggttcagttctcgtcgagagggagtgtgagtgtgaagcctagtgatgatagcgatcttcttttgaagccaccgcagaagccaatccgggcgaatgggccaccggagagcgtaaatgcggcatcaccatctccgtcgaggccgacgttggaggatagggataaggttagggagtcattggatgaggtgttggagaaggctgagaagctcaaggcatcaacctctggaaatggaattggaaatggtgacttgaggcagaatggcgcgtcgaagcctgatagttcggcaacgccagcagcggagggtgcgaattcgaggaagacaaaaacacttaagagcgtatggcgaaagggaaaccctgtgtcaactgtacataaggtggtcagagatcatccacgctctgaaagtaggaatcagtctagttctacagcaaaaccttctatgccagctccaacaaaaccagtacctcctctactaacaaaaccttcagtagtagcaccaccacctcgtcggcctgtcaaggctgatacatcaaaggagaaaaagggacccatcctgattgataaatttgcttccaataaaccaatagtggatccagttgtagctgcagcactgatagaacctgtaaagccagtacgaggcccaccagcaaaagtcaaggatgatcgtcgtaaaaaaacaagcacaccagctggtcctcgccgacgaatgccaaaaaatgatggtttagttgatgaggatactgcagtgcgcaaggggaggagatggagcaaggcaaaacgcagagctgcaagacttcagcttgaggcttcacaagttgaagagccagttagagtcgagatccttgaagttggtgaagaaggaatggtaattgaggaattggcatatcaattggcaattgacgaatcagaaattctgcgatttttatctgtgagaggagctatgcttgacaatgttcagacacttgataaagatctggttaagatgactaccctgttggattatatacgcaagagcaaggtggtggcatctgaggctggcggaataacacaagggattggtgcctatcaggttattgtacaggttgatggaaaccctcatgcttgtgtttttcttgatactccagggcacgaggcatttggtgcaatgagagctcggggtgctagggtaactgatatctgtatcattgttgtctctgcggatgatggtgttcgtccacaaacaaatgaggcaattgcacatgcaaaggcagctggagtccctattgtgatagccataaacaagaatggaaccctaaacaagggtgatattgttgtgtgtggtgaggcttttggaaagatccgtgcaatgtatgatgatggtggaaagcttatcgataaggctgggccatccaatgccgtgcaggttattggcttgaataatgtaccccttgctggtgatgaatttgagtctgtggacaaccttgatgttgcacgtgaaagggcaaacgcacgtgctgaagcactgagaattgaaaggatatcttcgaaagctggggaagggaaagtcactctgtcatccattgctgcatctgtttcatctggaaaacaagtaggaattgatacacacgagcttaatatcatccttaaagttgattttcagggttcagttgaggccattaggcaagcaatccaagtgctgcctcaagaaaatgtctccttgaggttcctacttcaagctccgggagatgtgagtgtcagtgatgttgatctggctgttgcttcagaagggattatatttggttttaatgtcaaagctccaggatcagttaaaagctatgctaagaagaaaagtgtggaaattcgtctgtacaaggtgatctatgatttgattgatgatttgcggaatgccatggaaggacttcttgaacttgctgaggaggaagtaccaattggttcagccaaagttcgtgctgtttttagtagtggcagtggcaaggtggcgggttgcatgattactactgggaaagttgttcatgactgcaatgttcgggttcttcgtaaagggaaagaagtttatatgggtacacttgattcgttaagacgggtgaaagaaactgtaaaggaggttggtgctgggctagagtgtggcattggggtagatgattttgacgaatgggaggaaggtgatgtcgtggaggcattcaacacagttaagaagacaagaaccctagaggaagcctctgcttctgtgactgctgctctaaaggatgccggcgtccagctgtagaagtggcaaagctgataggcatccatcatacaacaactgcaggggaatcggagccaaatttatcatggcaagaaagaaagaaagacggggtgcattattgatcacattgctgttgttagcgaagaacaacaaactggttactcgatcgtaaatacgacgaacttatgcaagccatagtacagtagtcaccaaacctgagcttagccgtctcttatagcctgcatcagctgatgctgtattttgatgtacataacaagagaggagacagctgttacctttttttagtttgccactaacaggtagataagcagtgttgtctaattttacaccacctgatttttgacacaggatgtaattactctgtaatggtgacaccatcattattcaatcatcattcatgcatattcatgatgttcaaaaaaaaaaaaaaa

SEQ ID NO: 38603 - DNA, 2711 bp, Oryza sativa
  Clone ID: PAT_MRT4530_42224C.1
atgacggatacagtactcagcattgcaaagtctctggtgggaagtgctgtaagcaaggttgcttcggttgccgcagaaaagatggtcttgctgctgggagtgcagaaggagatatggttcatcaaggacgagctacaaaggatacaagcatttttgatggctgctgaaccatcaaagaaaagcatactattgaaggtttgggtgcagcaagtaagggatctatcctatgacattgaagattgccttgatgaatttacagttcatgtgagcagccaaaccttgtcgaggcagttgatgaagctaaaggatcgccatcggattgccatccagatccgcaatctcaggacaagaattgaagaagtaagcactaggaacatacgctacaacttaatagagaatgacctcacctgcaccactactgatgagaggaatttatttatggaagacattcgcaaccaatcagctaacaacattgaggaagctgatcttgtgggtttttctggacccaaaagagagttgcttgatcttatagatgtccatgccaatatcggacctacagaagtcgtatgtgttgtcggtatgggtggtttgggtaagactactattgcaaggaaaatttatgaaagcaaagaggacattgcaaagaatttttcttgctgtgcttggattactgtttcacagtcctttgttaggttggaactactaaaggatttgatgatgaaactttttggagaggaagtactgaagaagcagatgagagaactcgaagggaaggttccacaagtagacgacctcgccagctacctcaggacagagttaaatgaaaggagaaataacaataaagggagctgggtgatagtaacaacacgagatgttggcttagctaaggagtgtacttctgaattgcttatctaccagcttaaacccctggaaataagctatgcgaaagagttgcttctaaggaaagcaaataaaacaacagaagatatagaaagtgataaaaagatgagtgacattattactaaaatagtaaagaagtgtggttatttaccgctggctatactcacaatagggggcgtgcttgccaccaaagagataagagagtgggaaaccttttatagtcagataccttcagagcttgagagcaacccaaaccttgaagcaatgagaaggatagtgaccctaagttacaactacttgccatctcatcttaagcaatgctttttgtatctaagcatatttcctgaggattttgaaattaataggaaccgtctggggagtaagtattgctctaagataagctttgactggagcattatacggtcattaactatgtttgccgagaggcccgtagaactagagcattcagtttgttcatctcagttgaggatgttacgggtcttggatctaagagatgcacaatttactatcacacaaaatgatgtcaacaatatagtgctcttgtgccacttgaaatacctacgcattgcaagatacaataatgcatcatatatttactcacttccaaaatccataggaagactggatggtctgcagacattggacttggattcgacgaacatttcaacactgccaactcagattactaagcttcggagtctccggagccttagatgcatgaagcaatatgatttttcttctttcacaacatgtttaactgacacattgtgcctgcccatgatattcacaccttccgttagtacctctgatcgtgctgaaaaaattgctaacttgcacttggccaccaaaagcttccgttcaaaatcaaatggcgtcaaggtaccaaaaggaatatgtaggttgagagacttacaaatattgggggtagtggatattagaaggactagcagtagagtaataaaagagttggggcagttaagcaagctgaggaaactatatgtggtaacaaagggatctacaaagttaaaatgtgagatactctatacagccatccagaagctctattccctacaatctctccatatggatgctgtgggatgcacaggtattggaacacttgagtgcctagattctgtttcatcgcctcctcccctattgaggacactcaggttgaatggaagtcttgaagagttgcctaactggattgagcggctcactcacctgaggaaattctacttattgaggaccaaactaaaggaaggtaaaaccatgctgatacttggggcattgcccaacctcatgcttcttcatttttgtcacaatgcttaccttggggagaagttagtattcaaaacaggagcattcccaaatcttagaacacttgtgactttcaatttggatcagcaaagagatattagatttgaggacggcagctcaccccaattggaaaagatagaaataggcaggtgcagattggaatcagggattattggtatcattcaccttccaaggctcaaggagatttcagttgaatacaaaggtaaagtggcgatgcttgctcagctggagggagaagtgaacgcacacccaaattgtcccgtgctgcgaatggcaatggaccgaagtgatcacgatcttgctggcaacgccaaaggatctcctccctaagcaggagggagacagctcgcaagtaatcatgttgacaacaaacgacagagaacagatatgcatagctcaaggtggtttgatcaagtgatcatctcctccattggcattctccgtcgtccctg

SEQ ID NO: 38604 - DNA, 747 bp, Oryza sativa
  Clone ID: PAT_MRT4530_42225C.1
atgcctcgaccgacgcagtcgaatccccatagcagcagcgcagccccaccatttccggtcaagggggtgttcacctatgagcaacttacggcggcgatgggaaacttcgcggagccatccgaaacctctttgctgcgtccccagcgtgctccacttcccggccgcgtgccacatcctcctcaagggctgccccacttcgctgacttttgccccagggccgcctccatcgccttccccgccctcggccctctttatcctctacgatggcttttccttcgtcggcctcgtatcagagacaatccgaagcatggtggtgggcgggaggcgcaagatcgtggacatgctatgccgctgccctaccctgccggccgccagccgcgccgctccctgttgcacgtcgttttcccttcaatccccgcggccttgctcatcgggagccagtggcgggaggagctcaccggcctaccggagaggaggggaagagaggatccccagctgcttgaggagcctcctgagctcagcctcctcccaagccccacccttccgcttgtcatcgtcgtgggggaccgcagccgacgaggccatggcgcggccgtccccatcgatccgctatctccgcagaggaacacggctgcattcctattcgctcacatcaccaatctcggccagtgtcagcagcttgggatgcccacggcctcctcgatggcctccatggtgcgggaagaggggagaggaagccggcggtga

SEQ ID NO: 38605 - DNA, 450 bp, Oryza sativa
  unsure (1)..(450): unsure at all n locations
  Clone ID: PAT_MRT4530_42226C.1
ggccggagcncgtcggagctcaggcagttcagggcgatggcctcgccggcggtcaaggacgaggncgcccggggatttgccggcaaattggtctagatatatccgttaattaatccagtgtaatctagttaattaattagctgtatagtatagcacgctatagtctaagtgtccatctgaggagcctagctggagggaaactatttttatctttatccctcgagtagatgtaattttatttatttaaaaaccatctgaacaattataaaaaattgtcgaaaaaatttgataacnctcatccnatatatatgttagatataaaaaaaatncnttgagatataaaaagattaatttaatgtatgaagaacaatttaatatatgtactatgggatattggtttccttggttctttggcccaaaaaaaaaaaaaaaaaaaaaaaaaaaaaaaaa

SEQ ID NO: 38606 - DNA, 276 bp, Oryza sativa
  Clone ID: PAT_MRT4530_42227C.1
atggcgtgtttggcgaatttgcgaggctctttcccgttcgtttgcgccaatccgcttctactttggctccgcctacctcaggcctttttgatcctaacagttttggatcctatttgtcttcgtatgattgttctcatgcttggcgagaagagtgatgaaaatgttgccatcgttttcaaagtagcaaatatgaaggggaaaaaattagcaacatttactaatccaatgttagtattgattcttaaagcatcttcaggttttgctagaattagctaa

SEQ ID NO: 38607 - DNA, 708 bp, Oryza sativa
  Clone ID: PAT_MRT4530_42228C.1
atggccccgaagcgccgccgtgcccgtccggcggacgagagctcgacgccgccgccgccgcctcctcccttgcggacggcgccttcgcatttgcagccggtggttgttttcgcccacggcgccggcgccccctcttcatccgactggatggtccattggaaggatatggtgaaggatgcgctcgatgctatcgaagttgtcacctttgattacccatatatgtcaggtgggaagcgcagggctccgccgaaggcggagaagcttgttgatcatcaccttggtgtggtgaaggacgctgtagcgaagcatccagggcacccacttgttctgatggggaagtctatgggttcaagggtcagctgtatggtggctgattcagatgatattattgtttctgctgtcatatgcttgggttatccgttaaagggagtgaacggggcagtgagggatgagacactactgaaactgaagattccaacaatgtttgtgcagggcaataaagatgggttatgccctttggataagcttgaggccactcgcaagaagatgaactgcaagaatgaactgcatgttattgatggtggtgaccactcctttaaaatcggcaaaaagtatcaagagtctactggagtgaatcaacaagctgcagaaatggaagctgttaaagctattgcaaaatttgtgcagaactccatagcaggaacctga

SEQ ID NO: 38608 - DNA, 176 bp, Oryza sativa
  Clone ID: PAT_MRT4530_42229C.1
atggcgacaaaggatgtagcggcaacggtcatggcggtggcagaggcggagacggctgcgctcgcgacggcgacagcgatgagggaggcggccagcgatagggacggcgggaggtggaggtggcaacgcgatggggaggtggaggcggtggcggcggcgggggagtggaggcggcg

SEQ ID NO: 38609 - DNA, 470 bp, Oryza sativa
  Clone ID: PAT_MRT4530_4222C.1
acgcttacgcgagcggccacgcgtacggtaggttaatgtgttgagtgatacgacaggtacagagcgaaatgctgggtccatgacagttccttagatacactgctcagctgcctagaacgacgataatatgtgagggcaaagggaggatatccataagaggacaggcaggataggcatgctgttataccagagaggggcagcacatgacagaactcttatgtgaccagaactagataggaccaaattgcgacagatagctattatcacacgtggcacaacctaataggttggagccatgctacaagaccgggatagccgggcaggaacatattccttcctgcaaccagggcagaggcataagatctgggatctttgatgaggagaagagacacatgcataatttacaaggtcaaggacagaagcttgagtttgtaagggaaagatgctattagcatattggacatgtcaaa

SEQ ID NO: 38610 - DNA, 176 bp, Oryza sativa
  Clone ID: PAT_MRT4530_42230C.1
agggtaagctggtacgcccggcgtcccgcacccgtattcccggatggactcacgatttgcgtacagtgttcgcacactttgcatgcatgtgcacgcacactggtgtgacagctatactgagatgaactaactaacttgtccgcggcaaaaatgagtttttaacatttatgcttccc

SEQ ID NO: 38611 - DNA, 690 bp, Oryza sativa
  Clone ID: PAT_MRT4530_42231C.1
atgaaggagatcatcatccggatgaggccggactctgacaaatgccatcacaaggcactgaaggtcgcagctgcagtcagtggcgtcgagtcggtcacggtggccggcagggacagggacctgctgctggtgatcggcgacggcgtggacgagagcaagctgaccaagaagctgcggagggaggtcggggaggccgagatactggagctgcgcacgctggacgccggcggctcccgcggcggcgggggcgcggcgtcgctgcagctgatgacggcggccggcgcccgcaacggcaagggcggcggcgccgtcgtgttcgcgcagtcgtcgccgtaccacggctggcacgggcaccccgccactcccggccggagcgtgcccggtgtggggcgcatcatgtacccggtgacgacgacgacgacggccaccgcggcgagccccggcgccgcgcggtggccgggcggcgagcagtacaggtcgtcctcgccgcaggcggcgctctattacccccgcaaccccccgaacgcgtactactacggcggcctgggcgtgcgcgacggcctcgccgtggcgcgaagccacccggcgaactactcgccgatggtggagcggcacgaccacggcgccgttgcccgtggcgggcggcgccggagggccgggagacggcccagctgctgctcgatcttgtag

SEQ ID NO: 38612 - DNA, 722 bp, Oryza sativa
  Clone ID: PAT_MRT4530_42232C.1
atggtaaattctggggaaaagtacaccgaaggtccctcagcttgtcatcgagttacaaaattgtccccgaccgaaaaaccaaacatccggcatctcttaactaatcaaaaccagttcttcgatggttttgactcgggttttatccgacgccggccgacgagtggagaggaggccggcagcaggatccgagtggtccggccctaccatatatcagaaaaaaaaaacaaatggcgatcgcggcatggaaagcggaaaccgaagcgtcgcgcggacgtgtgcgtgagcgtgacatactacgcacgaactggggcagagatgcagatcgaatcgaggccgtcatcgaaccgttgtgctggctggtcatacgcctcgaaccgtcgcatcgagcccgccgcggccgccgtcgcatcgagcccgccgcaatgcggccgccatcgcatcgatcccactaatgaccaccacctatcgccggtctcctgccgttgaccaccacgaattgcctatctggcggaagagaaaacgcgaaagaaagagatgccgcgcgcgaaattacaggatgaggaggtgcggtacatgaggtaccgacgatttctcactgttcgatgaagtcagattaacggtcaggatttggtactatataacctgaaggacagtaaaaaacctcttaataggaatgcgcagctaatcacttattaccctcttgtaaaaaaaaaaaaaaaaaa

SEQ ID NO: 38613 - DNA, 312 bp, Oryza sativa
  Clone ID: PAT_MRT4530_42233C.1
aagaccaaaaatttatggcccattatttttggatattcaagcaacctagcccaaaacaaagctgcatactgttattataggcaggaaaccaccagcgcgaggctggagcttaggtcacttgccaccaaccttctcgaaacctgggggcttgttggccatgaacctaaacaccgggacctgcctgaagttgacaaaaccgatgatccggacaaacgcatcggggcaggcccttttggactccttgagcgacttgaacaccgggggggactaggggcacccgcacatgggcagctaccacctggcccacaacct

SEQ ID NO: 38614 - DNA, 231 bp, Oryza sativa
  Clone ID: PAT_MRT4530_42234C.1
atggcggcggcggtggcggctccctccccctacccgccttcctcctgcggcagatccggtgtcggtggcgtccgtggtcggataaggagcggcggctccctccgccgcaactcttctccctccggcgacggtagcggggccgccctggacaaaacggagtccgcgacgtgcgtggcccacgcgacgttccacctgggcctcgatctgtatgtgtgggccttcatatgttga

SEQ ID NO: 38615 - DNA, 1197 bp, Oryza sativa
  Clone ID: PAT_MRT4530_42235C.1
atggcgaagcagtcgtgctgccacaagaagaagctgaggagggggctgtggtcgccggaggaggacgagaagctcatgaatcacatcgccaagtatggccacggttgctggagctccgtccccaagcttgcaggactggagagatgcggcaagagctgcaggttgaggtggataaactacctgaggccagacctcaagaggggcaccttctcccaggaggaggaagacctcatcattcagctgcattccatgcttggcaacaagtacgtactgtatagtagtagcacacacatctgtcaatctctctcccgttctgtgccatctctgacaatggcggctgccactgccactgcactggccaggtggtcgcagatcgcggcgcagctgccggggcggaccgacaacgaggtcaagaacttctggaactcgtacatcaagaagaagctcagggaccgcggcatcgaccccgccacccacaagccgctcgctgccgactcctccgcgacgcccacgaacacgacggcggcggcggcgtcgaggtcgacggccacctgccgcgcggtgttcagcgacgccgagctgcagataccgacggcggcggccgtgcagcagcagcagcaggcgccgctcgtcggcgcaatgcagctggtcgacggcatcaagatgccgctcgacgactactggcctgcggcggcggcggcggcggcgccctcgtcgtcgacgacgacgttctcggcctaccaccacgcgctgagcatgcagcagcaggccgcggccggatgcggcgccgccgccgccttcgacatggacgcgctgtcgcactgcggcgtcgtcgtcgccccctcggcgtctagctccagcacgctcacctccatggccggcctcagccccgccgcggccgacgccgccgagcagagcgccaacgtcgccgccgccgccgccgccaccaccaccaacctgccgtggctggacctggggcacgccaaccccatcgcgacgatggaccactacgccggcgtgctggacgagctccggtggtccgactacttcgacggcgcataccaagcagcgacgacggccacccaaggcggcgcccttcaagggcagtgcctctacgacggcggcggcggcggcggcaaggacgtcgacgatgcagtccaattcgtggacgtccatagcctaagcaactggtgctaa

SEQ ID NO: 38616 - DNA, 126 bp, Oryza sativa
  Clone ID: PAT_MRT4530_42236C.1
atggacacctatcgtgtagcctcagcgcgcctcgctgtcgacgggtacgtcgcctaccaccgaaagcgcctcgctgtcgacgggtacgtcgcctaccaccgaaagtacaacgccattaaatcctga

SEQ ID NO: 38617 - DNA, 459 bp, Oryza sativa
  Clone ID: PAT_MRT4530_42237C.1
atggtgtttactttgaaagataagcatggaccagaagacaccaccacctccgccgccctcgtgatcgccgccgccgccgtcgtctacttactcctgttccccgccgcggccacgacggcggcggcggcgctgtcacgcgccgcggcggtcgtcgccgcggcggcgatcaccgtcgtgccgcggatgctcgccgccctgcagtcgccgtggttcctccgcgccggcgggggcggcgcgctcacgagggcggcggcggcgtcctacgtccaaatgtgcgccgccgcgagcccacctcgcggcgacgacgacctcctcgccgccggcgcggccatggcggcgctgctagtggctgttctcgcggcgtcctacatgctactacagcggcagcggcagatcgccatagtggcagcaacattaggggcgagtagcagctatgaagaacaacagtacaagcagtag

SEQ ID NO: 38618 - DNA, 572 bp, Oryza sativa
  Clone ID: PAT_MRT4530_42238C.1
tttttttttttttttttttttttttttttttttttttttttttttttttttttttttttttttttttttttgggccccaaggaaaaaccccacagggaacatttcttccttttttttcccctttggggaaaattggactaagggggccccaaaatatagcaacttaaaacaaggggggaaatttcctaaaaccaagaattcgcccctgaaaaccaccccaatttcgccccatttaaacaaagtgggtatattttgggacaaagataggaaaaaaaaatttaacggggccccgggccccccacggtccaaaaattcggggaaggggggggaccccttgggaggggcgatgacctcaacaatggacccccccccgggggggatgggaaaaaaaagggagccccccctgagggttttgagggaaacccacctcccgcttccacgtgggaccccccgctgggcgatgtacatttctacggggaaaaaaaaggggaggggcccaaaagaaacggggcccaggaaacccaccacttttcccaaaaagggggggggcatggggaccactgtggggaggg

SEQ ID NO: 38619 - DNA, 3504 bp, Oryza sativa
  Clone ID: PAT_MRT4530_42239C.1
atgacatcgccagctcacggcggcagcttccgcgtcctgcgaaccgctcatgtcgcgccgtcgtcgtcggccggtgccggctgcaacccactgccggaggccactcagccgctcaccttcctcgacgcgatatggctcatccgcccacccgtcgagcggggcttcttctaccgcctcggcgacggcggcggtgcgacgtgtgacgtcgacgtcgcgctgtccaggttggtcgactccctagcccgcgcgctccacgtcttctacccgctcgccggccgcctccgcctcacgcccggcaaggccaaccggtacgagctcttctaccagcccggcgatgccgtcgccttcaccgtcgccgagcacgacgtcgtcggtctcgatgagctggccacggacgttcgcagggaggtttccaagattgcgccgctcgtgccggagctcccggatggcggcgcggtgctggccgtgcaggccaccgtgctgctacccgcgtgccgcgccctcgcccccggcgtcaccgtgcaccacgccgcctgcgacggcgcgagctccacgcacttcctccacacctgggccgccatctgcgcaggcgccgcagcgacgccgccgccgcccgtcatcgaccgcacgtccatccgtgaacgtgaagacatccacgacgtcatgaccgctcgactgcacgaccacgtaaagactacgacgatcaactcgcccgacgtcgtcgacaacaagctccttgccactttcacgctgtcgagggaaaacctgcagagcatcaaggaaaggatcgccgacgtggcgacgcgccgcggcgtgccgcctccgtggtgcacgtccgtcgtcgcgacgttcgccgtcatatggcggtgccacgtccgggccgcactaggcgcgggctgcgacgtcgaagaagagcctcggaaccatggccgccgtgcccacctcctcttcgtcaccgatctccggtcacggatggaaccccgcgtccccgacaagtacctcggaaactgcgtcggcccgtgcttcgcgtcggcgcccagaacggacatcgctgctgccggcgcggatggcctattcgcggcctgctccgcgatcgccgccgccgtggacgaaggaacgagatatgatcccggctactgggacaggtacagggagcagagcttagaggtgagcaccagtggtgctccgccgctttcggtggctgggtcgccgaggttccgcgtgtacgacgtggactttgggttcgggaggccggcgaaggtggacgtcgtgtccgtggcaaagaccggggcgatgtcggtggcggcggcattgaggtgggcatcgctttgccgccggagcggatggagaggttccggaggtgcttcggcgaagacgtcgccgtcgcgtggccgtcgtcgtgatccagtgataagtggcattgaatatatgtcaatagcggggccgcctaatgggcgactggtcgcgcaggggcgcttccagttccatctagcgttctcatcaaaaatcacatctctgctataatgattttctttttctctagattataaagctgatatcctttaataccatcagcatagcccacaaatatgcagcgatcacttctattatcaaatgttactctcttttgtgctgacacttgagcatacaaatgcaaccaaatactctctcatatgaccacaaatgacaggcttttaactataccaagcttcaaaaggtgtatagtttggtactgccttgtaggacttctatttaaaatataaattgcagtgttaactgctttagcccagaaagatttaggcgtacctatgtcttggactatagagtttgccatgtcattaatcgtccgatttttttttgcaactccattttgttgagcactatagccagccgttaactgtcgtctttggatgcaagcattttcacaatatttctcaaattttattgagatatattctcctccttgatcgctgcataatactttaatttttcgattactctgaatttccaccatagacttgaattttttgaatgtattgagggccgctgatttttcttttagaaaatatacccagatcattcttgtataatcatcgataaatgtgataaaatatcaattttctccttgtgacattgttggcactttaccaactatatcagtgtgtactagttccaatggtgcatttgctctccaagctccactatgtggaaaggcagttctaatttgttttccaattacacaaccttcacatgggtcaaacttcagtgtaataaatagaaggtcttgtaccatacctttagtcttgagtagctttagtgctctgtaactaagatgacccatcctcttgtgccatagattagaaatatcaacttcacttctgagagccatttgagtaggatgattcatcttcaacaaaaaatttatgtttgtccccatatttattttgcaaccagacggttatttttacgatccaatattttgcaagaaaattctttcttttcactttgggatatagattcaatacccatgtgaatctttgcatgatatgatgaatctatttcttgaaataaatttggatcagcagccatgtggtttgtacaaccactgtcaataacccaaacattatccttttcttcttaagcagtacgacaagagaaaatcatttcttcatatttttccttttcttgggaaaaattagcccgattaatttctcgagttctttttctattctttcttgattgtcttccttctgcatcatgttctacttggaaaatcctttttttttctgaaaacaaccacggtcttgcattggaaatccatttttctgaaaattcccgcaaaaccttaagttttgaggcctgaagctcaactttgattgaaatgcattttcaacgaagttcccttctcgttgaagctttctttcttcatgagattccaacgagctcattagttgctaagttgtgagagtcgacaagtctttcgactcctcaatagcagcaacaatgtactcgtattttttaggctgactgattaaaatttttatccatgaccttttgatccttaatatcctcaccatagaggcgcatctgattaacgatcttaataagtcttgagaaatagtcttttaccttttctgacgccttcatttgtaaattctgaaattgcattctcaaagtttgaagcttcactgcaagtaacttctgagatccttaaaactcctctttcaacttatcctatgcttccttggattttttggtgccaataatacgtggaaatagactttccacaactccttattggatcaagaacaaggctttggcgtccgtcattcgattctccgtcagagacttattatgttccgctataagagtgatgagggtgttaggtcccgataagagtactttccaatatcccataatccttgatagtagcagtgtccacatcttgatgcaccatatatcataactttctcttgtaaatacaggaaccatagaccgcgtcat

SEQ ID NO: 38620 - DNA, 369 bp, Oryza sativa
  unsure (1)..(369): unsure at all n locations
  Clone ID: PAT_MRT4530_4223C.1
cattgtcccttctgtgcagtacttaagatggaaatgtggagtcctgtggcatattcttataatnatncttgagtactgtctgaaatggttgacttattcttatcataagtcctgtggcagacgatggtatatggaagtggttattttaattataatttcatccctttctttgtgtgcatatgcatagtttgtaatanccttgtnggagtgattccttgtaacctcattattaactaattataaatttctaactttcctggctataatctcttattttgacagctcttggcactaggancccataacatcaaaacacacccgtgaaacttacatagntatatttattacaacagtagntccatacttcca

SEQ ID NO: 38621 - DNA, 240 bp, Oryza sativa
  Clone ID: PAT_MRT4530_42240C.1
atgaggatcatccctgaatttaggagtgcaacctggagcttgatttctttggaatccggagatggctccaaggaggactctttagtcagactttatgatattgcgggcttagattcagggaaaaatgggaggcataacctgtctcgcaatttctcccagtcactgtttgcacacccgacggctccgatgaaggaggtggctcgtaaaattcgccctgaggagcagataattggaaaatag

SEQ ID NO: 38622 - DNA, 3369 bp, Oryza sativa
  Clone ID: PAT_MRT4530_42241C.1
atgatcgccacggcggcgctgccgcccgccgcgcgctcggcggaggcgctcgccgcggaggtcggcggccacgcccacgcggcggcggacgagctgcgggggctcgcgcggaggctcgacgccgtgggggcggccgcggcgggggccgaggcgagggaggcccgcgacgccggcgccagggcgtggctgcgggagattctcgacgcgctgtacgagctcggggacgcccgcgacgacttccgccgcgccgcggacgccgccgccaggcccaggaggcagcaggaggagggacggagatcgtttctccactggtttacgataccaccaaacctttatgggatgcgatacaagactttaaaaaccagtatcaacagtctgaatatgaaaatggatggcattttacagaagggctctgaattaggtcttctaccaatcgatcaggagatcctgaatgaaaggtctgaaatctctttggaagtgatacctgatgattacattgtgggtgacattgaaaatgaagcaaacaaattgattgatatattgacagacaggaaaagtgcgaagacacttgttgccatagttggtggtagtggaacaggcaaaactacactggcatggaagatacatgatgatcatcgcacaagaaatgcttttggtatgatcgtgtgggttagtgttttcaatgactttgatgatattggattgttgtctgcaattgtaactgctgctggcggaaatcctaaagaagcaaaaaacaggacgcagcttgagttaatgctggcttccatgcttaaaggaaagagattcttgctggtgcttgatgatgtgcggggtcatcaaattgaagaaaattccctagaagctcattggcatgtttgtggtcatggaagtagaattttgatcactactcgagatgagaatgttgcaacaaaactaaatgcttcttacatccaccaggtaaaggaattgagttttcagaactgttggtccctgctttgctgtaatgcatgccttgatgagaaccttcatggaaacactttaaggaatatagggataatgattatccaaaagtgtaagaagattccaatggctgttaagattatcggcgctgttctaagaagaaaggagcaaacccaagaatcctggcagagagtttatgagtttgaaggatggtcttttgatgaccttcggggtgatgttcaaggcttaactggggccatatatttgggctaccatgatttgccgtctcatctgaaacaatgtcttctttatttatcactctttcctgaaggctctaccatcaggcagcagtttgttactcaactgtggatttcagaaggtttgattgatcgacaagatgactgtagtgctgaaaagatcgcagaggagtattatgaggagttgatatcaagaaattttctgcagctggagactggaaatcgcgatataactaggtgcacaatgcatgatcaaattagatcctttttgcagttctttgttaaagataaaatttgctctggtgaagtgaaacctggcaccaatggaacttctagtgaaggactgagacatgtgtggattagcggcaccagtacaacaactaacctcgaagaaactgtgaccagcttgaagacagttattctctacaagaacccattgagaaatcaagggttagacaagctatttaaggggctcaaatatttgcatgtgctggaccttggtggtactgaaattaggtacatcccaaggacactggaatttcttgttcaccttaggctcctaaatctttcattaacccgaattacagaacttccagagtccattagttatctcagaaatctacaattcttgggtctccggtactgcaattggctacacacccttccgaagggaattggcaacttgcatagattacaaactctcgatcttcgagggactagtttgcatcaagtcctgccaagtttggtaaatctgaagcagctctctacgctgcacggtttcacagtaaatcgaacacccatacctgaggatgatccgagtgggtggcctcttgaaaacctaaaagatttgaatgcattgagaagcctgcagatactgaagatggaaaaagtatcagacttttcaagggtgaaagaagcaatgctagagatgaaatctcaacttaaggaccttgaaatatgttgtagcaatgatgatagactggctgaagcacgagaggatgattctaggacgctgaaacagatatttgattcactttctcctccacagtgtctgaaatctctcaaaatagtgagctattatgcaagacactttcccaattggcttccttgcctcacaaatctccagcggcttgttcttagtgattgcaaattctgtgagcatatgcctgacctgtccaagctaaatcaactgaagttccttaccataactggatgctctaagttgcttacagtggagcaagagtccacaggtgtcacacaggcatttcccaagttggagcagttgcacctcaaagatatgccaaagctagtatcatggataggatttgcatctggtgatatgccctcccttgtgaaattttgtctcgaaagttgtcccaagttgaagtgtctcccagaaggcctcaagtactccagagtcctaagaagtgtgcaaatacgacatgctgatagccttgaggtcattcaggacttacctgtgctaaaagaattgaatgtccaagcctgcaatgagctcaagatagtctcaaaccttccattactcgaagtgttaacaatccgcagatgccctagattggatgatgtcagtggtgttcactatctaagtcatgtctgcatcacagataaagaactgaggaaattaccagattggttgtcaatacatgcaccagtgcttcagacattcaatatagtcggcgtatcagaattgcttgatagattacttcccaatggtgaagactgggaaatcattcgtcaaattgacaaagtttatgctaacttacttgatgaatcaccattcttcacttacacaaagagctctggtgatttccatgtcgatcaaagaattggagaaataaacaaaccacctgttgtgttaggacatggaactgcagtcggaggcttgagcattcctgatcactctgttgagataagctctcaaattggtgtgtctagagtacctatgaaccgaatatccacactgaggtgggtcgtaaggagttaccttgttccgtaccttatcatggttatggttgttatgcaatttctttcgtattatctacacaacaggtcaactagggagatctggctggttcagacccttttcatcttcttcgcgacagtgtttttgcttctgcttgtatttctggactga

SEQ ID NO: 38623 - DNA, 261 bp, Oryza sativa
  Clone ID: PAT_MRT4530_42242C.1
caacatctagttcacgaatggcgtgtccatgttctagtttggccagcatttccacttccacgcaagattccgtcgccaagtgcacgaccttccctgcctctaaggaccgaagaatccaacctcatacaccctctccatgcccacctggagggcacccaccttcctcagagcggcggaggaggatcatcccgccgcggcggctacggaggagaagaatccagcccccgaggtgatcgtgccatcgcatgttgaccccaacac

SEQ ID NO: 38624 - DNA, 124 bp, Oryza sativa
  Clone ID: PAT_MRT4530_42243C.1
ggatctctgccacggggagcccaccgaaacgaaaagggggggtcccacagacggagagggcagcgccgccagaccagcaagaaacaaagagcgcaagacgagcggaccaagggaacaagaaccc

SEQ ID NO: 38625 - DNA, 162 bp, Oryza sativa
  Clone ID: PAT_MRT4530_42244C.1
atggagcggggcgggccctgcgacagcctctgtcgcttccggattcacctaggcacgagaggggactgcccgttgcccgctggggacggggtcaagtcgagcctcaagcttcgtgcaaagagcgaaaagatctgcccagagtcgtcgttccgcgaagattaa

SEQ ID NO: 38626 - DNA, 858 bp, Oryza sativa
  Clone ID: PAT_MRT4530_42245C.1
atgatgaggggcttagggccggctgcggcggcggcgctcggaggccgctcggcggcgaggtggtgcacgtaccggcgcgtcacagtcgccgtatgcctggggaacctcgtcgccgtgctgctcgtggtgaaaaagctggagaaggtgttcgctagggaggagaagagacggaaggagttgccgctcgagctgaagcagaaggtttcctatgagattttagagaggatgcgtgatttgggggagaacagcaacacgaccgaacaacgagaagctttagagtcctggcgtttagagaagctgaaagacatcagaagtgcatctgctcagaatttgtcgatgtcagacctctctaatgaggaatcaaggatgttaaaacgagcattggagttaaattggcgaatgctaatggacgacattggcctttggatacctgttagtgtatggcatactgaacatgatgacaagcctgagaatgaaccagaagaagaagagataatagcaggtccacctttacccccagaatgcaatgctcaagtacataccgattacggtggtgctgctgttcgatggggcttaacacatcataaagaaagtgcagctgattgctgtcaagcttgtcttgatcaggctaaaagggccagaccaggggcattaaagtgcaatatatgggtttactgtccatcagagtatggatgctactcgccagataaatatgaacacaaacatcaagagtgctggttgaaacaggctgatcaccctaaattgaacttcaaagacaggtattctgagtcgtacagggatgctcatccatctgctcccgttgttgtgccatggatgtcaggtgtcatcactgtatga

SEQ ID NO: 38627 - DNA, 790 bp, Oryza sativa
  Clone ID: PAT_MRT4530_42246C.1
atggcggttgtgtctagggaaggtgacagtgatggtaaggagagcggatccgccacagctgggcctcggagcacgaatccctcgtcgtcgcagccttcctccttgtcgtcgcagccatcttcctctctccctcatgcattggtggcggtggcagtggcggtggcggaggctcaggcaggcacgtttagcgtcgagttccggacgcgggacgggtgccggctgggcatctccaggtacccggacttcgcgtacaacgcccagggcggccgcggcgtcggcgtcgtcgccagcagcggcgaggatagtggcacggttctggtcgagttcgacgtgtcaagcctgtacatcccggcgatgtccggcgcgacgaccaagttcctcgggctgccgctgccgccgttcctcaagatcgacatcttgcccgaggctctccgcggaaacatcgatccaacaagtggtcaggttgatctgaagttcaggtcgaggttctgcttctcggttggaagcatctaccgagcaccgccgctgttcgtcgacacaacgctgacctccgaggagtccagtggagccataagacgaggaactggagaaaggatggacggcgaagggagatgcaagctggtaggggtggccgtcgtcgaccccattgatgacgtcttcatgaacaccttcctcagcctgccgaccgagtgcatcgcttacttgaacgccaccatctccatcactgaaccaagctgatcttgcctgactcaggtggctgaatagatcctaatgcgtggagaaacgcatg

SEQ ID NO: 38628 - DNA, 1373 bp, Oryza sativa
  Clone ID: PAT_MRT4530_42247C.1
caacttgaatcatttgtactctttttctactttttctactttttcttcttcgaaaaagagttcgccaccaaccgtccatccaaaaaatacaccagctatctcacatgaactctagctaaccgtctagactaatctaaagactacaaaagccaagaagaattttgaaaattggtatatgagttcgtggaactgtaccaaatttgatgtggcgttgcacatccgaacggagttcctgtctcctgcaggcagtagatactagatagcctgtaggcagctcatacagtgatgacacctgacatccatggcacaacaacgggagcagatggatgagcatccctgtacgactcagaatacctgtctttgaagttcaatttagggtgatcagcctgcaagcatgcaaacaatgaattcaaagttacttcgctattctttggcagtatgaagccccatctttaggatcaacagcactgcaccgtaatcggtatgtacttgagcattgcattctgggggtaaaggtggacctgctattatctcttcttcttctggttcattctcaggcttgtcatcatgttcagtatgccatacactaacaggtatccaaaggccaatgtcgtccattagcattcgccaatttaactccaatgctcgttttaacatccttgattcctcattagagaggtctgacatcgacaaattctgagcagatgcacttctgatgtctttcagcttctctaaacgccaggactctaaagcttctcgttgttcggtcgtgttgctgttctcccccaaatcacgcatcctctctaaaatctcattaggaaaccttctgcttcagctcgagcggcaactccttccgtctcttttcctccctagcgaacacctttttccagcttttttacagcttccacgagctcgacggacacggctgcgcggcgaatccggatggactcctcgaccagcctaatctgctcctccgaatacttcaccgccacgctgggcgcggaggcgaagtagccgggggcggagtagagcgagcggaccacgagcagcacggcgacgaggttccccaggcatacggcgactgtgacgcgccggtacgtgcaccacctcgccgccgagcggcctccgagcgccgccgccgcagccggccctaagcccctcatcatggcgccgccgccgccgccgccgccacagccagtaccatccttcctatcgcccctagggtttctcgccgcccgccaagcacgagttgtgcgctccgcacgccgccacgcgcgcgcgcgcgccgcgcgttcgcttcaggcgagcggcgccgtttcggcggaggagggaggaggaggattcggggagcctcgtgccgaattcctgcagcc

SEQ ID NO: 38629 - DNA, 303 bp, Oryza sativa
  Clone ID: PAT_MRT4530_42248C.1
ctgtactctgaacaaattgagaccaagacggcgatctatctagcgttcctgaatacatatcaaacacacaaaatttgaaacatacaactgaatgacaaaaatgcccaaactaaggacacagctttaacagaaggaatgaaacgaggagccccagcgccatacattttgccaatccaatgtaaagccatagcaggggtcattgtcccatctaaaggttcttgcaggattacatgctcaatagcctgtctagctgtgatccttttgatcgggttgtaccgaggcattttaaagagaaggctcaaa

SEQ ID NO: 38630 - DNA, 407 bp, Oryza sativa
  Clone ID: PAT_MRT4530_42249C.1
gcacgaggcctctgccgaattcggcacgaggggccgccgccgccgccgccgagtacggcacggcgaggcacgggcgccgccgtcggcttgtttaagattttttggttcatccgtacgcctcaccattggctgctcccatcctcctcctacctctccctttggccctcggctagaggaatccggcgagggcgtttgcgggcgacgcggtactggcggcgaatggggatttagggcatccctcgatgatatatatgtcctgaaacgaagctacgatgggaagagcaaaaaggaccaatgacttcctgaatggtgtaccgtggtagactcgtcccattttggacgcgagcctgtcgaactgtcggcgctcgtacgtcgacccgtacgtgcaagactcggcagtagcagtc

SEQ ID NO: 38631 - DNA, 342 bp, Oryza sativa
  Clone ID: PAT_MRT4530_4224C.1
atgacctcctcgaggctggtcggacgcgcgcaggggatgtacgtcgccgccggcaaggacgcgttgtcgctgatgatgtcgatgaacttcgtgttcgccgacgacggcccgtacaacggcagcagcctcgtcgtgtttggcgccgtgttcagcagcttggccgcttggctgccgaccgctcgacgccgccggccggtcgccgccgcgctgccctctccccgccgcctggcgtgctcgcctcctgctcgcgccgggaggagctgcgcctggccgccgcccgctctccgctgccgccagcgccgccaggtaggtctcgggtttgaccgtgtgcagcgagggtaa

SEQ ID NO: 38632 - DNA, 513 bp, Oryza sativa
  Clone ID: PAT_MRT4530_42250C.1
ctgcagcccaaaaatgctatttggaagtgttggggtcacctccgatgcaaattcttcatttggttggctatcaatgataggtgttggaaagctgatcaattggctaggcgtgggctgcagcactcggtgagctgtccccattgtgatctaagtcaagaatccatccaacacattttgatctcatgtgtcttttctcgccaagtttggacggcaatcttcttgaggctggggttagccgaggtagcgccttagccctctaccgaccgctttctaaggtggtggagccaagcgaccaagaatcggccgaagaaggtgcgaatggggattaactctttggtgaccctagtggcttggaagatttggaagtaccgcaatgactatgttttcaatggcgccaatcctagagttgtgacgatcttgcaagtggtagaaaatgagagtcatccttggagtgttgcaggagcttctggccttcaaaagctcgtttgtgggacggcaagcctaggcagctaa

SEQ ID NO: 38633 - DNA, 430 bp, Oryza sativa
  Clone ID: PAT_MRT4530_42251C.1
tttgttttttttttttttttgggttttttttttttttttttttttttttttttttttttttttaaaaaaaaaaacaaggggttaatggggacattaagcccctagtttaggggggccccaaagaaaacaccttctttttttttcctaaaaggggggccccaagattggcccgaaaatccttttggccaacatattaattcaggggggactggataagggttgggttcccgggttagacacattccagccggccttttggttttagttcacactttcacaacttacttagggctcccggtgcccctgggggggttgggggaacaaaaactcaagggccctccctgaacccttaaattcaagcatgcggggggctacttggaagctttgggagactattgggtcaggggcctttgaaaacccccccagaagg

SEQ ID NO: 38634 - DNA, 321 bp, Oryza sativa
  Clone ID: PAT_MRT4530_42252C.1
gaatatataaatatagactgggtattatatagacatacattgttcaggacctgaaatgatcaaagctttttataaaaccctatttcaattttctaataaattaaactagctagacaagcatatgtttttaatcctcgcttttctacatagacatgtaatgcatctgctctaaatacaccaaaagttaatgctgtgcattatccatataacaaaattcttcaatttttatctgatatattatcagacaaagcgcttatttactttttgtttaaatcaaaacataatcaaagggtttatactcttattcactactacttttct

SEQ ID NO: 38635 - DNA, 2112 bp, Oryza sativa
  Clone ID: PAT_MRT4530_42253C.1
ttttttttttttttttttttttttgacgtaaaatattctctttttgccggctgctccctcttttctgttgttccttttcaagctttcagcctacttatatagaatttctccaggtatgatctactctgattctattgtgcaacaaatttcctttgcaaccatgtaaataaattaacacaacatttcaaaaatcgacatcactaacagttcctatgtttctctccctgaaatcctaatttagtacaacataccttcaaaatttggtggcgtcagaggctcagagctgatatagtgttgaactgcaccaattccatatgcgttatatcatctggcagtaatattgttgggagtaacactggcgtgctttggctgaagctgctttatataatactttgatcctcgtgataaattgatgcgttttcttcatgcatatgaaacaacccatataatggaccaagagaaggataaagttgcataccaatcagctgtccgtgtcgtgagcaagaataatttctccagaccaagggacattgctgccttctcaatatagtcaagcaacttgtccccttgacctcttcctcggcattcttcagatacagcaatcgcagcaacttctccagatttatcttcgggaaatgggaacagagcagcacatccaatgattgaaccatccctttcaacaacatagaacgactccagtgcttcaagaagctccttatcagttctcttcaccaaaacaccagattcttctagtggtcgaagaatttttcttatcccaagaagatcctcctctctagctatccttgttccttcatacacatccctagctatcattgttcctgtaccatctcttgtaaacaattctaatagcagtgatccatcaactgttccatctatgatatgaactctttgaacaccaccatggcatacaaatgctgctgctgccaactcagaaagataggcatttgatctacttaaccgctcttcaccaccaatagcaaatccttgctcaccagataaaataccatttccattgttgaaacccaagccattatggaaagaagcagcatatgcaccaagaggaccgcttccgttcaaaaatggtttgacatcctcatgcaaatgactgataccctcctcgtccacaaccttgacataatttgctgcgatatcactttgcttagcacgctttctgatcaacatatctgcttcctcaagagacatgaaaggaatgacacgtccatgctcatcaaatatctggccatctacaatgcagatcagcttatccgcctcaatggctaaagcacacgcagtagctacttcataagtgttgcagtttagcacttctcctgagctcgagtatcccatattgctcacaacaactatgctatcactatcaagcctttcttttattcgtgaaacatcaattttcttaacctcgccggtgaacccataatcaataccactaactacttcttttctcttagcaccaaggaagttgccacttgcaacattatccacaagaccatgccaacgtccaataacaccatgtctacgaagattcaacattggaggaccaggagaaagcttggcctcaatagttaatcgtattcttccagctgcctccattgcagcctctaatgaatcagaatcagtaactcggtactggccaacatacttagccatcctccctctttctgacaagagcttatcaatttggacatgtgttccaggacacaagaacaaattgaatccccaaaccatgaagaagtgaaatatccatcccaatacctgcagaatgccgtcgaagtgcggccctgacacgacctcgctggagatgacgaccacgaaggtgctccccctgtggccccggatgtacggccacgcctccctgaagaacccgacgaactcctcccgcgcgaccgcgccgccaccgccaccgctaccgccgccgggattcgcggccccgcagcagcaccggacaccgcgccgcgccccgttcgccggaggcagccgcagggcccgggcgggctcggcgccaccccgagcagccaccgtcgccgctccttcggcggcggcgcgagcggaggcgaccgacgacggcgaggccat

SEQ ID NO: 38636 - DNA, 112 bp, Oryza sativa
  Clone ID: PAT_MRT4530_42254C.1
cccgggctgcaggctgtggattgcgggacagcggcagccggtgatcatgtggacgcgtcgccgccgcatgagctggcgcggcgagcccgcacagcagcatcgacagctccgg

SEQ ID NO: 38637 - DNA, 168 bp, Oryza sativa
  unsure (1)..(168): unsure at all n locations
  Clone ID: PAT_MRT4530_42255C.1
acacgtacgacggcgacggcagcggcggccatgtcgtcggacgcacgacgccgacgccgctgggggaaggaacgaagccgaagcgncgatgtcccgcctgatgcgctgtccctcaaggccgtcgactgggncaccgacgccacggccgcgccgacggacgctcaaccg

SEQ ID NO: 38638 - DNA, 651 bp, Oryza sativa
  Clone ID: PAT_MRT4530_42256C.1
atggctgaggtggcgccaacgtggatgtcacatcggatggggaagggagaggaggccgggcggctcatcggacggctcacggcgtgcggcggaatccggcgaacgacggcgagccggagggagatgcgggcaccggcagaaggaagagaatacggggaactcattccatggcttggattggagagaggggacacgacggcggccggcagcggtgacgaaggcaggggcagcaacaaggcggcgatggtgcgaggcaggaacagagaggatgggatggggagggggctcggcattgggttttataggtggcgaagtcggtttgggaggggagaaccgaccttggcggtcaagcgctcggctggtggccgcggcggtttcgtgggcggtgcgaaagcggcgacggtgtggatgtgttgggcggcgaagccgggttcatggtggaccgggtgcatggcggcggctcacggaaacgaacggccgagatccatccatccaaaacggacggccaagatccaacggatccacgaccgggccacggggaacgacgacgatgacgtcagcgatgacgtcaccaccggcggcggctcgggcggtgcaagctcgccggcgaacgacggcgcgacggcacgaacggagagcaccaggacgtag

SEQ ID NO: 38639 - DNA, 498 bp, Oryza sativa
  Clone ID: PAT_MRT4530_42257C.1
atggaccgcctcctgctctttcgcccccggaaaccggcctcctcctcctccgtcgccgcggtggcggacggcgacctcctcgagcgcgacgtcctctggcccgcctcctctgccccaggcctcctcgccgcgctccccgacgacgaggggagcaagaagaagaagcgcgcgggccccgccgccgtacggtccgcctcccgacctgtcccggagaccgccccgttgaccccgacggcgggcgcggcgaggtcggcgcccgtgaggataccctcggaggccgcggcggcggcggggaggagggggaggtgggcggcggcgcagtcatccgtcggcggcgaggacggggacgccgccatggtcgtcccgccgcacgaggtcgtcgcgcggcgcgccgcggcgcacagctcggtgctggagggcgccgggaggacgctcaagggccgcgacctccgccgcgtccgcaacgccgtcctgcgccgcaccggattcctcgactga

SEQ ID NO: 38640 - DNA, 657 bp, Oryza sativa
  Clone ID: PAT_MRT4530_42258C.1
atggcggcgacaacaatgccgccgccgctgctgctcgtggccgcggcggcgctcattgcggtggtcactgctactgtcgccgccggcgccggcgaaggtccggcgtgcgacacggcgcactgcggcaggggccagtgcgtggagcagccgggcccgctcggcctcgacaccttccgctgcgactgcgacgccggctggtccaacatgttcgcgttcctcccggcctcgccgtgcaccatcccaaaatgcaccttcgacaacgcgtgcttcaacatcaccttcaacttccccaggggcttcccgctcactgacccttgcgtggccatcaactgtggttcgggaggcgagtgcgtgaaggaggaaggattgagctaccactgtgcgtgctcgccgggattcgtcaacatgttcaacctcaccatgttcccctgcatcaagaactgtgctttcggcaaggattgctccgcgcaggggctctcgccgccggggagccctccgccgccaccgccgccgtctccgtcgtcgtcgtctccggcgacacctggtaatgatagccacgactcatccgggcatccctcatgcccaaaaggcaatgcatctactgttgctacttctactacttcactaggttacacgattacacgatttttcacgtga

SEQ ID NO: 38641 - DNA, 402 bp, Oryza sativa
  Clone ID: PAT_MRT4530_42259C.1
atggatggggaatacggcgacactgtacatgccaccgacgcaaggctgccatatgctgccgctttactctctccttgtggtggctcgggagacgacaacccggccgtcccctctctcccacctcccctcctccacctcgccgccatccgagcggccgtcggcaaagccgtgtggctgcaaggacggcggcggggcttcgtgcttccaaacctcaggcggcggggggacccgcctgggcggcggcgacgaggactgccaaatctgcgccgcttggccggatttggcgggacgacgatggcggctggcgacgtcggtgggtctgacgacgatgatggtcgggacgagcggcgccaagcggggttgtggccgatggtggcggggatggcgacagcagcagggtag

SEQ ID NO: 38642 - DNA, 286 bp, Oryza sativa
  unsure (1)..(286): unsure at all n locations
  Clone ID: PAT_MRT4530_4225C.1
caagtatgcntngttgantcataggatcgtnatacctggtgggaaaaggcaactntatggtttcttagctgaaaaagaagacctggaggcgttcaatagacatcatggaaaagactatttgaaatacgagatgaaatcttataacgagatggtggttacccaattgaagcagatnagtgaagacaaccaacaactganttatgtnaagantgagatggttaagacagagcgacattctaaagangtagaagaagccttnggtgttgagacccagaaacttcagngg

SEQ ID NO: 38643 - DNA, 232 bp, Oryza sativa
  unsure (1)..(232): unsure at all n locations
  Clone ID: PAT_MRT4530_42260C.1
gggcaaaaggngatgacacattttttttgcctgggaaaacaggcaaaaagccaccctagggtgaatgcgctcgatcatttacaggcaatggtgttcttcttttttaaaatccaggcggcaagcacgaattttacaaatgttcccaactcgaaactttggcggatattcagcaccttatcttgacacgtgtggaacaaccgcccgaggtaacttgtgactctataactatttc

SEQ ID NO: 38644 - DNA, 125 bp, Oryza sativa
  Clone ID: PAT_MRT4530_42261C.1
aaaaaagaaaggtcaccttaattctatgtcgatcaccaatagattcaccagcaagatacatacttgcggtgagctaatatgctgactgccgaacctcgatattgggaacattacgttcaagacac

SEQ ID NO: 38645 - DNA, 480 bp, Oryza sativa
  Clone ID: PAT_MRT4530_42262C.1
atggggaggatgacgacagtggatccgagggtggggagggtggcggcggcgtatccagtggtggggagggagatggcggcagatccgacggtatatagggattgcgtcagcggcggatctggtggcggcgatgggaggcgcgccataacacatcctagctatagccgatggagaatcgtcttccctgaacttgttgatgacggaagtgcggtgcgtcgcgtccgagccgccggtgggggatacatcaacgaagaaaggaggggcgtcgatcggtggccggagctagggaacggagtaactgcggtggccggagctaggaaggggaggggcagtggtggtggtagctgcatccggtggagcgagcggctgcggtggccggagccatgggagggaggggtggcagttgtcggagctaggggagggagaggcggcggcggcggtggtagccggagccgggaaaggagcagcggcggtggttag

SEQ ID NO: 38646 - DNA, 458 bp, Oryza sativa
  Clone ID: PAT_MRT4530_42263C.1
ttgtttgtttttttttttttttgtttgatttgtttattttttttgtattgtttcttttgttgggtgggaacaaggaccaagaaaacttatgcccggggcacacaccgacaaagcctaaaccaatacaaagttccaacttgggggggggggggggggggttttctaaacactttaaaaaaaaaacaacccgagaacttgggggggttaaaaaacccaaagggggcttattggccgaaaaaggctacaatttttacgggggggggccggggggttcctaaaaggaacaaaaagggggtttgccccacaacaagaaaaacccctttttttggggtaacctccaccgtggggcaggcacccgaatttggggggacccatggggggggagctgaaaaggccagaaaaattgaggggggcccccaatggacaatgggaaacgggggggccaccaaagaaaagcc

SEQ ID NO: 38647 - DNA, 506 bp, Oryza sativa
  Clone ID: PAT_MRT4530_42264C.1
tttctccctccttcacttggtttcttgttgtgcaactctcgtcgtctcgttcatccccgggctggcatcgcaggagctggcgtctcgacaggatcagcagccgcagcagctgctgctgcaccaacaacaacgacaagaagaagaagacttggagtcggagcagcagcggaaccagtggttggtgatccggctgtacgaggccatcaacgcccgagaccacaccgccgcgcacgccctcctcgccccggacctcgagtggtggtaccatggcccacccgccagccaccacatgatgcgcctcctcaccggctgcgcctcgccctcctcttcctccttccgcttccgcccgctctccgtccacgccctcccggcctacgacgtcgtcatcgccgagggcatcaccggccgctaccacgacagctactgggtgcacgcttggaccgtgggacccggccacaatggggatagggtcatcacccacctccgcgagtacctcaacaccgatc

SEQ ID NO: 38648 - DNA, 1275 bp, Oryza sativa
  Clone ID: PAT_MRT4530_42265C.1
atgagcagcagcagcaacaacaacaagaagatgaaggccccactgagcttcgctagcagcaggcagggctccggcggcctctcccagatatccgaggacggcatcccggacctcactgacagcatccatggcgccgctcatcatcatgggcgctccgaggagaacgtctccacccacgaccacgtcgtccgctccttctcctccggtgggttctcgatcgggtcatgggaggactccaactccatcgtgttctccacgtcgacgggcaaatcaggagcgcacggcaacgacgacatcatcgccacccttagcaactacgaatctcagcttgttgcgcccagggagatggctggcgtagagaaatacctgcagatgcagcacgaccaggtgccattcagagtacgggccaagcgtggatgcgcgacgcacccacggagcatcgcagagagggagagaagaacgaggatcagcgagaagctcaggaagttgcaggccctggtgcccaacatggacaagcaaacgagtacttcagacatgctggacttagcagttgatcacatcaagggactgcagagccagctgcagatcattagacattatccagaaaatttacagtgttggtccggggtagcaacatgcatgggtccttggaaaggacgatttaccactctggctggccgttctgtgctggtccagtcggttctcttctccattccagtccatgaatctatggcgatcggcctcccagtctgggttattaaggccattgacaataagcgtcgcgccttcctgtggacagcgctcagggcacccctactaggatggcctaaaggccccagtctagcagaccgtctccgacatgttcgcggcatccactttctttgtgccgggaaatggttctttctttggtttgcattccagcggcgctgctggacggctgatctcatccagaagcgtggcatcgatagtcacttgggctgccccttttgcgttcaggatcttgacacggcgaaccacatcctcttcgactgcatgttcgctcgctggttccaagactggtggtcgtccttcagggcctgcttacctgagcacctctacgacagcttcgactccctagtgttcctggtctcttggcgtctgtggaaggagcggaattctagggttttcgactccgctctctcttcgatctcagtggttctagagttcatccattcggaggggcatatgtggtctttagctggcgtcgtcgcttttggggatttgttgggagtctag

SEQ ID NO: 38649 - DNA, 412 bp, Oryza sativa
  Clone ID: PAT_MRT4530_42266C.1
tgcggccgacgaggacgcgccaggagcggcccacaacgctgactctggcggcggcggcggcatgcaagggctagggcagggcgggaggtaccgggcagcgggcgcggccgacgaaaaggcgttaggagtgggcgctgccgcccgcaacgcggactccggcggcagagggccacggcgggggctggcatgggcgacggcatcggccctcccctgctcagatctgcccgctgccgccctcccccgccccaatctgccggggtcagcactcccctgccctaatctgatggcggcggccctccccgctcggatcctccggctgttgcgtgccctcccccctcccccgatccaccggcggcagccctcccccgcccggatccgccggctgcagccctccccctccccgatctgctag

SEQ ID NO: 38650 - DNA, 1122 bp, Oryza sativa
  Clone ID: PAT_MRT4530_42267C.1
atggcgaaacccttccccgatccgccgaaaccgccggtccccgagccgccgaaaccgggctccgatggcgcctgctacgactgtccctctcctcctcctcctcctcctccccactcgcgtgaccaccgccgcgtggtgatcgcgctcgccaccaccgcgtccctgctcttcgccatcctcctcgccttctccgtctactgcttcatccgccgcaggcgccagcagcgggcgcggcgtgaggcgcttctagcacctcccccttctgatgcggctggaggaggcggcgcaccgggtgcgccggtcgccgccggcgacggggcggtgggcggcgccggggagggggagggggagggggaggtgctgcaccacgcgtggcacatccgcaccgtcgggctcgacgaggcggcgatcgagtccatcgccctcgcgcggtaccgcgccggcgccggcatgctcggcgccaccgactgccccgtctgcctcggcgagttccgcgacggcgagctcctccgcctcctccccaagtgcggccacgcgttccacgtcccctgcatcgacgcctggctccgcgcccacgtcaactgcccgctctgccgcgcccacgtcctgcaccccgccgacgccgacgccgacgccggggacggggaacgcgtcccgccacccgccggcgctaacggcggcggcggcggcggcggcggcgcagccaccgaccaagcctcgagccccaccgatcaaaccgcggaccaagaaaaccctggtcaacagcagcagggggagcagcacgagctccgggtacaaatcgatcggcgcgaccagcccagctcgccggagccgccgcgccggagtcccgacccgcgcagcgcgcagagtttccggcgagtagcctccatgggctcgcgctcgccaccggcgccatccgaggatgctcctgaagacgagcagacgacgacgcagagcagcaaagagaaacaggggagcggcggtgactctgcctgctgcggcaaggcgccgtcgggctccggccgcttgcaccacatgaggaggtctttctccggcggcggaggccggcgatctctcccctcgcggcatggccgcacttctagctcgatgctgccgttgtga

SEQ ID NO: 38651 - DNA, 204 bp, Oryza sativa
  Clone ID: PAT_MRT4530_42268C.1
atggccaacatgcagctgtctctgggagactgggaaaatatcaagaaagaaaggcgaaggcttcttgttgaagaagctgaggataaacagcagggatggtttgtggtagatgagaaaaagggaagaaaatacttcatggctcatgatagagccgacaagaaagttggagtgacaatctcagaactacacatgatagtgatctga

SEQ ID NO: 38652 - DNA, 355 bp, Oryza sativa
  Clone ID: PAT_MRT4530_42269C.1
gaaaaaaaaaatcaaggggatggaacaagggcgacacaaaaaacaaatgttggtttcacttaaaaattaaacgccatgggccctttaatctaatccttctagaagctcattacacgcgcgcagcgcacgacgtgaggaggggggagctcgccggcgcggaaaggccggaattggatcgatcgatcgttacgccttcctccttgggaaggcgaccccggcgcgttctcggacgacgccaccggacggggggggggcgggaccatggcccttgagggccaggagggggccggggaacgccccaaggatgcccgggagggcgtcgcggacgttgagcgcgatgtaggagaggagcagc

SEQ ID NO: 38653 - DNA, 476 bp, Oryza sativa
  Clone ID: PAT_MRT4530_4226C.1
tactaacaaaagaacagagactagagttgaatgcccgtcgtagggttgcaaggcaatctatgccagatgtggaaatccatgatatgaatgcttgccgtagatcaagacgacaaaatgttactcctggggaaagatctgctcatctggcacgacgtaacgcactctatgcagctaggcgtgacaaaccatgcgctgaatccattgcactagagtgccctgagggatctatcccattgttgctaaatccaacgccttgcttggaaacaaccggtgatgtgccatctacatcgagcctgcaaactgagcatgctgtagatcatcaagcgcgatcatgcacattcaatgatggtatcatctatatatgttttcattcgtactcgcaatttgggggaatttaactatattccacttttagatttggcaactatccaaatgcccttcttaagtttgctcttaattttttgcccctcttagat

SEQ ID NO: 38654 - DNA, 980 bp, Oryza sativa
  Clone ID: PAT_MRT4530_42270C.1
caaattatttgtcccaaacccaaccccccaggccccaagcccaacggtagcaagcagcaatgcggcggatgctgctgctgttgctgctgcttccggcggcggcggcggctgtgtccctccctccgtcgaacaaggtggtgttcatcctgggagggcagtcgaacatggcggggcgcgggggcgtggtggggtcccactgggacggcatggttcccccggagtgcgcccccaacccctccatcctccgcctctccccgcagctccgatgggaggaggcccacgagccgctccacaacggcatcgactccaaccgcacctgcggcgtcggtcccgggatgtccttcgctaacgccctccttcgctccggccagttccctgtcatcggcctcgtcccctgcgccgtcggcggcaccaggatggccgactgggccaagggcaccgacctctactccgatctcgtccgccgctccagggtcgccctcgagaccggcggccgcatcggcgctgtcctctggtaccagggggagagcgacaccgtgcgctgggccgacgccaacgagtacgcccgccggatggccatgctcgtccgcaacctgcgcgccgatctcgccatgccacaccttctcctcatccaggtaggactagcatcagggcttgggcaatatactgaagtagtaagggaagctcagaaagggatcaaacttcgaaacgtgagatttgttgatgcaaagggtttgccactagaagatggccatctgcaccttagcacccaagcgcaagtccagcttggacatatgttggctcaagcctatttgaactatggtacttccacgctctagtcctctctgtgttgtttttcttttatcagataaatagctaagagactacgcaccttatgttctacttttcttatttagtttcatggaccactcattcttatgattattgaattggcttggtataaaaaaaaaaaaaaaaaa

SEQ ID NO: 38655 - DNA, 319 bp, Oryza sativa
  unsure (1)..(319): unsure at all n locations
  Clone ID: PAT_MRT4530_42271C.1
cggacgcgtgggtttaagggatatctaattggcaatggagcaactgatcaggactatgatttcaattcgtttgtgccgtttgcacatgggatgggtctcatctcaaccgaattgttcgaggatgcatgtactgcatgccatggtacatttnggggcaaagttaataatctgtgccaagaaaagatagacagagtgcattgggaactcaaggaccttgacaagtacaacattcttgctccctgctccatcacactgaaattcaagaattatgagtcaagaacagcagcgtgccatcaagttttagaaagctaggtgagac

SEQ ID NO: 38656 - DNA, 672 bp, Oryza sativa
  unsure (1)..(672): unsure at all n locations
  Clone ID: PAT_MRT4530_42272C.1
aaaancngtaccgnaagggggttggagcagttagcgagcccttgatgtaggttgaggaccgcagagggagaggagcattgttgatgaccatggcgcgttgcccatccgccgcggcttcggcgcgcccccgcgccacatgatggtgcttcatcggcgcccgggctctcnccgcggtcggcgcgcgccgcaggtggtggtttggtttggatctgaaggaagcaaaaacgatcgggcgtgagcagcagagagaggttagtagtattaaaggcggggtcggggtggcgtcgcgtcgagtggatgatggcgaggcgatggcaaccagaggttggtggcgtccgtgtggtgggtccggagctcgcaacggcgcaaccactcactacaagcacaagcagcagcagctgctgcacagtgcaaacggcaaagcagagcatgcagctacagctacaggggtggggacgagtagacaaagcagtggcccagtagcgcaccagtgcaccaccaacaacaacccgatcgccgatcgctcgccgtcgattggccgaggcagataagatcgcttattcacagatgtactgcagtgataaagggtgtatggtttcaaggctgaggtacaatgtttaacctctacccctaacacgttcataattttttttcttaaaaaaaaaaaaaaaa

SEQ ID NO: 38657 - DNA, 213 bp, Oryza sativa
  Clone ID: PAT_MRT4530_42273C.1
actaatctgtggggctggctcgcaccgcatgtacctagccgggacttacttggtggacccacgcgtgcttatatggctagcgagtcaccatccacagctgatttgggggtagcctgaccactactccatagatgggtgcactacatacttatgttccatgcattattgaagcagaagcagacgcaccaaaagagacgaacactactactagta

SEQ ID NO: 38658 - DNA, 792 bp, Oryza sativa
  Clone ID: PAT_MRT4530_42274C.1
cgcagcgcagcgctccctccgcggcggagatggcggcggcggcggcggaggatgcggctgtgccctcgcctccgccgagcttgctgtcgctgtgcttggaggcggtggcctcccacctcaccgccggcgcggggggcgtcggccaagccggtggccggtggggccgcgaccattacgacggcggggagggcggcggcgacacgatgattacgccggaggaaggtggcggaggcgctgccctgggagctcctccaccgcctcgcgtccctcctcccgcccgccgcgctcgaggcgctccaccacgccgcccacgatcggtgctgcttttcagctgccactgctgctgttgggtttgcgggacctgatggtgatagacgtgggataaaacgatcaaggtgtgaggatttcaaccctgaatggcaagcattgttcggacttcgttggccccgttgtgataatgctggacatgatggcttgcttactgtggattggcagcgacagtattgggaaaagcatctgcaggagtgccttgacgaagctgctgagagtgccttgcttccttctttttgtggcagtattgatgagctgactataccagctaaaatcgtgagttgcattctccacaccaaggacatacctcaacagtattcaagaattgtcgtttcattgcagcagtttttggctgttacgcgaggtaccatgataaattgataatatcacttatgtcacatgctcacatgcaattcttttttttttttttgggaagggacgctcaaatttaactctattata

SEQ ID NO: 38659 - DNA, 308 bp, Oryza sativa
  unsure (1)..(308): unsure at all n locations
  Clone ID: PAT_MRT4530_42275C.1
cggacgcgtgggcggacgcgtgggctagtatcttcagcttatgtgtctatggagagctcataagtggtttagatgggtgtttttggacctgcctgcaaccaagttcacaagggcctatggaaatcgtgatatttacttggncagaattccgacagcatgtggaaacttaacgacccgtccttgaaaattaattttcagtttttttattttttagttgtaaaaaagctcaaaattttttttgtagtaggcatctatgcaccggtggcagtgtcatgtgattttacgcccaaaaaaaaaaaaaaaaaaaa

SEQ ID NO: 38660 - DNA, 291 bp, Oryza sativa
  Clone ID: PAT_MRT4530_42276C.1
atgcccaccaactcaagcttggtgaggctatgccagatgaaccccgccctacagaaggcagcaacaataaagaggagtcagaagcttgaggttgatgacccctcaccttccccttgctgcgctatttccccatcttctctaccatgccagcatgcttcacctgagccaccttctttgaggccctcccatttcccgcatctcctccctcacaggctagatacgcctgggccgccatcgctgaggccctcccccttcccacatctcctcagccatgcggctagccacatctag

SEQ ID NO: 38661 - DNA, 318 bp, Oryza sativa
  Clone ID: PAT_MRT4530_42277C.1
ggataaaaacgaagcggatagtttccgtccactccagagaaaaacgaatacggatacctttcggatcggatagtttggatacggatatttcctcccggatacggatacagatatggtatcggggtttccgtcggatacggataataattcggatatccgaaaaaattgtttccatattcatgtccgatcatattcgattcttattcatattcgagataatccgtatttgtttccatattcgagctatccgtatttgctctcgtatctggcaaaaatatgaaaacgaatacgactccctccatccctaaatgtttgacg

SEQ ID NO: 38662 - DNA, 142 bp, Oryza sativa
  Clone ID: PAT_MRT4530_42278C.1
atggccatagaatcaggcctacgagccatggtcaaaacagctcctcccattgcggtagctcctgctttggtcagtatcttgatcaacacagttgttgttgtcatgttcctcaagggtgatgtcagggctgctgaagctaaaa

SEQ ID NO: 38663 - DNA, 2332 bp, Oryza sativa
  Clone ID: PAT_MRT4530_42279C.1
aatcggctaatcttagattattgattcatttccagaatagaggataaactacagactactaacaagggtgatatataatgataagagagaagaataattcgtataaactgcatgttgttcatcacaatttcaacatagttttgttgctggttgccctgtcgcaaccttttttgatacttcagcactgaagcagtgacataccctacagaaaagaaagactagcagtctacctcttaggagaaactctatgatctgaacatactatcttctttttgcctcttgatactaagccttgctactacaggttacacctggcatttaggctatccaatgagttataattaactcatactagtagaggcttttttcccccttgtacaattcgactccgttgattttccatacatacagttcagaatttgaagtgatcagagaagaactccgttgcattttgcgaacttaccgtgggttcatctaaagatcatgttgcttgcagaggaacatataggcgcacgacgatagttatcgcgatggtaactgcaactataagagcaagaatggccatagaatcaggcctacgagccatggtcaaaacagctcctcccattgcggtagctcctgctttggtcaggtcatgctcattcagctcaccgttggtgcaatcttgctctagcttcatccctgtctcattccatctaggattcacctgccctttcttcaccgttcgcttaagcagagatggcactgaggaatatgccagtgaattgaccggtttaacatattcttccttagaattctcttcctcatgttcaaactcatttttcttcatgactttttcttctgctagtttcacttctgctgtttctgccattggtatggtctctgtttcttctgcgagtttcacttctgctgtttcagccattgatgcagtctctgtttcttctgccagcttcagttctgctgtttcagccatggatgtggtatccgtttcttcggctggtttcacctgtaaagtttcagccactgttgaggtctctgtttcttctgccggcttcacttctgttgtttcagcaactggtgtggtctccgtttcctcttccagtttcacttctgtttgaaccattggtgtggtttctgtttcttctgccggtttcacttctgctgtttctgccatcttcacctgctctgagacttgttcttgatgcatcaccttctctgtagttggtgttgtctctgttgatgcagtatcttgatcaacacagttgttgttgtcatgttcctcaagggtgatgtcagggctgctgaggctaaaagtgttttccgcagaattttcttcaccttcattttcatttacaattatctcattctcggcatcatttttgcctgaattatcatcatcctctgtcacattttctgtgtccataacatgtgcagtgatctcagcgcagtccctctctgaattgtgattatatgtctcaacagcttcattaaccatgccatccggggcgatctccgcacagtccttgattgaaccgtgatcatatttctccacagcttcagtaaccaattcagacagaacgaacttataaccactcggaacgacctcatcatccttctgaatctgataaagttcatctgttgccttgccatccgatccattgactccaacctcgacgttgtccctgctcagattctgataaatttgatgaagcctctgcgcgtccccctgctcgccctcgacaactccgccatccaaaccaccctcctcctttgctggatgctcgccgtggttcttggcgccctccttgcgctcgccctcgccctcgccgccgtcacttcggcagcggcggcggcaccacgcgaagacggcggcgccgacgaccgcgccgccgacgacgagcagcgcgccggcgccgtgcggcgcgcggacgcacacgcgcgccttcctcatatttatgagagtttgagcaggtacagcgtcaaggttggagacgatggatggtatggcaaggcaacagattaacttgatcagattcagaaggaggatgaggtcgcttcgaacggtgataagatcgttctgtccgaagtggtggctgaagctgtggagaaatatgatcacggttcaatcaaggcctttgcggagatcgctccggatggcatggttaatgaagctgttgagacatataatcacaattcagagaggcactgcgctgagatccctgcacatgttatggacgcagaaaatgtgacagaggatgatataattcaggcaaaaatgatgccgagaattttcttcaccttcattttcatttacaattatccggacgcgtgg

SEQ ID NO: 38664 - DNA, 699 bp, Oryza sativa
  Clone ID: PAT_MRT4530_4227C.1
atggagatcacacctgctggctgcgaccatgagattcctgaacacctattcatgtgctctagactttacatcgcagcatttcgcggttacacagatgaggtcttcagtctcttagccggaagcagtggcgccgccgtggagccggcgaacagccggccgtcgccggcagcgcaagaacatgcgaatcaccatggaggctgcagcattcgcgaggtgaccgcagagcgcagcaaacttctccacatcgccgcgggggaaggacacggcgaactgatcgccgagctgtgcagtcacgacagcagcctcctctcctcgtcgagctcgtcggggaacacgccgctgcactgcgcggcgagggcggggcacgccagcgcggtccgtggcatcgtgcggctagcccgggccaacgtggaggaggacaggctgaaggcgatgctgcgtggcatgaacgccactggggacaccgcgctgcacctcgccgcgaggcacggccatggcgaggcggtggaggagctgatggaggtggcaccggagactgcgttggagctgaacggcggcggcgtgtcgccgctgtacctggcggtgatgagcaggtcggtgcgcgccgtaagggcgatactctcttgtagggatgcatcggctgctggccctagttctcagaatgcgctgcatgctgccgttctccaatcttcaggttag

SEQ ID NO: 38665 - DNA, 353 bp, Oryza sativa
  Clone ID: PAT_MRT4530_42280C.1
tctttttaatgcacagggaagcaacttactggggggggattatttgaacaccgagggcgaacaaacggaaccatctttgtctggccactggctcggggattctgcaacccacgtgatctgatacatgctaaatcctgcatgatgggagtcaataagcctgtatactaagaaaccgtacaacaccacttaaggctgcacacccgtgaaatgatactggggatgaacagctaggatctcgacaggtcacgttgtcgacacatcgttcattaggacaaatactatggacacacaagctcttttgagagctctgatctagagctccatcacagaccttaactgcaagagtcgacact

SEQ ID NO: 38666 - DNA, 314 bp, Oryza sativa
  Clone ID: PAT_MRT4530_42281C.1
ttccgctttggtaattaacccccctttaatttatttcttttatgggggggttcttcatgaaaaaatggcagtaatacccccgtacaccaaaaaaataacacaaaagcgggcggaaaaatggatacaaaaaaattaaagaaattcagattaataaagtgccccgcagatgatcacatggaaaacaagaactccgaaaaaaccaaaaaaaagatcccaaaaaatggcccaacaacaacagaaaaggcgtgcatctgacaaggaagggaaaaaaaaagcggagggaccccaaataagaaacactcggggatgccccc

SEQ ID NO: 38667 - DNA, 324 bp, Oryza sativa
  Clone ID: PAT_MRT4530_42282C.1
gcacgagggagcattccaccgtgcgcgaaagcgccccgtcaccatgcgcctccaactctgcttcctctgcttcggcttgcttctcgtctcctcctcgctgcaatgccacgggctgcttctgccgctcaccaacaccctctcctcgctccgcccagccaatgacaccgccaccatccaccgcctcctccgctcctcctccctccgttccgccgcgcgccaccgcggccgccgccacggcacgcgccgcgcgcctcctcctccacggcaccgccagctctcgctgccgctcgcgccggggagcgactacacgctgtcgctctcggt

SEQ ID NO: 38668 - DNA, 221 bp, Oryza sativa
  unsure (1)..(221): unsure at all n locations
  Clone ID: PAT_MRT4530_42283C.1
cggagaggaggcggcggcggcggctgccacgcgggagggcaggccgaangaccggcgtgggcgagcttggaggcacgcnacggagaggcggcacaggcgtgcnantttcgtggcggagagggcggaggcggtactgcggcggagaggcgatggcggcggatgcaagcttcgtggcggagagggggttgccagggtgagaggtccgacggccggcgggcgat

SEQ ID NO: 38669 - DNA, 512 bp, Oryza sativa
  unsure (1)..(512): unsure at all n locations
  Clone ID: PAT_MRT4530_42284C.1
ggcggcagagaggcgcacacaaggagatcgtgcccacgtgcnggcgacaggtggcacaggcaagcagcagacagagatcacgacgacgaccgaccaggacagacgtcaccaccaggcagcagcgagccagctggacaggaggaactggaaattgacgagttgaggtgatctgattgattgatcagatacacaggtaacaaccaaccagggactaaagatcaatttagggccagatagagttttaaacacgagaaaaaaaatcatctatagtcccggtttctattcaaaaccggaaatattgtggtttttagtcaaaccaaaacaaagatggtttctctagtagtgcataagcaaaacatattagttgcatgcgattaagacatacaaattgttggtatagctagcattttgtttgtgttaatttatacttgattagtgtagtaagcaattgattaatggtggagtcgggagggagaaatcaagtgagttttaattaaaaaaaaaaaaaaaaa

SEQ ID NO: 38670 - DNA, 774 bp, Oryza sativa
  Clone ID: PAT_MRT4530_42285C.1
atggggagagtgcgccagcagctgcaagtttttgtcatcaccgacttggttgagccattgattattgcttgcgcctattggtccatcaacggagcatccagggtcattggaataagttcatttgaggtatttcttccatgtggcgcttacgtagcaattttatccggaaatataataaaacccgtggggcccatatgcggcgcagggcggccggagcaggtgacaggcgaggcgggtcgtcatcaccgacgacggcgacttgccggtgctgtacaactggatggactacacaccaacattgtagtttcgcccgccgtaggccgtgactttgcacgccgccgccgccgctatctcgctgtcgctgccaagcaaccgccgctttcttccatcttaagccgctgccgtcgtgtccacatcggcgagatccaccgcaaccgccactcgcagctacggaccgtcgcggccccctcctcccggccatcccgctcgaacgcgacagtggccgatgtcttcttggttccccaacggccgtcgctgcctaggtcattgaggacgaggactaagtcaaaccaaccacgaacagatgatgaacttgaagctattcaggggagccaactagcgtgtatacgcagtgtcttaccacagccgtacaccatcagctcgatcggttctcttctcgtcgaaatctggtgctttgtgtgcaagcttcaggcctttgttaggttcaacactttgccaacgatcaacgttcttgtggcatcggaggagctgacc

SEQ ID NO: 38671 - DNA, 2301 bp, Oryza sativa
  Clone ID: PAT_MRT4530_42286C.1
atgagggcactgccagttgatgtgggtggagagcccgggtatgcaatccgcaactatcgattcaagcaaccggttgaaactcactgggaaggtgtcaccacgctcgccgagttgtttgagcagtcctgcaaggattatgtcaacatgccgctcctcggcaccaggaagctcatctccagggaacaggaatcatcactagatgggaggtcctttgagaagcttcatcttggagagtatgactggaagtgctacgctgaggtattcaagagtgtttgcaacttcgcatctggactaattcggctaggccatcagaagactgatcgtgttgctattttcgccgagacgcgggctgagtggcaaattgctctgcaggcatgcttcaggcaaaatattacagttgtcacaatctacgcctccttgggagaggaagcactgtgccactcactaaatgagacagaggttactactgttgtatgtggtcagaaagaactgaaaaaaatgattgatataagtgggcagcttgacacagtaaagcgagttatctatatcaatgaggaaggaatctcagctgaagtttctttagctcaaaaaagcactagctggataattgagccgtttgaggatgtaggtagattgggagatacagcacctgttgatgcaaacatgcctctcccatctgacgtagcagtgataatgtatacaagcggtagcaccggattgcctaagggagtaatgatgacccatcggaacgtcctggctacactttcagcagttatgaccattgtgcctgaaattggtaaaaaggatgtatacctggcctacctgccacttgcacacattcttgagttggcagctgaggcactcatagctgctgttggggcttccataggatatggatcacccttgaccctgactgatacatcaaacaaaataaaaaagggaacactgggtgatgcttctgcactcaagccaacactgatgaccgctgtacctgctatacttgatcgtgttcgtgatggtgtgagaaagaaggtggatacaaagggtggtgtagcaaagcagttatttgatgttgcctataatcgtcgacttgccgcagtcaatggaagttggctgggtgcatggggattagagaaactcttgtgggatatgcttgtcttcaaaaaggtgcgagcagttttgggaggaaaaattcgctttgtactttcaggtggagcacctctatcaggagatacccagagatttatcaatatatgccttggggttccaatagggcaagggtatggtcttactgagacatgtgctggaggaacattttctgagtatgatgacccatctgttggtcgcgttggtgctccactaccttgttcgtacattaagatgaattcgtttttggtagaaaccactctgattgactggtcagaaggtggatacttaacaagtgactccccaatgcctcgaggagagattgtcattggtggtcccaatgtaactaaaggctatttcaagaatgaagctaaaacaaatgaagtctataaggatgacgaaaaaggtatgcgatggttctattctggtgacatcgggcgcttccacccagatggctgccttgaaatcattgaccgtaaaaaggatattgtgaagcttcaacatggtgaatatgtgtctctcgggaaggtggaggctgctctgattgtgagcccatatgtggagaacatcatgatccatgctgatcctttccacagttactgtgttgcacttgtggtagctgcacacaatgagctggaaaactgggcttcgcagcagggagttacatacaccgatttcgtagatttgtgccagaagccagaggctgttaaagaagtgcttggatctctatcaaaggctgcgaagcaagcgcgactggagaagtttgagatcccggccaagatcaagctgatatctgagccatggaccccggagtctggccttgtcactgctgccctcaagctcaagagggaagtgctcaggaagacatatgaggatgatcttgctaaactatacgcctgatgatcaatgctgaattgctgattaagcctactcgacgttttgacacaaccagctaccgtaggacagagctcttgtgagcaaactgaagatgctgataccggcaggaggtagcctgaaattttggagctgtggttgtttgatcttttggagctagcacaattatgtgtagcctcatttcacacttacttctgtgtctctgccatattctcttgtgaatttacattgttcaaaggaaaaaaaaaaggcattctacat

SEQ ID NO: 38672 - DNA, 296 bp, Oryza sativa
  Clone ID: PAT_MRT4530_42287C.1
atggtaggattgagcaagcagaaacaagatggtcatgctcaacattgacttcttcaccatcaacgagatatagcgacttctttacgcattgtatatgaggtacatgataatgatcttgcaagggtaggatctaatttgccagtgattgtaagtatgattccgccgcttatgttaattaggagctagcagtagacaaacaatttgatgagtatgatttctctaatgctgaaatggttaaggctgctagtaataagtgtaccggttctacgtctttttggtggtatactgttggccat

SEQ ID NO: 38673 - DNA, 1212 bp, Oryza sativa
  Clone ID: PAT_MRT4530_42288C.1
gcggcgctctaaacttgtggttcttttttttttttgagacagtcgaatggtgagctcatgaagttgaagttcagttctaaaccataataacctcgtttcacaatgcgcatgagtcaaatgctgtaacacctcaaacattcaacattattattaaaacttatgcctggggcaaagggaaaatgctgaggaagcttctctactctactaggtaagattcgcgtcagagtttcaccgatacatgccgggccatcatgcacgctgtcttcttcccaccgatgaatcgacaagtccccaagccctatgaagttgaagttgcaccactgtgggaaattcactccaattgggttgcaaggtttgaaccacaaccatcagcttcggggagtacacgaatcatacccacgaaccaacctggctttagggtgataacacgggcaaaggaaggtcaatgtgtttgtcctgtgtagcatcatgtgccaactgattgaacatcactatgtctcagcaaacagataacgcagcaaaggccccacaactgctacactcaggctattgcccagcatagcatactgttgcctaaggcttatgtgattcggaaagtggaaactcgatggaaaagaatgcagattagcaacctcacgaggggtgaaaaatcgtaagcctaactccttcagtgaagaaatttcaaggtcctctttggaaattcgtttgaggttattggacgtagctagtaaggagcctgtccccttgacatagcgataataactatttggtaaaacaacagcatcgttttgattcagggcatacaatatcttgcaaacagtcgaggagacacctcattcgtatgcttcgtgtgtatggttggcatggaggacaaagaatccatgcctgtgcattatacatatgtaggtcactagcagtgagtgtttgaatgcttccatcgtatggacggtgaccgaagttgagctcgtagacatcgttggcaacgtagttgatgtcaaaggcctgcaccacctgggaccgcgcgacagacgccgccagcgagtacctcattccaccgatgccgctatagaactcgaggactttccatggcaccgcggtctccatcgtctccggcgatgatggcggcggcgttgccggcgccttgccggcttttgctggacttctgaaaggcttttcggccccccaaataaactgcggctaaggacgcgtggg

SEQ ID NO: 38674 - DNA, 1232 bp, Oryza sativa
  Clone ID: PAT_MRT4530_42289C.1
ctatgtctcagcaaacagataacgcagcaaaggccccacaactgctacactcaggctattgcccagcatagcatactgttgcctaaggcttatgtgattcggaaagtggaaactcgatggaaaagaatgcagattagcaacctcacgaggggtgaaaaatcgtaagcctaactccttcagtgaagaaatttcaaggtcctctttggaaattcgtttgaggttctgtaatttaagtaggtaatcataaaaggaaaaggaatcatgaatgttcagattaagaggcaacaccagggatgcattggacgtagctagtaaggagcctgtccccttgacatagcgataataacgctcaatcaagtttagcgggactacataatcttgagaaattattccacttggggtgcatccatcagacccattaatgtcagagattgtacctgaagaatcctgatcagcgacattcagacttattgtttcaaggaagtcactgattggtttgcatactagttccagctcatcttcatccgggttacatctgttgtgacctgcccttaccaatgttaggaatgtaggtgtccggagcagcttgctgttgtctgatggattttgaaaactcacaggttctcgtttcgccagacaaaagtagcgaggtctagaatatgggataccaaactgcaaggggcttaggataaattcttgtgtgttgaaattgagatctgaaagaacctctatcaactggtcatgtgtatcagacacctcaaatccgactacgttttccacaaataacatttgtggaggaaagcacatgtttttcattaggttaagaatctttatgaatgaaaatgctcgagcatcagctgaatgcttcgtgtgtatggttggcatggaggagaaagaagccatgcttgtgccttatacttatctaggtcactagcagtgagtgtttgaatgtttccctggtatgggcggtggccgaagttgagctcgtagacatcgttggcaacgtcgttgatgtcgaaggcctccaccacctcggcccgcgcgcccgacgccgccagcgagtacctcatcccgccgatgccgctatagaactcgaggactttccatggcaccgcggtctccatcgtctccggcgatgatggcgggggcgttggcggcgccttgccggcttttgctggacttctgaaaggcttttcggccccccaactaaactgcggctccggacgcgtggg

SEQ ID NO: 38675 - DNA, 2700 bp, Oryza sativa
  Clone ID: PAT_MRT4530_4228C.1
cttttttttttttttttagtaaaattgacacgttgcattgattgacaatcaaatgaacatatctcaacggcacagaacaatcacatgctacaatggatgataatgaagggaagtccagacataaggcatcaactgatacacattatgcagccagcgcacacactacacgtaatgtcaggtaactccgatggcatactacaagacaaagcgtacataataacatgaaggagttaacagagtacgatacagcacattacaccctaggaggataagctcggatctcaatcagttcatagtccctgcctaaaatacggataggatgctgttgcttcacaagaggaagggggggtgggggggggggatcacggcgagcctatggtgcatccaccttgacaagcgtggtactcggcgcctccggggtagctggtaaatactgaagccagtctttggcgcagacgagcgcctccacaatttctggacgcaatgagcttctgtagtcatcaagcatgcgagttcctgttccagcagagaaaatagagttgccgctgctcaccatcgacatcggaatggccaagatatcccgggccatccttgagagagtagggaacttgagagtgttgagcttccaccagttcagaatgtcaaattcctggatgcgcggagtgagggactcatccaggtactgttccagttcagattttgttggctggcttgtagctatctcagaaaggtacatatcaaagtccacaagtccatcgccggtcgaaggagcagttgcttgagtaccattctcgctagcaggtgcattattaccgtccccttgctcaacataagccggcgtcaaggggaggggttgtgcaacatactccttgtaaagctcatgaacagcatcatccaccaccttaacatactttgcagcttcaacaccataaattttcgagtagctgaactcaacaagcttcatcttgaagcgcggatccatcacaacagcaatagctaacacaaggttgcaatctttccagtacttgtcaaacctctcgtgcatatccttggcaatgctgctgaaaacagggtcttcatgccctgtggcatttgacagctcgagctgaagtttccatgcctcatggaaaaagagatttgaagttggatttgctgcagccatgatgctatgtgctgagtcatacaatagcttcaagtaattgcaggcagcctcaacttttttccagtcctcagcggacggtgcctcattgtagttatcatcacttgtctcaagagtagaaaaggcctgcttataatccaaggcagccagcagcatgagataggtagtgttccactgtgtcgtaacatccagacaaagggtcttggtacttgggatctctagctgcagagcaatctctgcaaacttctcctcacggctaggagaagcttttatgaacttaatgctttcacggatattatagatgacaccatgaattgaagcaataacatcctgagcaactgcattcaggatatgggcataacaccttacaacaaacagttggcccttgagcatgaggttgttcttgttggagagataatccctcagattcgcactatatatatcatgtgatgagcaatcattgtccaatgtgatggtgaatagtttgtccttcatattccagtctgaaaggcttgtactaatagcttcactaagtgcattctctgaatgaggagaagacaccatcatgaagtttagcattcttcgatgtatcttccactcagagtcaataaactgcccagcaagtgaaacatagccaagagtttggctagttgtccacaatccaatagtgaggctaatccttccaggcatagtgctgaatgcttgcatgaggttttccttttctttctggtaaacagcatacacctccccctccattgtctcaacatctacaaccctgaaacgtggctgcagactgtcaataaaggtagtgaaggctggctgttgaacaatgtgaagtggatagtcatgcaaaatgatcatcttcgccagatatgaacaactgcggtcttgatcaaaagcagcatttgcataaccagtatatctgtaacgcctcttagacgggcgctccacagtgccctcgccatcattgtcagtccctacagctggagtcagtgctagcttgtgctcttggttcttaattttaggacatgaacccaaggtaatgtgcctcttgagatggctagtacccgcaatttttgaaccagagctgtaagcaaaagtttgcttacacagtttgcagcacgcccgtgtagcccctccagagacagcttcaatagtgaagtgctcccacactagagacttcttcctacggcgccttgatgttggaggggtactcatctcagcactgaccaatccatttacttggacctcgtcaccttgagctaagtcctccgcaaggaccaattcatcaccctgaacttcctcagcatgagcttcctcattgcttgggacaatctcataaccttgaaccatctggaagtcgttgccagtttcctcagtcatgcttcttggctagtagctagaactcacaaagtacgaggaggaggagggggagagatggtggtggtccgcgcgcgggcggggctcgctcgctagggctcggcccaagaagctccaaggccggggcgagcggcgaagcagatccggtagtagcctcagcc

SEQ ID NO: 38676 - DNA, 534 bp, Oryza sativa
  Clone ID: PAT_MRT4530_42290C.1
atggcgagaccgcacgccgtggtggtgccctaccctggctccggcaacatcaacccggcgctgcagctcgccaagctgctccacggccatggcgtctacatcaccttcgtcaacaccgagcacaaccaccgccggatcgtggccgccgagggcgccggcgccgtgcgcggccgcgacgggttccggttcgaggcgatcccggacggcatggctgacgccgaccacgacatcgggaactacgacctcgcgctgtccgcggcgacgagcaaccggtgcgcagcgccgctgcgggagctcttggcgcggctcgacgacggtggcgccggcgcgccaccggtgacgtgcgtggtggtcacggcgctgatgagcttcgcgctgtacgtggcgcgggagctcggcttgccaaccatggtgctctggggctctagcgcggccgcactagtgacacagatgagaacccgagagctacgggagagaggctacatcccactcaaaggtaacgaaattaaagatgatagggaccggactgtctag

SEQ ID NO: 38677 - DNA, 442 bp, Oryza sativa
  Clone ID: PAT_MRT4530_42291C.1
ttttgtttttttttttttttgggttttttttttttttttttttttttttttttttttttacaacaagggcttttcaattcatcgggttaaggaagaaggggccctaccgagataccagggggcatttactaaaacaatttggttgggaacaagcattaacaattggaggatttcatgacccaaccattaccaagttaccaagatgggatttattgttcggaaagggttagtttttgtttgcaaaaactttttcttttccaactggggggttctttacacttttacaggacatgggggccaaaaaaacggaagcaaaaaattggaaaccagctgcaaagaaggggaacccccaaaccaagtggccggtgacacccaaaaaataagaggggggagaagccctcctttacaaaaagggcgaagaggaggaccaccaaaccggggg

SEQ ID NO: 38678 - DNA, 269 bp, Oryza sativa
  Clone ID: PAT_MRT4530_42292C.1
ctaccaaccacacaaacagaatgagcccgtggcccgacatcgtggtgggcaacgaaactcgacactttgtgaacattggcgcatctacggcggcccgggcgcgcaaaacctacccacacagcaccgtcaacggggcaacaaaacatcagagacgcaacagaagaacaacaaaccacaagaccaaaatcaacgcggacccccagcccccaaagccgacaaaaaaaacccccttaaggatgcagcaaaaccacagaaaacccaacagatga

SEQ ID NO: 38679 - DNA, 398 bp, Oryza sativa
  Clone ID: PAT_MRT4530_42293C.1
ttcttgttcttgttcagtcagaccccattgcatgcagtataacaagcaggctttacaaaacaaccgcggcgatcatgttaaacacagtgctgtcaacctgcagactaagggattaacagacgattgaccaggaagatgaattgcattgtgggtaggggagcaaagatcagctccctaccctaccattgagtgatatatgcatatggcatacatcaactatctttacagtacatgagtggcagatggggtgcagcttgtggtgggcttgctcgctgctcacatgaagaccatggtgctatacaaggtctggccgttcatgaatgggcctccgttcaagagttatggggaatatttgggcggtgatgaccaccatggtggcctcttatgtagggcatgtg

SEQ ID NO: 38680 - DNA, 2280 bp, Oryza sativa
  unsure (1)..(2280): unsure at all n locations
  Clone ID: PAT_MRT4530_42294C.1
tttgtggtttttttttttttttttatcaacttctgttgaataagcaaatccagagttgaataagaagggggggatacacgaatacttgtctctcaggaaaagttgccaagtccagggggggtaaggtaaagaaacataaatatgttgaatcttgaccacctctaaattaatcatcacaaagctaggacttggccctaacgcaacagcgaacacacacaacaaaaacaaattattgctatctatgaagcaatgatacaacagggccggagcaccatgaaattatgggatgctcctggtgaactgttgacaaataggtgataatcctgtcatttacagagtcgcaaacagcgtttcttcctttctctttccgttgtggagattcctctttctcttgccatattatttcctcttaccgccaccaagggacagcagctccaggctgcggtggagaggctcgtcgcgggaccctcttgcaacggctgctcgtgagagagaagtggcccttgtctctccaaccgatggattaaccctctgcgtgctggaaggacggcttccactgcttgagaacaacctgcttgtccggctgtattgctgctccattggttccaccgatgaacctggcctgctgcttgacgcaaccgctctccttgatgcactgcctgtacgggaggatgtacggggtctttccacggtcctttcgccggaccggtcggtgctatgcatgatttcctttagtgacattgacggccgttgtgcataattgtcactctgattcaaagaaccagtaggattccttctgccagatgcttcacctggggccttttccatcttctccatagaaggtcccgcagctccactggttctttcacttggcctcatcagtggtttggagcctatctggggatatttcaaaatggtccagtcaaatacataatcaaattgatatccctcccggataaagagatcacggaatagcctctttaagtaagaataatctggcttgtcttcaaacctcaatgaacggcagtagtggaagtaagaaatgaattctgatgggtaagatttgcaaagaacctccacaggagtaagcatctttttctcacttattttgtcgtacttctgcttcttagtgcctgctttcagcccctgccatggtaggctgcctctaaggaagtacataaggacataaccaagagattctagatcatctcttctgctttgctcaacaccaagatgggtattgacacttgcataccgagctgttccagtgaggttcttgttctctctgtatgggatgtgcttgtgagtctgaaggtccctatatttcttcgcaagcccataatctattatatatacctgattggctttcctaccaagccccataaggaaattatcaggcttgatatcacggtgaagaaatcccttctgatgcatgtactcaactcgattgatcatctgatcagcaagcatgaggacagtctttaacgagaatttcctactgcaatagttgaataggtcctcaaggcttggcccaagaagatcgatcaccatcacattgtactctccctccacgccaaaccacttcaagtgcggaataccagttcctccctgcagaagcatgtacagcttcgactcataatgaagctgtgggtgcttcgtcttaacattttccaatttgacggcgacttcctctccagtctgcacattaacagcaaggaagagctccccgaaggatccactcccgatcttctttccaagcttgaacttgcccccgactacatgatccatctccttgctgctccgatggtctcaaccaaacgaatcaactgccccccccccccctttcccctctaatcccaccccgagatccaaacccgtcgaggcgagcggcgccgcgccgaggcgaatcgaatcgggattcgggcacgagggcctctaggacgccagatccaggcaaaccaccaagaaatccggtcgaccaaactcttccctccccccacaatcgaacgaataaaaaggcaaacaaagggaaaaaaataaaaaaaacgaatatgaacaaatcaaagaagaatcggcggattaacaggaggtgtgcggatccggagaaacggatacaaaaaggggatttctcctaataaaattccctgcgccctctcggcgaattcgccgcgagaggtagagagagaggggaagcggcggaacaaaggggaggagagagagagagagagagagagagagagagggtggaggaggagaagacgaagacggcgnacgcgtggg

SEQ ID NO: 38681 - DNA, 657 bp, Oryza sativa
  Clone ID: PAT_MRT4530_42295C.1
atggccgcggtggtggggagggtgcgggtgccgcagccatgctcgccgaacgccgcagggcgccataggtgcgacaccttcgatcggttcacctacgaggacgccgtgagccaccccgcctggtgcgagggcgccaaggcgatcaacatcccgggagaagcgggaccgggaccacagcaagagcctggaggcgcgcaaggcccaggccagaaagagcacttagatgttcatggtggtgtcattttttcttacattgagatgtcttcccttgtgaacctgagccggataggggcagatgacgctccaacatatgcaaacagcgataaagtaaatgcgatgtcgacacttgtgagctggagcgatcacatggaggtaaatgacaacccaacacctgaaagccgtggtgaagtggacaagctaatacctaatcaatcatatgataatctattgctccgttttccatgcgtaggggaggggttcccaacccctccaaaagaacacaaccttagtgctgctttggttgccctttaaccatcgttttccgcgtgcacgcttttcaaactgctaaacagtacgcgtttggtaaaaagtttatctaggaaagttaccttaaaaatcatattaattcatttttcatgttttttatagctaatacct

SEQ ID NO: 38682 - DNA, 328 bp, Oryza sativa
  Clone ID: PAT_MRT4530_42296C.1
atattggacccctaaacctacccgcaaaccacctacccctacactgagccgaacacaacttcccaaaaaaaaggcaaataaaaactccccaaaacaaggcaataccctcaccctgtcaaaaaacataatcccctcaaaaataaaaaaaaaaaacaagccggaaaaataaatgaaaaaacctacattaactaattagtgatcaaacccacattaattgcttggaaaccaatcccccaatttaaataaaaaaacctgccaacccacttggaaaaaaaaatcgcccaacccccgcgaaaaagctttttttttataaaacccaaacgggcat

SEQ ID NO: 38683 - DNA, 691 bp, Oryza sativa
  Clone ID: PAT_MRT4530_42297C.1
tacacagtcaaggtgttctgccgcttcgttctgtccgcctaaggtaaaaacaaaatggagctgattttgaaaagagaactactgccgggcgaggatggtctggatggatggatcaactttgaaaagaaataagatgtatgttaaacatctcattcttttgctgatgcgctgaaacgaggtaaagcttggatgctcttttgttaatttcttataactttaggagaggagatattttcaagactcaagagcacctgtaactatgaagatgctttaattttaggtagaaaaaacatcgacttctatcttatgaattctgcttggggtatattttatgcactgaacaaagaaaaagtttatttttaccgtgaacttcaaaaactgtacaagtaatgccttaaaacccttttccatgattgtttcaactggcatagagatggttttcactgatatttctagcaggtcccacatagataatttccatctccctcctagctagtggcttaactggtatctagtctcataagcatgtgcagtagtacacttacaatgtgcttagtgaagcttttctttgtgagtcgggtaattttaccatccttgataaggtacccagaggtaccatattttctagtataaaatttggtaccttccaggaccaaaagttttagtgtaaatttagacacctcatgatttt

SEQ ID NO: 38684 - DNA, 243 bp, Oryza sativa
  Clone ID: PAT_MRT4530_42298C.1
cggcacgaggcttcagttaaatttctccctgattccatatatggttttgtcttttttttctttatcacttcttggatttttgtagttgttgttgctgctcactgcggatgcgtgtagtttctcttggattggattctatatagatgttgagtgcttcctcgttacagctagtttagggtgcggagtttactgtagagatcacactgggggatgggaatgtttgagtggttcttgattgacgcg

SEQ ID NO: 38685 - DNA, 208 bp, Oryza sativa
  Clone ID: PAT_MRT4530_42299C.1
tataagagctttagtgcgtcactgtctaagcttgtggaaaactatgcagaacttttggccagtcaagcgttcttaaaactgcaatggaatacttaaaattgttgggatcagatgaacattcacacgacgtggcaatattgagagaccggattcgattttctacagaagagatcatcgtccgatgacttcattgcatcgcgaagattaa

SEQ ID NO: 38686 - DNA, 285 bp, Oryza sativa
  Clone ID: PAT_MRT4530_4229C.1
actaggcgaaccccacgaatgcgcgcttggttaaattctctgagaatagcccgggtgcatcaccttacacaaaattatacgtggatacacgccatgtcgcccaagcgaccagcttgttaattaaatgagaacacacgggttgaattcagcaataatcagcacacacacaaaccacactcatatgggtggtttatattgaggactaattaaggtaggtgactcgccgacagaaagtgttagggtgcttccagacttcacttgccgcacttgcagtcggtgcaggag

SEQ ID NO: 38687 - DNA, 640 bp, Oryza sativa
  unsure (1)..(640): unsure at all n locations
  Clone ID: PAT_MRT4530_422C.1
gnnngttnggcncngagcccgtttnanacaggcctantgcnccccagtctgtagtanattgttcggctccttcaaactgaatcagtaaattaagtagttactgcttgagctactgaggatgctctttgactgatagctatacctaattattgaactcgaatttccttaaaaaatatatttgttcagagatactcattctagctatgtcacaagcagtgttaaaatattagtgtttttttcccgttaaatcgcatgtcatttgcttcactacatgagcaaatcagggaagtnngangtggagcaattctattttgaagctaggcangatttttctttaccncntggcaacaagccacctaggatgagagaagctcntaaagtgagttttgtatcnagtgctcnaatttctctgtaaatnatcntactttttangattaaaacttcagtattgtgaaggaaaacnagaaacngtatntattttatgccattctttaaattttgtntgaagataaagaaccctgtgatgcatttaaattgtatgatctgtnttaaanaancngctcccccgnncccnccnttgtnttntcntnnctgngnnctnnnngncgtcnntttcncnnccggggggggcggggncccn

SEQ ID NO: 38688 - DNA, 675 bp, Oryza sativa
  Clone ID: PAT_MRT4530_42300C.1
atggcatcgtcgccggcggcgacccgcgtggtgcacgtgcactacaacaacgccacggtcaccatcggcacggtcggcgtggcgcgagaggacgatggcgacgacgcggaggcggtggccaagcaaatcgtcgtccgcctcggcatccaccctcctgccggcagcggcgccgacgcccacgccgtcgtcgacctgcgcttcgccctgcaggagcccacgccggccgcgtccgtcccctggcgctggctcgccttctcactctgccgcttcctcgacctccccgccgacggcagccgcctcgaggacgagctatgctccttcgccaccgacgtcgccggcgatggcgccggcggcgcactccacctcctcctcgtcgacgtgcgataccttggcgtgtacgacgaacgcccgtccacgcaagaatggctgccggtgcagctgtacctgccaccggcgaccgacgacgacggcgcggtcgtcgtgctgccgctctgcccgaggcacaccggagcggaggccgagcggtggtgccacgcctgcctcggcgagttcaaggtgggcgacacgctggccacgccggcgtgctgccgccgccgcgccgtgcaccaagaatgcctgcgccgccacctggccaagggccccgacgcccgctctgcggcggcccaaccgcactaa

SEQ ID NO: 38689 - DNA, 1365 bp, Oryza sativa
  Clone ID: PAT_MRT4530_42301C.1
tcatccgcaccattgaatcagctccccttgacctccgcttgcttccggtgcacgccgcccctcccggttctccgccgcccgccggtatgcgcagctcgccgccggccgttcgatgcgccgtcccggcctcctctccctccccacccgacgtggccgccacctcagcggccgggcccgcttgaccgagtcagcggcgacccggtcagccgcctcctcagcccctcccgcccttgggcttggcccactggtttgccccctttccatcggcccgtgaaccaaagtccatatataccccccggattttttgtcgatcgtggttttctcgaagattcgtgaagctccgtaaataccttgagcaaggcaagtcaccctttgatcaattgctccagccgtcgcctgtggtgttgggtgtttgttcgttggttccgctgctgctgttgttgttggtgtttcctcgtccgcgtcgtcggttgcattctcgggctgttctgagctctttgccatagacctcaccagttgcgggctcatcttgaccgtcttcgtcggtgtgcccttggtgctcttcctcttcgttggctttgcagaaagcaccacgtcaccgtcgtctacagagctgcatcgctggcatccttcctcctcttccttgtgggtgtagatgacgcagtccgacttggggtacgagatgcacgtgagcacgtacccctgctcgatctgctcgtcggccaggaacgacccgtccgactggtcgacctcgccggaggccagcttgccggcgcacgtggagcacgagccggcccggcacgagtaaggcagctccaggccggcctcctcggcggcgtcgaggacgtaggtgtcctcgggcacctcgagctcgctctccgcgccgtccggcccgatgagcttcaccttgtgcacggccgccgcggacgccctgaacctgccggagaaccgcgcgccgcccgacgttagctgcaggttccccggacgactcagcagcttcgggggatcagcgacgacgccccgtgcgctataattggtgatcggcgtggagaatgccctgcacctgacgcccgatgtggcagggacgaagcatgtcgctacaggagcaggcatggttgccatcgatctcgccgaacctttcggagctgtgtcgagataacggatggctaccaaaaaagtagaaagcagttaagcagaagatcgatcaaacgctgtccacggcttgagcagaacacacgcgcagtcggtattaatagtcgtgtgtccctcgatcggctcggtttgagctgcaccagtagcaacctccccgtggtggatcctacatagacccggacgcgtgggcggacgcgtgaacgaacgcgtggg

SEQ ID NO: 38690 - DNA, 359 bp, Oryza sativa
  Clone ID: PAT_MRT4530_42302C.1
ttctgctaactccgacctctcgacagaggtgcgtgctccaatgccttcccccctacaaccgtagccgaattccgcctccaccgcgatccgctcgtgccgcgctccaatgagggccttcatccgctctttgcagattttgcgattgttttatggggtgcaaccaggatgggcgagccgcttgttaaggatcggaagtccaacggggcgggggtttgggtggtggatcggaccgccaggtggccgggagggttggccctggtggtttcggggtttggtttcacccgacgcacgtggagaatcggaagacctgggagaggttagggctagggttatggggagcacggaggagcccgaccgga

SEQ ID NO: 38691 - DNA, 1582 bp, Oryza sativa
  Clone ID: PAT_MRT4530_42303C.1
atgtcactgaatttgaatccctaccacacggtcatcaccgccggcgacagctattccttgcttgcgctgagggaaaaggaggatgtaggaacactcagaaaagaggatttgttcccaactgcatctaccgaatgcatccttattttgacaggaggatttgttcccaactgcatctaccgaatgcagccttattttgacagaggagcaaagcttacaatagggcaacccaaaccaaaccctggccaaccccacctccaaccccccgcgcagccgaaggaatcctcgacggcgacgacgatggccgccgcgacggagaagacggccgaggagatccgccgcgagctccaggagctccagcgccagcaccgcgaggtggaggatactgaagctaaggaggatgtcaagaaggaagcggaggcagaggggccggagggcggttcggctgctgctgaaggcggtgagaggagggatggtgggttcaggagggatgggagccagcgcatgccgaggagggagtttgatatgtcattgccagaacctctcccgagggaatttcccaaggatgaggatcaaagccttgtgaagaggaacaagaggatgctggggaagcttcttgtcggtacattagagaaatttcagcaagaggacaaaaaactgtccaacacagaggcttatatgcgcagatcagaggttcagcgaaaggctgatcaaaaggctcgtgaggaaagtgaaaggttgcggcagcaagagcgagagcaagcaatagagaagcgtaagcgtgatatgatgctgcgtgctcgagtagctgctaaggcagaagaaaagaggttggagctgttatacatgcagtgggctgagcatcacaaaaagctgtccaatttcttaaggacaactgcggaaccaccaatttactacatgccagctaaaccaataattgatgatccggctattgctgaggagaacaaggaaaaggcatttcaagaatggaaatctgaacgcagggctgagctaactcagtttcaaaagcaagtcgaagaacagtacatgtctaatgttgagaggcagttggaaaggatgcagaatgcgcggaatgcacggaggggtaatggtccttcaaacatgcaagaaatggacaaggagctggacacgcacagggcggagcatggtccaaaaactcgacgagttcttgagggtggcaatgacgatgaggatgatatggacgatatggccgtggaagatgagctgatggatgaagtccttggcattaacgagccaatcagcgatgagcaaaccaagccgtctgaagaagctgctgatggtgttccggtgtctgaggaagtgcaataggtaatttgttttgtattgttgcgaggtaggcatctaggagttccacatttgatatccttcagctgccctcattttctgacgcttgttgtatgtctgttgacgcttgagattttccccgctgttatcaagccatatattgttgcgggatgtattgccgttgagcgatatactctgttaatcattgcatcctttgcgtttctagtataaatcgagcaatttttcctgcagcccgggg

SEQ ID NO: 38692 - DNA, 405 bp, Oryza sativa
  Clone ID: PAT_MRT4530_42304C.1
acttgagtttgccgactaggaggacgtcaagggccaggaactgcactacgtgggagcctaaccctccgatggagccttactcgacggtgaggagcacctagagggagctggccaacctgctgataagcgtatggtccagctgcttgcagaaccatcacgtcatgacagacaccttgaggccgtgctcaatccaccagcgacgctgtggcgaggcagtactgcaccgactaaccgtacccaagcagcgccaccctgctagactccaacaggaccctccctttgtctacctcgaggggaacgactttgtagttgggtggtaacaagacgccgatgccgttgtctcttaggtagcggaagcaggagtggcggtcgacgatggcctcgatgaaggccaccatgttggag

SEQ ID NO: 38693 - DNA, 239 bp, Oryza sativa
  Clone ID: PAT_MRT4530_42305C.1
cgaaacaaaagtaactaaacgaaacgcatactcatcaaaacttgcccagtaaaaatggacggatgtactttgacataacatatgttccgccataacaagccgttttgcagttcaattttcttaagataagaggctttaatgacaggctttactcaaaaataaacttaaaactagcacttctgagaaggataatagggggggattaaaaatgctcctaaaacagccagtcccacccccag

SEQ ID NO: 38694 - DNA, 268 bp, Oryza sativa
  Clone ID: PAT_MRT4530_42306C.1
gcccaacatccggccgcacattcgtataggtcaggtcagagctctctctgaacttgtacaatgaaatgactactctgcaggatatggcttgcagtcttctttgatgctcagagccaaggaagaggctcactctatctcacttaatatggtgtggcagatctatctttttcctgtgttaatgaacttactatctatgacctcgagctgcctccattcagatgacgtgatgatcatatattgcgcgcattcgcactgcaggaatttgcac

SEQ ID NO: 38695 - DNA, 446 bp, Oryza sativa
  Clone ID: PAT_MRT4530_42307C.1
ctcggatggagttacccctgtgatatatggagatgcggtcagatatactggttgagctatgcacgggagaagcattgcttcagacccatgaaaactggcagcatgtggctatgattgagagggtatctggtcctgtggcatgtgacatgcttaatagggctgaccggcattggaggaaatatgtcacaaaaggacgtgtaaactggcctgaaggtcgtgcgtgacgggatagcatgaaagctgttatgaagctgtcaggagttcagaatctggtgacagcaaaatgtgtatcattctggctgcagaattcattgatcttcagctaggtctgtgctggtgtgagccacgtcgccgcgctaacagcacaagaggcgcttatgcatccattattgagggagcagggccagccaatactatgacgaatattgtatgatgacctacatctg

SEQ ID NO: 38696 - DNA, 177 bp, Oryza sativa
  Clone ID: PAT_MRT4530_42308C.1
atgatgacttcgggcttaccaaattttggtgttaatagcacgccgctccattcccgccctgtcgctagaggagacaaggagctaggcgtcggtgggggcgacggagatgacctcgactgcgttctcgccatgggcagggctcccaccctatcccctcgcatctcctctgccttttcg

SEQ ID NO: 38697 - DNA, 405 bp, Oryza sativa
  Clone ID: PAT_MRT4530_42309C.1
atggagaggtcagcctcctacaccgagaagagcaggagcgccgccacggtggccggcgccggcgccggcgacttgaggtgccacagcgcctactacgtcacctcgacgtactctgctcctcctcctcctcctctctggtacgacgatgccggcagcggcaaggcgagcaagatcaagaagaagaaggcggcggccacctggccatcgtcgtcggcgtcggcgtcgacgtcggcgtcgaaggggagggtgtggggcgggctcggcgacgcggcggagatgcagcggcggcggagggtggccggctaccgggtgtacggcgtggaggggaaggtgaaggtgtcgctccagagcagcatgcggtggatcaagggcaagtgcacccgcgtggtggacggctggtggtaa

SEQ ID NO: 38698 - DNA, 358 bp, Oryza sativa
  Clone ID: PAT_MRT4530_4230C.1
agggccggggggtccccccggaatttccggcccgttccttgggggggtcccatttttcctttggggggggtgttttaaaactgggctatatttggaaaatacttttttcttggggaaaaattttttccggtccaaattccaaaaaattaaaggccggggagcaaaaagggtaaacccggggggcctaattgggggggctcccccactttttttggggtgggcaaactgccccttttacgggggaaaaactttttggccccgtttttttattgaattgccaacccccggggggagggggttttttttttttgcccccgggggtgttttttttttaccggactgaagggccacttttttt

SEQ ID NO: 38699 - DNA, 723 bp, Oryza sativa
  Clone ID: PAT_MRT4530_42310C.1
atggggagggtgaaatggcgaccacctccaccgacttcggtgatgggagagatcgcggcggcagggcgaggagccgaggacacgcagcctagcgaggacaaggccgacaaaggcaagggcacgcagaccgcagcggctggaacttgcctcggcgaggagagggccggcagagaccaaggcgaagagaggcccggcgacaccaacggtggcggcaacgtgctgggcgcacagaccgcagcggtcgccgccaccaaccttgacaaggagactggcggtggaggagagcacaacgacagcggcgatgtgcgggcagcacaggaggtggcccactgcggagcttggccgacgacgaagtctcgggtgtcgacaaggggtctagcgatggacgaggtggcgaagacaacggcgggaacgccgatggtcgtcactgtcgagccggcagagcagacggccgcggtgatcgacgagccagtcagtgagccagtagtggcagctgacgagtcggtagcggcggccaatgagccaatggaaggaacagtggcggctgacaagcccacggtgagggaaggcatcgtggcaccaacgcggctcatcagcccggagaagggagacggcccagagagggagggcggcccaccggagagggggggcatggggagaggccctcgaatcgaagcatccagaagatcagcttcgagcaacatgggatccatggtatcataa

SEQ ID NO: 38700 - DNA, 2101 bp, Oryza sativa
  Clone ID: PAT_MRT4530_42311C.1
cttgacaaaggatgcttaaagtaaatagccgaacaaaatgcatcgcatagccggatggacttctgatgccaataaaacatcgcatccagcatacgctaaattgctactaaaaggctagggtacagggcatacaaccacgctacaaccaatccccgttcctgccattttttacaggaaaggatcggccccccctacaggatcaatactaaattactaaccaattactcgatcaaatcggcccactacggccaaggcaaaacggggaaggccatttgggttgggccgtcaaattttcagtcgtagaggagatcggactgggccaggttggggtgggccgagaagtaggcgaggaggccgaggagcggggcgttgatgtacgtggtgggctcggactgctggaacacggcccgcgcgtcggggaacgcgtcgctggggttgctgggcccgcccaccacggcgcccaccaggaggttcgggttgggcgccgcgctggcgtagtaggtcgccccgcccttgcacccgatccgcgccgggtgcgccgcgacggacggcagcgagctcccccggtggtggatccgcagcgggaacctggagccgtaacccaccatgtacgacatccgcagcgggttgtcgccgaggatgtagtccacctggcgcttggcgacgcggcggagctggacgggggaggcggagacgcccgtgccgcacgagacgcggacgtcggcgtggctcaggtagttggagtaggcgaggaggaggaacgacagcgacgtcacgtgctgcatgttgctgttccccaccttgaacagcagcccacctggggagtactggatctggggttgattagagatgcccgggaggagggtgcagatgaagttgtcggcgttcacgcggaacgactggaaatactcgtccttccccatcaggacctccttggagatgaggacgttgatgccggcgtgcttgttgtcccagccgaactcgttgatggcctcgctggcgccgagcaccacctcgttccgcttgatgtactcgcggtactcccggcggcgcgacgccttgtgcagccacgccgcgccccacagcaactcgtccttgtagccggagtagtcgcagtagcaggggcacacggccgcgtgcaggctgctgctgtatgggcccctgtacttgtccgcgaactcgaacacctggatggcgcggtcgaggaggcggttggagtagtcggggtcggcgtcgcggaagacgatggaggcggcggcgagggcggcggcggtctcggcggcgacgtcgcggcggcgacgtcggagccggggtgggaggggtcgaccttgtagacggtgcgcggggtgtccatgtcctcggggcgctcccagcaggagtggtcgcgcaggacgtcgccgacctggacgtacaccgtgttgggcgtcgccgtcgccttcatcaggtagtccgtcgcccaccgcaccgcctccctcgccccgaagctccgcccgaagtcgatcagcccccacgacatcagcgtcgccgtgaacgccatcgccgtgaacgccatcgggaacccgaacttcacgttgtcgccggcgtcgtagtaccctcccgtcaggtccacgccggcggtggcgccgtcgttgagggcggagtcacggcgccagcggaggcgctggtcgggtggcaggcggccggagcgaggatgctcttatggagcgcgtcgccgtattcatggcgtcgctgtagtcatgctgccctgacaccgaagtcgcggtcgccagcaccagcagcagcacagcaccgcccgccgccgccattgccgcggaaggagagtgtcaccgtcgcggcgaatggtcccaacgcaagggcaaatcggcaatgcacaccacaaactgctttctgttgcccgcgaagaactttcgaaatgtgcgatacacttcggtcgacgcttcgcggcggccgggtgatcgagcgagcgtgcgagtgactgaacgaggcgtggtggttttttttttgctgctcttgctctgctaccgcacggtgttcccccgggtgatcggcttggcaacgaggcggggtttaataatgccagggaggcgagtgagcctcgtgc

SEQ ID NO: 38701 - DNA, 321 bp, Oryza sativa
  Clone ID: PAT_MRT4530_42312C.1
atggaggtggggcccatgactacaccggagagggaggaggggaggggagaagctcactggagagagggggaaggggagaagctcgccggagaaaccgcatccgcgccgagcccgagctcccgccgacgccgcaccatcggtgaaggagagagcggcgccgactgtggggaggaagagccgcgacggcggtggggccgctccgaccgagacttcgctcccgccgagaccgccacggggtcgtccgccgccggcttccgcgccgcctcgccgccggccagccgccagatccagagagggagaggggcgccggcggcgcagtag

SEQ ID NO: 38702 - DNA, 1833 bp, Oryza sativa
  Clone ID: PAT_MRT4530_42313C.1
gttcagaggaaaagtcggtggtgcacttttatatataatccactcgctgaaccatagcagtacaagtgtaactatgtctacagtactgttacaacattgctagtaggagtagcagcctaataaagcctatgcattcctcctggccgatatttttcgcatgaaaggaggtggctgcagttaactatactttgttggggttttgtagaggaagttaactatatttggttacacaagtagtatcaatcaaccaggcaataatcacccgattcggccctgacaaaacaaacaatagcccaggcccgtatagctgatatactttggcgggttgttctagtcgtcggcccactcggctgggtttgggtgggcggagaagtaggcgaggaggcccatgagcggcgcgttgatgtacgtggtgggctccgactgctggaacacggcgcgcgcgtcggggaacgcgtccgtggcgtcgctgggcccgcccacgacggcgcccaccagcaggttggggttgggcgccgcgctggcgtagtaggcggcgccgcccttgcacccgatccgcgccgggtgcgcggcgacggacgggagggagctcccgcggtggtggatccgccgcgggaacctggcgccgtagcccaccatgtacgacatccgcagcgggttgtcgccgaggatgtagtccacctggcgcttggccacgcggcggagctgcgtcggcgacgccgagccgcccgcgccgcacgacacccgcgcgccggcgtggctcaggtagttggagtaggcgagcagcaggaacgacagcgatgtcacgtgctgcatgttgctgcccccaaccttgaacagcagcccacctggggagtactggatctgggggtgattagagatgcccgggaggaggctgcacatgaagttgtcggcgttgacacggaacgactggaagtactcgtccttccccatcagaacctccttggagatgaggacgttgatgccggcgtgcttgttgtcccagccgaactcgttgatggactcgctggcgccgagcaccacctcgttcttcttgatgtactcgcggtactcgcggcggcgcgacgccttgtgcagccacgccgcgccccagagcagctcgtccttgtacccggagaagtcgcagtagcaggggcacaccgcgtcgtggaggctgctgctgtaggggccccggtacttgtccgcgaactcgaacacggcgatggcgcggtcgaggaggcgcttggagtaggcggggtcggcgtcgcggaagacgatggagccggcggcgagggcggcggcggtctcggcggcgacgtcggagccggggtgggaggggtcgaccttgtagacggtgcggggcgtgtccatgtcctcggggcgctcccagcacgagtggtcgcggaaggcgtcgccgacctgcacgtacacggtgttgggcttcgccgtcgccttcatcaggtagtccgtcgcccaccgcaccgccttcctcgcctcctccttgtgcggcccgaagctccgcccgaagtcgatcagcccccacgacatcagcgtcgccgtgaacgccatcgggaacccgaacttcacgttgtcgccggcgtcgtagtaccctccggtcaagtccacgctggcggcggcgccgtcgtggaggccggagtcgcggcgccagcggagacgctggtcgggaggaagcctgccggagcgctgtccctcaaagaacagtatgctcttatggagcgcgtcgccgtaatcatgaccggccgcgtgcatcggcgggctgaatacgtacgcgaacgcgaggcgacccggaattcgccgcgctctctctctcgc

SEQ ID NO: 38703 - DNA, 573 bp, Oryza sativa
  Clone ID: PAT_MRT4530_42314C.1
atgggaaatggtggccggagctcaccagagagcagcggcgatggggatcggcgtgggaagctcgggagagggtgtggggaactcaggaaaacagggaaaaaaaaggagaggagagcacacggggtacctttttttgggagcgggggagagggatcacggccgagagtggtggattttccggccggagtgagggcggcgacgtgggggtggtggcggcggttcggcgccgattcccgcggagggagtgggggaggagagaggaggagggtgacgcggtcgcacgatgggttcgggcgcagggggtggagatgggtggcggggtggcgcgtaatcggtggaggagtgggggcacggctcgaccatggcaaccggctagaggtaggggatggccctgacaggtggggccacgggtcccacctatcggccatgggagagaggggaggccggtggagggacgccgagcagactttgcaagggggcgggccgaggaagagagagagagaggcccgagaggaggaggggggcgcgcaggccacggggagagaaggagggcttgggccgaaaatggcctaa

SEQ ID NO: 38704 - DNA, 1013 bp, Oryza sativa
  unsure (1)..(1013): unsure at all n locations
  Clone ID: PAT_MRT4530_42315C.1
tgtcgtcgtttgtggcgtgtgtggttctttggtttggtcgtctgttgtgttgtttgtgctggtggtatacccgtgtcgcctgtgttcatctgctggtcgtgtgggtgtccgtgttctcttgttgtggtgtccccccccccctcgagtgggggttgtccgttgtgttcgttggttgtcggttcctcccttttggtgttattgtttgcggtccttggcctagggctcctgtgcgggcaccacttttgtgcattggggcttccttaacctagccaaggggtttttgccccggggccatatgtattgtcattcgtgtccattctcgctcccatgggctttccattgtgtttgctgctagcgccgtcctaggtattcccgtttagtccccctcgtcccgggggtngacgttttctggatagcctcaatcccatgtgttgtctgtggccgaccatatgtttgtgccctgaccccccccgtgtctgcgtccccactgtccaccccggggggctgccccctgcgcggtgccaacccgcccgtggtgccatcgcgcgcagcctcgccggctgcctgccgcgcgccgtggctggccgccgccccacgctggtgcgccccccggccctgcgccgcctggcccctgggcgcgcggggcgctggcgtgcgctggcacgccggccacccgctccaaccagtgttggctgggcgtgctgactgtgcgatgcaggctgcaagctgcaagccccagtctgatggttgggcccctgaaacctgtggccgtgcaatgatgcgggtgatgctgacccccagctacaaccctggctgccctgtaggcattgcctacccgtgcggtgggtgatgctgggtgattggaattggtgaccaagtgatgagtgagtgaccacggagagataaataaagtcatgcatcatcgtgtgtgaccagttgaaacatgcggggtgataccaatgctggaatgaaaaatgtgcatgccaaatttaaacatgaaaaaaaaaaaaaaa

SEQ ID NO: 38705 - DNA, 291 bp, Oryza sativa
  unsure (1)..(291): unsure at all n locations
  Clone ID: PAT_MRT4530_42316C.1
tgcgtccacctgtgggaatttttgatatgacgcaatcanaaccaaacccttggacaaacctgagagcatggattaacaagagtgatggggccaatgcagatgctgnaacttgctgtgctgggaaagctggcacccaacgtgctgtgcgcaaaacgtgttnatggcttgcaagaactgaggacccccatgggtgccacaattgatggcttgttttgaggatttagatgctgtgcaatgcctgaaagtgttgccggacaaactncatganctgtgagtgttgttgtgctgttg

SEQ ID NO: 38706 - DNA, 382 bp, Oryza sativa
  Clone ID: PAT_MRT4530_42317C.1
cttactgcggcccatataggcccatcaagattagaggctctagcggcatgttggcacaatagcctttgggaaaaagtacacccaaggtccctcaacttgtcatcgaattacaaaatcatcctccaaccgtaaaaccggatacacatccctcaacttataaaaccggtgcaaattagatccctaagcagttttgaccccggttttatccaatgtggcagttgactcagcatgggacatgtcaaccccttattcccctccccttttttcctctgtcctcttcttctcacttcctctgtatccttcccctccccacgcagggcaaccgcccggtgtctgtgtcggcggggcccgatgagtcgaagccaaaggggaagacaagagg

SEQ ID NO: 38707 - DNA, 537 bp, Oryza sativa
  Clone ID: PAT_MRT4530_42318C.1
atggcaccatgcgccgctcttcacctaggcacattagctacagagtgccttggattcctcgccactattgcactccagcaccagcagcagccacgcccaaaggcccccttcttcctgggctatttcaatggcaccgatatggtgccgtggatcaaggcagcctgggcggcgaacttgttgccacggccattgcctcccctcggccggcgagccaaggatggagaccatggcttctccacctccgccgcgccacacggtgctctaggtgacggtgacggcggctgtggcggtaacgaggggcaggtgggaggggatgaggccagtggaaacggcgatggcaagccgcggatctggcagtggcaattcctagacgctgtggatccgacagcggaatgggaggaggctagtggcgacatcggcaaactgcgaatctggcggcaatggggcgcaaatctggtggaggcaacaaatctcatggcatgggcacgggcgggcttcggcgaggctcctatggtggatcctcgtccacgatgctga

SEQ ID NO: 38708 - DNA, 289 bp, Oryza sativa
  Clone ID: PAT_MRT4530_42319C.1
gaacaatgacatgacaatcataatcatactggtccaaaacactcaccaattacagaaacactatgatgattaggagctgttgagctctcattattctttgcatgtggggactttggtagtagtacaagggaaaatagggccatggcaaagctgctaccacaacacactccacccaaagcctctgagccttttcaagatagctactgatcctagctcttcttttgtcccctgacactgaaaaaagtttgtgttttctccattgttcatcttcgcttttgatgagtaaata

SEQ ID NO: 38709 - DNA, 389 bp, Oryza sativa
  unsure (1)..(389): unsure at all n locations
  Clone ID: PAT_MRT4530_4231C.1
aatcaaaagtcaaacacacatataattaggtgaacagcgatgttacaaattcgatcaaggattacagcgcactagacaggagtaatccaaaatccacctcaattctacacagatctctctctctctcttttcaaaaggataaattctacacagatcttcttaattactgctctaaactacaagcgacatttcaatgtctccgcaagagaaaatcattaacaccaagaatcaagcaacaatctagctagcttgttctcttctcatggcgatggggatgagacgagcagtctggcggcggcgagctcgcgggcgaggtcgtggacacggcactggtactcccgggcgagcttcaccgtcttcacctncnnctcgtccagttggacgcacag

SEQ ID NO: 38710 - DNA, 244 bp, Oryza sativa
  unsure (1)..(244): unsure at all n locations
  Clone ID: PAT_MRT4530_42320C.1
atgagagggatcaatcaattttccctgtgtatggatggacctgtgaactggttggtattgtaccggtactactactccantagaccanacacagtggtgtggcgtgtgaatgtggattggactctctgagagatgagaactggaacctgtacattgatgagttgatatcgatctttgttgagattgaccaccgaaagncatcattctcttccagtgcgccctgatcatcaaaaaaaaaaaaaaa

SEQ ID NO: 38711 - DNA, 969 bp, Oryza sativa
  Clone ID: PAT_MRT4530_42321C.1
gtcgactctagaggatcccctgtggacctgatgggaacaggcaaaaccatgattggaaaagcaatagctggtgaagccaaggcaacatttttctacatttctgcaagttcactgacaagcaaatggattggcgagggtgaaaagctagttcgagcactatttggggtggcctgttgtcgtcagccagctgtcatatttgtggatgagattgattcactactatcacagcgcaaatcagatggtgaacatgagtcaagtaggaggttgaaaacacagtttctaatcgagatggaaggttttgacagtggaaatgatcaaattttacttataggtacctcatgcgttaaaaagatgaaaatatcaagtgtgatatgcattaatgagcaacaaacagacctcaagaactggatgaagcagcacggaggcgacttacaaaacgtctatatattccccttccttcatcaggaatctcattgttccatggtttattttaaagaggcacgggcctggataattcgcaatctattggagaaggatggccttttcaagctcacagaggaagaaacaaatattgtttgcaagttaacagaaggttactcaggatctgacatgaaaaatcttgtgaaagatgcctcaatgggaccactaagggaagctcttcaacagggtgttggcataacaaagctaaacaaggaggacatgcggccggtgatgctcaaggattttgagactgctttgcaggaggttagaccttctgtttcctcaagtgaactgggaacttatgaagaatggaacaggcaatttgggagcttagcaaattaatttgcagggagatgttgaaaccttgaaggcgctagtatgctttcccatgcaaagcatgcgaaacatatgcttgcgagagtcgacagaggacaatgaagcataccttgtgcagccatatacctctagactacttgtgatcactgatgc

SEQ ID NO: 38712 - DNA, 298 bp, Oryza sativa
  Clone ID: PAT_MRT4530_42322C.1
ttgttgttcctgatcaattattaaaagaattacacttccacacacacacatgttacatgtttgatgatatatgtaaagctaaagaggcccacccccacaacaacacactctcagtttggtggtccatcctatcagtcacactaccttccccatcctctgatcgtgagctccacacaaatgtgagctcaccaccaaagcttagccaaagccagctgctcgatcgatccactaataattctttctgcagcttgcattggttggcttttttgtctgggtgatccaccaaattaaaggagag

SEQ ID NO: 38713 - DNA, 1219 bp, Oryza sativa
  Clone ID: PAT_MRT4530_42323C.1
atggcggcgctgctgcttcgtaggctcgccgggacccaccgcggccgcgtgcctctggccgccgccgccgccgtcaccggtggagcggcgctcttctgcgcctcgtctcccccaaccatcgcgctcatggaggagaagggcgaggatgccgctgctaaagttgcgcttaacccagacaagtggctagagttcaagctccaggagaaggcaacagttagccacaattcacaattatttagattttcgtttgacccatctactaagttgggtcttgatgttgcttcatgtctcataacaaggtacacacctatctctgatccagattctaaaggatattttgacctgctaatcaaggtttatcctgatgggaaaatgagtcagtatttcgcaagtctgaaaccaggagatgttgttgaggtcaaagggcccattgaaacccgcacatacctatctccgatccagattctaaaggatattttgacctgctaaactggcataacaccaatgctgcaggttgtcagggctatcctaaaaaaccctgatgacaacactcaggtttccttaatttatgccaatgtgtcaccagatgatatcttgctgaaaagggaattagatagacttgccagtagctatcctaatttcaaggtattctacacggtggacaaaccatcaaatgattggaggggtggtgttggctacatatccaaggacattgccttgaaaggtttgccacggccaggggaggattctctgatccttgtttgtggtcctccaggtatgatgaatcatatatccggtgacaaggcaaaggatagatcgcagggcgagctcaccggcattctgaaagagttaggatacactgcagagatggtatacaagttctgagtgcgtcttcaagacgttagaatgctgacatgcttgctgcaatggcgccatggcaatgatcaaataaaccacagctgaacacttcttttattatgccacagcagttgggttccagacttgagaaagttttgacatttctcaataatgttcattgagaatcacatctttttgcgtggtttgcttctgcgatatgttcttgcggcccatgcacctggatatgcattgcttcagccgtttatgagatggtctggaattgccgtggatgatcttatagagatagatccattcacagatttgagactaccttgtgcactgcattttgagtatttacctg

SEQ ID NO: 38714 - DNA, 295 bp, Oryza sativa
  unsure (1)..(295): unsure at all n locations
  Clone ID: PAT_MRT4530_42324C.1
tgattgttagtgagcaaacctctgagggtgtaccaacagggatatcctgggaagttctactgtccaagaatgaatagcatgaataaaccagcatatgcagcaatatgtactcattcaccagacaaaccagttctgatttttgtatcatctcgtcggcagactagacttactgctcttgatctcatccaggtggatgctgttttggattcttttatttaatggatatatagatggggatcctctagagtcgacctgcaggcatgcaagcatgaggatatacaaggtntacaaaccg

SEQ ID NO: 38715 - DNA, 1284 bp, Oryza sativa
  Clone ID: PAT_MRT4530_42325C.1
atgccaccggccgccgccgccgccgccgccacccgccaccgccacgcgaggccggccggccacttgcgctgcgccgccgacgcggtgtccacggcgccggcggagcggacggcggcgagggtgatcgccacgagctcgcgcacggcgtcggcgtcggcggcgtcgggctctgtcgctcgcgtgtggaggaaggtccagggctccggcgactgggacggcatgctctcgccgctgcacccggtgctccgcggcgaggtggcgcggtacggcgagctcgtcggcgcgtgctacgcggcgttggaggaggacccctcgtcgccgaggtacatgaactgcaagtacggcaagctccggatgctggaggacgccggcgtcgccggggcaggggtacgaggtgacgcagtacatctactcgtcgccggacgccgccgtgccgggcatggaggcgtcgacagcggccgcgccagctgggtcgggtacgtcgcggtgtccaccgacgagacgacgcggcggctcgggcggcgcgacgtgctcgtctcgttccgcggcacggtcacccccgccgagtggatggccaacctcaggagctccctcgtgccggcgagcctcgccgcgcgcggcggcggcggcggcgacgtgaaggtcgagtcggggttcctcaacgtctacacctccgccgacgagacgcggcgcttcggctgcgccgacagctgccgcgaccagctcctccgcgaggtgtcccgcctgttcgccgcctcccgctccggcggcgaggacgtgagcgtgacgctcgccgggcacagcatgggcggcgcgctcgcgctgctcctggcgtacgacctcgcggagctcggcgtcgccggcggcgccccggtcaccgtcttctcctacggcgggccgagggtggggaacgcggcgttcaaggcgcgctgcgacgagctcggcgtgaaggtcctccgcgtggcgaacgcgcgcgacccggtgacgaagctcccgggcgtcttcctcaacgaggcgacgacgaggtcggggccgctcgccgccatgcgcggcgcgtgctacgtgcacgtcggcgaggagctcgccctcgacttcgtcaacctcggcgacctcgccagcgtccacgacctcggatcctacgtcgcgtcgctcagggaaggggtggtcaccgacgccgaggcggccaccggcggcgttctcgccatggcgatggagctcgtcgggaggcaatggcagtcgaaggacgcagccagggggatgatgcagtcaactggcttgatatga

SEQ ID NO: 38716 - DNA, 575 bp, Oryza sativa
  Clone ID: PAT_MRT4530_42326C.1
ttcgtcgcacttgcctcccttgccatgtcatgctcatcgggtggtttgatttgggcatcgctccgggcgtggaggaccgattagagcactgctgctgcgcggctgcccactgtgcagtcatgcctcgccgtacccattacccatcactctgtctctaccgcctgttgtcatgctcctccactgcaacctgattttccttatgtgatggataacaatgcagatcgtgctccatatcagcagcttcgtcaaagaacatgtacttgtgagcatcagttccaggacatgcttaccatgtgtttgtgaaaatgccttcaaacaatttgttccatctgttattttaatcattgtgcatattttggtaggaacacccattatatgcaacacataatattttcttcataggtcagatgttgatcgtggctaattatatgcaatcaaaatattttctggataggtcagatgttgatttggagagcaagcatatataattggctaggagtcagtaattttgttatagtgcttatgtccatcaacattacaacatatatatctttatgatgcaaattttctatatg

SEQ ID NO: 38717 - DNA, 510 bp, Oryza sativa
  unsure (1)..(510): unsure at all n locations
  Clone ID: PAT_MRT4530_42327C.1
cccacgcgtccgctcactccgtcgtcgtcctcctcctcggtctcctcgccccggtccaccccccactgacaagtgggcccaccccaccatcccccccggctgcgtccgcggcgagcagcggaggcctccacctcgccggcggcggcatgagcgggttcttggcggtggtggggaaggtcgggaccttcctgctgtggctgctcttcctcgtgctgcagacggccaccaagatcgtcggcagcctcctcgccgcggggccaccaccggctgacgcccaggaagccgcggcggcggcggctgcgcggcgcaggtcgccgccggcgtcgccgcacagcggtggcggtgccacggacccgtaccagcctccgcagctgtgggacccgccgccgccgtcgtctccgtactcggctggccacgcggcggacgaatactcctcgtcctccagctaccggcggcgcggngcgagcgcgccgccggccgaggacgtggtggtttcctccagctactcgc

SEQ ID NO: 38718 - DNA, 449 bp, Oryza sativa
  Clone ID: PAT_MRT4530_42328C.1
tagtaagacagcaggggttcaccaaattagatctccgatcagtgtatcatcaaataagattgttggaccatgatgaacataaaactgccttttaaactcaccagggtcattatgaattcaaggtgatgccttttgggctaaagaatgccgtagctatatacattcgagggttaataaatatcatttttgctcacttgatcaggaattgtgtgctagtctctgtggatgatattttgttctatagcaagaacttggaggagcatctgagccatctaagggaagtgttcaaaatagtagcacatcatcagctttttgtcaaagaaagtaaatggtcctttgctcagcagcatcggcatgtgattggaacaacagggggtggcccctgatcctaacaaggttctagcggtaaaggattggccgatgactagaaatctcaggcaacttgtaag

SEQ ID NO: 38719 - DNA, 204 bp, Oryza sativa
  Clone ID: PAT_MRT4530_42329C.1
atggcggtggagatgatctatgatgcacatgcatcgaccggcatgccagcgagcgatagcggaggcgtggggaggctggcgagcgggggtggcaccgggaggcatggaggtgggcgagccactcaccgtgagatggaaggcgggcacgacgactggggaagaagacgaccgctaacacaactccaccgccctagacttgagtga

SEQ ID NO: 38720 - DNA, 132 bp, Oryza sativa
  Clone ID: PAT_MRT4530_4232C.1
atggcgcccggaagttccggccaaaacctccggtactctttggacgtgaggtggctgcaacaagaagtgaagatgatggacttgagcattgccgacagcaacaacggtagtttgatctggcctaagggttag

SEQ ID NO: 38721 - DNA, 1872 bp, Oryza sativa
  Clone ID: PAT_MRT4530_42330C.1
atggcgagaggctccgcctccggggaggccagccgcgaggtcttcgccgacatcacggtatccatccaccccgtgaacgcgctcttcttagacgcgatagccagcttggagagagattatgggcaaggcctgggcaggagtggtctcaaggcaattgatctcactggcgccaaagggtcgttttctggaggcgttcatatcaacgcattcgacaagaagccaagtaaagattgtccagtgctctcatttgtcaacaagctgaatatttatgtcgttaagttcatgttgctgccagatgctccgaaaccatcagtggctgctatagatggcgttgctctaggtggcggcttagagcttgtaatggtttgtcacgctcgtgtttctacatcttcggctcaattaggattacctgaacttcaactgggcatcattcctgggttgggaggaacacaacgactgccccgccttgttggcctgccaaaagctcttgagatgttgttgatgtctaaacctctaaaaggagtggaggcacataaatttggtttagttgacgctgtagtttcagctgatgaattgatcagcacggcctgttcctgggctctggaaattgttgaagacaaacgcccatggttcaggagtctccatagaaccgatagacttccagctcttgaggaaacgaagaaaattctgaattttgcaagagttcaggcccaaaagcagtctgctagtctccaacatcccttagtttgcattgatgtcattgaggagggcataatttctggccctcgagctggcctaatgaaggaaacactttgtggaaaaatgcttgagatgtctcagataagcaaaagcttaaggcatgtcttttttgcacaacgtgcaacttcaaagattccaaatatcagcatattggggttgacaccacggagaatacacaaggtggctattgttgggggaggtctaatgggatctggaatagcaactgcattgatatcgaacaacctcctggtaatcctgaaagaagtcaatgagcagttcttagatgctggtattagcagagttaaagctaatctgcagagcttagtcaaaagggggcaaatgaccaaagaagattatgaaaataaactttctttactatctggtgttcttgactatgaacaatttagagaagctgatgtggtcattgaggcagttattgaggatttatcactaaagcagaaaatatttgctgaccttgaaaaatactgccactctaattgcatacttgccacgaatacttcaacaatagaccttcatttaattggccaaaagacatcttgccaggatcgaattgctggtgcacacttcttcagtccagcccatgcaatgccactgttggaaataatccgtactcatcggacttcctcacaagttgtcattgacttgctaaacgtggcaaaacagatacgaaaaacaccaatagttgttgggaactgcacaggttttgctgtgaatcggatgttctttcctttcacacaggtggcttattttcttgttgattatggtctggatgtctaccacatagaccatgtgattacaaagtttggaatgccaatgggacctttccgattagctgatcttgttggttttggagttgctattgcctccagaaagcaatatctccaaagttatcctgagcgatgttacaagtcaatgcttattcaaattatgcttgaggaaaacaggacaggtgaatcttcacgcaaaggattttatctttatgatgataagcgaaaggcttctccagatcctgaaatgaacaagtacattgagaaatcaagaagcatggctagtattgtacaagatcctaagatgtcgtacttctcagagtaa

SEQ ID NO: 38722 - DNA, 329 bp, Oryza sativa
  Clone ID: PAT_MRT4530_42331C.1
cccacgcgtccggttttggagttgctattgcctccagaaagcaatatctccaaagttatcctgagcgatgttacaagtcaatgcttattcaaattatgcttgaggaaaacaggacaggtttttcatattaacaatacattcacctacaatttcttcatgctgttgaatatgattttgagctacatgtgaagctgaatctcatggctgatatactttctggagtgcttggcaggtgaatcttcacgcaaaggattttatctttatgatgataagcgaaaggcttctccagatcctgaaatgaacaagtacattgagaaatcaagaagcat

SEQ ID NO: 38723 - DNA, 1389 bp, Oryza sativa
  Clone ID: PAT_MRT4530_42332C.1
acgaattccgcacgtgcggcgcccctatggtttgcgccggcgccatctccctcggatctgtcatcgacatcgcacatgccgccgttctccagcgagccaatgacgaacaacgagggggaaccagtggaagatgcgtcttgccggtcagtgcggcgccggcggtaccgagaacaaacaagtacaaatagtgctccacttcgccaacaaggtgatatttctgagggcgcccaaaacactatgacaggattcgactttgatagacttccacaggatatcttgtgccatatacattcccttattccgctacgagatgctgcctgcttggcttgtctgtcttgtagatttctacgctcttggagatgcttccctaacctcacattcaatcaggaaacattcagcttgaatgtttacgagggcacatcatatgaaaaagaaaaggaaccagtggatataattgacagcattcttcagaaccactctggtactggggtgaagacacttaagcttgatgtttctaattacttcaaacccatcacggctgaccatatcaacaattggcttaacgctgctgttaaacctggaatcattgaaattgctgtgaaatttcctcaccttacggtcctgaatgtgttattttgcacaaatctaaagatgatagaaatttatgctccaaagctgaccacttttgacttcagaggacgccctatgaaaatattaaccagtgactcctcgcatctgaagtacatgactttgcatggtacattcttctctggcatgatccaatatgctaggactgaactccattctatcgcatcgaatcttcagactcttaccctggcatcatctaaagaggattttattacgccaatgttgcctgtgaaattcctccacctcaggaacttgaatgtctattttgatggcattagattccaaagctatgattatttttctctggcttcttttttcgaggcttgtcctgccttggaaactttctacatatgggcaggagagtatgatcttgcatggaaggacccagctcttcaagattccaatgcagattcgttacagataaggcggattccagaaatccaccatgccaaccttaagaaagtatccatcaaccgatttttcccgtcaaagagcttgattgagctaacatatctaattattgagaatgcctcgtcgctacaatgccttaagctggacgctggctatggttttgacactagtggcatgtgtaaaaggatgaataagttagatgtactccatgccctcagtgctgtggaggttgccaagaaatatattgagggcaaagttccctccagtgtgaaattcaacattctggagccctgcgagcggtgtcatattgcaaaactttcccaactttag

SEQ ID NO: 38724 - DNA, 254 bp, Oryza sativa
  Clone ID: PAT_MRT4530_42333C.1
gcacgagggagagaactagtctcgagtttttttttttttttttttaaaactattagagttctctatgtcgaaggcaaaagcaaaggacccatctggggtcagtttttgaacaagcagagttttgcagtttgaaatcacttctgattagcgagagcctatgggctacaacatgttagtggtttccataaccattttgtgctgggctgatggccacttgatcagcattagctagttttatcataaagatattcaac

SEQ ID NO: 38725 - DNA, 3229 bp, Oryza sativa
  Clone ID: PAT_MRT4530_42334C.1
atgcgtgtcctgatcccgctgctgctactgctctacggcgttggcaacatcggtggctcaacgcttcctgacaacaccacagatatgctctctctgcttggtttcaaggaagccatcaccaacgatccgtcaggagtcttgagcaactggaacacaagcatccacctctgcagttggaacggcgtctggtgcagccccaagcaccccgggcgagtcacggcgctcaacctcgccggccaaggtttgtccggcaccatcgccgcttcggttggaaacctgacttctgttcgttcgcttgacctatccagataataacttctccggccagatgcctcatcttgccaatctccagaagatgcaagtccttaatcttagcttcaatacactggatgggattattccagacaccctcacaaactgttccaacctgaggaaactagacctctatacaaacttgctagagggtgcgattcctccgccaataggtcggcttagaaatctagtttacattgacctttcccggaataatctgactgggatcatcccggcaagcctaaaaaatatatccctattagaaacaatctatcttcaacgcaaccaacttgaaggaagcattcctgatgagcttggccaattttcaaatatttcgttgatggccctaggggcaaacaggctatcaggtaatatcccagcaagccttttcaatttgtcttcccttcgaatactagaattacgtgcaaatctgctaggagggattctgcctagtaacatgggaaatcatctcactaatctacaacacctcttcatgggccagaacatgttcaaaggtcatgtaccagcttccttaggcaacgcttcaatgctagaaacaatagttttacaatctaacaatttcaccggcagaatccctacctccctcgggaagctatcaaatttgtataagttggaccttgaactaaacatgcttgaagcaaaagatactgaaggatggaaattcctggatgcgttgacaaactgcactgctctagaagtgctcgcattagctgaaaatcaactacagggagttataccaaattcaatcggtagcctatcgaacactcttcggtatctcgtgttgggtggaaatgaactatctggcatagttccctcgtgcatagggaacctttctgggttaattcaactgtcattagatgtaaacaagctcacaggttcgatcagcccatggattggaaatcttaaatacttggaatatttaaatcttggaaagaacagattcactgggcctattccatattctattggcagtcttacacggctgacagagctctatctggaaaaaaatgcatttgaaggtcacataccaccctccttgggaaaccctccactactcttaaagctggatcttacctacaacaatcttcaaggcaccataccttgggagattagtaatcttagacaactcgtctacctgaaacttacatcaaacaagcttactgggaatatacctaatgctttggaccgatgccaaaacttagtgaccatccaaatggaccaaaactttctcacaggaaccattccaatttctcttggcaacctaaaaggcttgagcgtactaaatctttcccataacatcttatcgggcaccatcccagcagtactgggggatctacctctactcagcaagctggacctttcttacaataatctccaaggagaaataccaaggattgaattattcagaacatctgtttatcttgaaggcaataggggactatgtggaggagttatggatctccatatgccatcgtgcccccaagtttctcacagaaaagaaaggaagagcaatttgaccagattgttgattccaatagttggtttcttgtcactcacagtgctgatatgccttatataccttgtgaagaagacaccaagaagaacatatctatcgttgctttcttttggaaagcagttccctagggtttcttacaaggatatagcccaagctacagggaacttctcacagtcaaacttaattggaagaggaagttatggttcagtatataaagcgaaattaactccagttaaaatacaagttgctattaaagtttttgacctagagatgagatgggcagacaaaagcttcgtatcagaatgtgagatcttaagaagcattcgacatcgaaaccttcttcctatcctaacggcgtgttcaacaatagactatagtggaaatgatttcaaagctctgatttatgaatacatgcctaatgggaacttggatatgtggttgcataaaaaaaataccgctgttgcttcaaaatgtttgagcttatctcagagagtaaatatagccgtggacattgctaatgcactgtcctatttacaccacgaatgtgaaagatctattatccattgtgatttgaagccaatgaatatccttcttgacagtgatatgaatgcatatttgggagacttcggaatttcaagcctcgttcttgagtctaaatttgcctcacttggacattcctgtccaaatagcttaatcggattgaagggaaccatagggtatatagctccagagtatgcagagtgtggcaatgcatcgacctatggggatgtttacggttttggaatagtacttctagagatgctgacaggtaaaagaccaacagatcctatgtttgagaatgagctcaacattgtcaactttatggagaagaacttcccagagcagataccacatataattgatgctcaactccaagaagaatgcaaaggcttcaatcaagaaaggatcgggcaagaaaatggtttctatatatgcttgttgtctgtattgcaagtggctctttcttgcactcgtctgatcccaagagaacgaatgaacactagagaaatagctattaagttgcatgcaattaaaacttcctatgcagaagcgaccaagcgagaaagtacgctttgcaggagagagttagagtgtgtcatggaactagtgtaattgtgatgttttgtagttgtaggctttgaatgcgatgtggatgaactgccaaacaggccatcagcatacacagatacactggatgtgagaaactactcttctgtacagcaacatggctgtgtgcctgtggtggatggtgtattattggtgtattatttgggtttcgcaaacttggggaacgtcttttacagtttgtctaactgggataatgggattgcgaaggatctt

SEQ ID NO: 38726 - DNA, 546 bp, Oryza sativa
  Clone ID: PAT_MRT4530_42335C.1
atggcgagcgtgttctggggaagcggccatcccgccgacgaggttgccgacttcgacgagtacgaccccaccccgtacggcggcggctacgacatcgccctcaccttcggccgcgccctcccgccctccgacgagatatgccaccccatctccaccgcctcctcctcctcctcctcgtacgaccgcccccagcaaggccggaggccacctgccgaggagacccacctctcggctggccacggcaggaggccggacgacgacgaggcgacgcacggcggcgggtacaggaagcccaagccggcgtacggggacgacgagcagcagcggcggcacacctccggcggcggccgcaagaagcatggaggtgacgacgacgatggctccggcgacgagaggaagccgcgatacaagaagcacgacgacgacgacgacggcgagaggaagccgcgttacaagaagcgcgacgacgacgacgacgactccgacggcgagaggaagcagcgctacgagaagaacaaccgccgccgccacgattacgacgattga

SEQ ID NO: 38727 - DNA, 360 bp, Oryza sativa
  Clone ID: PAT_MRT4530_42336C.1
aaaaggccattcaattgctgccaaaagtgaaatttcggacggtgcggtacagatgtttgaaaaccgagcttgaaaaattgatgatgtagagcagatcagcagattctacggacttctccattcagcaaagggaatgatgctgagaatttcagtgtagttaatgatgtatagcacaatgttcttgaagggagtagaaaaggaggggtgggaagccaaagggaactcttgagaagaaaagagaaacccaattcataagggcacccgcaatggttatctataggctctctataagagattcatgtcagcatatttttctactttgaagagattaaataaagagagagagcaaagctatctact

SEQ ID NO: 38728 - DNA, 933 bp, Oryza sativa
  Clone ID: PAT_MRT4530_42337C.1
atggctgacaagttttcaaccaaaccacatgttttcaatggtgtcgattttccttattgtgtcacatctaaaaatggcaatgagatctggaacgctttgcgtaattttcatcaacgtacttccaacattaaagaattacgtaaagatattttcaaaaaggattacataaaattagagaagaaatctgaagaagctttagatgattatcttgctagattcaataagattttgagtaatcttcgatctgtggattcttcttatgatgttaattactctcaatttgaagtttctcgccactttttgaatggacttgatatgtcaatttgggagatgaaagtaacttcgattcaagaatcagttgatatgttttgcttgactttggattctctttacacaaaactcaaaacccatgagatgaatattctttctcaaaaggttgattctaagtcaagtgctttggtttcttcattggatcttggtgcttcttcatcgaactctgtctctctttattccattaatgccttgtccgatgatcaactcgaatcattcgaggaggaggatttggctttggctattaacaagttgtctcgagctatgaacaatgttaggttgaagaaaagaggaggtcgaattcgatgttttgaatgtggggagcttgatcacattcgctcacattgtcccaagttggggagagacaagaaagatgacaatggagtcaagaccaaggacaacaagcccgttacaacattcaagggaagaagatccaaggaggctctcaagaaggtgctaaatcaagtctatgctgcttttgaaccggcaagcaatggtgatattaaaagtgatgaagataaggacaaggaagagtacatctctgatttttgcttcatggctcatggtgaatctgagtcagaaattgaagataatgagttttaa

SEQ ID NO: 38729 - DNA, 527 bp, Oryza sativa
  Clone ID: PAT_MRT4530_42338C.1
cccacgcgtccgcccacgcgtccgaaattaacacacctacaaacactcatacaaaaaaaaaaacactttaaacacataatggaccatgtctcgcaacgggagcagtgttatgatcagtcctgtggtgcaaggcaagttccagcagggcatcatgaacggcatgcagaaccgtgacattggcaacagtacaagtgtccctgtgtctggctccagcttcaatggcacttccttcctcagtggtaactccgtaaatgcaccaccagctccagaggttccaagttactctattacaggcatcggaggagatgcgaccttttaagtgctggcatacaacgccaggagggctacaccaaaataaaaccgcttaacagcgtgttgtaataatcctatatccatgagattgaataaatcatgggcctagctggtagtaagcttaaatggcctgctaatcttccaaataataaaaattatttatatattaataactttatttatatttaattattattaatgatgtgtttaatatt

SEQ ID NO: 38730 - DNA, 348 bp, Oryza sativa
  Clone ID: PAT_MRT4530_42339C.1
atggaggccaacgccgacgccgacgagcggcgcctccgccggaagatcttcaaccgggagtccgcgcgccggtcccacgcacgcaagcagtggcacatcgacaagctccgcgcgcgcgccgggcgggggcgggggcggaggcggctgggggcggcgggcgccgaggccgtggtctggcgggcgccggaggagaggccagaggcaggcgccgaggcctcggatggcgggcgcgaaggcaaggccagttgcaagccacccggtccggctcctccgccactagtcgcccggtggcgcgggcaagctccgcatccacagtcgggcgctcggttcagcgtttggatgttatga

SEQ ID NO: 38731 - DNA, 3255 bp, Oryza sativa
  Clone ID: PAT_MRT4530_4233C.1
atggcggcgttcgccgggaaagaagatgaacagcggcagcgcttggcgtcgagaaagaaggccagcgaagcggtaccttcggcgtacaggtggaatttggtggcttccgttgtggacactatggttggatgggactccgaggacactatggttggatgggactccgaggtgaaagccttgcttggcttgccggtgttagcaacgatgacgctcttgggcgctattcaccttattgaaggtgttgctattggagccctcattcaactccacaccaagggatttctttgggcaggcaaccacctgttgctttccaattcttcagctggcttacgcatggattgccaagagaataatctcaaaagtttccttcagactaatgggcatgtggttcttcaaagagtggacaacaactatagcctgagatatttcacgaaaaatgaggtatggcacatcaccaatgggtatagcatcatgctgggaaagggagcattcggtgaggtctacaaaggaattctagacgacggatgccctgttgctgttaagcggtacatacatgggaacctgaaagaggaatttgctaaggaggtgatagtgcactctcaaataaatcacaagaatgttgttagactcttgggctgctgcacggaggaaaatgctctaatgattgttatggagtttatctgtaatgggaacctcgacaatgtcctccactgcagcaacaccaaggggtgtgttcctttccccttgtacaaacgtttagacattgctattgaggttgctgaagcgctatggtgcatgcattcaatgtatagtcctgttcttcatggtgatgtgaaacctgctaatatactgttagatgaaaaccactcaccaaagatatctgattttggaatagcaagattgctttgtgctaatggggctcaacataccaaaaatatcattggttctataggttatgttgatcctgcattctgcgagaatggaattctaaccccaaagagtgatgtttatagctttggagtggttttgctggagataatcaccagaaagaaagcagtggatgggaccatcacccttgctcaaagtttcactgatgccattgaaaaagggaagaaagtgatgaatttgtttgatgaggaaatcaacgataaacaaaacatgaacttccttgaagatattgggaagttggcagttaaatgcttgaggagggatgttaaagtgcgccctgaaatggttgaagtagcaaccagtctaagaatgattaggaaagatctggagggagaacaagggaatctgactcagcaacatacaagtacaccaaacaactcaactccctcaaagaatgaaggctcagcaggacgccaatttggcaatctaaatatcttcaaacaagaggaaattaagcatatgacaagaaactacagcatgacctttagggaagaattccatgaacgtctatacaatggagttcttggcatggttcatgcagttatagtaaaacaagtgagtacatcttcaaaaaccgaccgagaagtgtttctgaagactatgggcatactatgccagaagtatcacaaaaatgtcgctaatgttgctggctttcatttaggggaatacatttcagagtgcgtgtatgaatcttgctgtgaattatcccaggtaaataatggccatatttccttctctaaccgaaacctttatgagatcatctgctccacggaaaaacttcctcttcatgtacgtttgtcaatagctgtccagtgtttagagggcttggttcatatccattcatttttagctgaaaatcctgaatcgcgtggcacaagcctgttcggaaattttaggtcagccaatatttttctagacaagaacttcatgccaaaagttttcaatgccaacttatcaacatttctcgggctttgcgccgtgcaacaatgtactgcctctgttgattgtattcatgaccaaagatcacaaaaatattatttagacccaaaggatgtttctgatcatctgttcaaccccaagtctgatgtttatagctttggagttgttcttttggaactcattacttggaagacagcgaaatacaagtctggtggacaggctcatatgcttacgacagacttccttgatacttacagaatagaccatagtgcaacagacttttttgtcaagaaggtttatgacgaggaaggcaagtgtttccttcatgaagccattgctattggagttgagtgcctaaaacttgatgttcaaatgcgaccagaaatgagtgatgttctttcccgtctccggatcatctctgcagctcagagtatcagaagcaagctcatgggtccacaagcaaaaggtataatgatactcattgtaaatcaaatagtgacagataaattttcagattgtggcgataatggacctagccaatacatagcccctacccctgtcaacaatgatgtcaaaattccttctccaccaacttctgcgtcgaccatttcgctggacatactgaagaaaataactaggaacttcagtaacaattccctaataggagaaggctcacacgctaaagttttctttggagtgcttaaagatggaaaaaattctgcagtaaagaagctcaatcctaatgaagaaactatagtgcaggtttcgaccatttcaaaaatgttgaagcatgacaatgttgtccaaattcatgagtattttattgaaggggaaaatcatgttcttgtttatgagtatgcaccaaagggctccttgcatgatattcttcatggtagagaaggtgtcacaggagcccaagcaagaccacctctatcatgggtgcagcgagtgaagattgctataactgctgcaaaagggcttgagttcctccacgagaaggccgtgcctcctgtcatccacaccaacatcaagtccagcaacatacttctctttggcaatgatgttgcgaaaataggtgatctcggtgtctcgaagcagcttcatgttgaagattatgattacagttatacacgagtagttccacagatttttcgctatgaagcaccagagttgagaggacagtatagtgtaaagagcgatgtctacgcctttggggttgtattgttggagcttttaactggtcgcaaagctacaccaaggcttagtaaagacaaggtgaaacaatgcgtagatccaaagcttggacgagcattcccactcaaggctgttgccaggatggtttcttttgcacatgtaactcatggttag

SEQ ID NO: 38732 - DNA, 429 bp, Oryza sativa
  Clone ID: PAT_MRT4530_42340C.1
cctagctacaattcattcgagaacctgaagttcttacatctagatcggtgccccagcttgaaaacacttgaaatcgtgtgctgcggtgcactcaaggatgtcttcccactggattccgattcaactatagtattccgaaggctaaagcgcatccacctgcacgagctacccaagctgcagcgcatctgcggccgcaagatgtccacgccccagctcgagaccgtgaagatcaggggctgttggagcctcaaacggctgccatctgttggtcgccacgatagcacaccacctatagtggactgcgagaaggaatggtgggatggccttgagtgggaaggcatggaagccaaccaccatccttccctctacaagcccatccactcgcactactacaagaaagccctgcggagaacctccctactcaggtga

SEQ ID NO: 38733 - DNA, 393 bp, Oryza sativa
  Clone ID: PAT_MRT4530_42341C.1
gtaattaattcacaacaccatatttcattgatcaggttcagaacctgcacagaaatacacactaccggtacagatctcaccttttaaaacatactcgtacatccatccacgcttggcaaacgaatacgtacatatattcggtacatatacaactacatctactggaccgagtacacgcacctatatactcctgcagagacccgcatcgaaatcaacctagctagcttagctgaaggcgatgcgtcgccatggcagcacggcggcggcggcgctcacttgccggggacaaataagcaggcgtaggcccaggccttgccataagcttggtcggcgaggtggccgtcttttttttctgggggcccttgccggtgacttttcttgttccgaagaagc

SEQ ID NO: 38734 - DNA, 566 bp, Oryza sativa
  Clone ID: PAT_MRT4530_42342C.1
gtggatccccgggctgcaggaatcggcacgagggttactgtttagccagagagatatctcaacactaatgatcctctgtaaatctgtgtatgtagtctccgtagcctatgttcctacagcttccagcaaagtatattggaatgttaccaggcagatctaactacatcgatgaccaccaaatatcttcttgatctaaaagatagatatgtccccatattttgtttcctcaaaggcttctttcgtagttcaaccgctcttctgtttctgtaaacatctacatagacaaaatgaactcaagtctccgaattaagctttctgcgtttttataccgatatggcgatatgtccacttttgggaatgaaaaattaaatagattctccaccctccctgtgtgatgtggttcatgattgtcctttcaacatagtatgataggaagcacgtcttctggtcttcatattattccatctcatgctataacgttataaggtaatatcagatagatgaagcatatcttcttcttttttacttcctgtaccctttgttattaaatttctttctttatgttg

SEQ ID NO: 38735 - DNA, 835 bp, Oryza sativa
  Clone ID: PAT_MRT4530_42343C.1
gcacgaggcgtcttcgtacgttggcctcctcctcttctcgtctccgccctccggctcctctccctcccgggcggtcgaccctccggctcctctctccttccccacaactcaaacaagattcctgatttaccagctcatttttacatatagttcaaacttagagagagaaagaaagttgatcatccatggagagggttgcatcgagctgtctcagccttctggcacaaaggaggggttactcggtggcggcggccgtggcgaagggagccggccggagggcggacgagaagaaggtggcggcggcggtggccaagcgcacgatggcgaaggccgccgaggagaagacggcgtgggtgccggacccggtgaccgggtactaccggccggccggcggcgcaaaggaggtggacgcggcggagctgcgcgccaagctgctctccaactccaagaggatggctgccaactgagacagatcgtcgacgtatcggtcggtcgaggctagctatgtactctgctttgagatgcgcgctacctagttgatcgctgtcgctggcctccttttgagagcttgtgaggcctaatttgagttgcttcgttgaggacgactgcttctttgggttcgtcttctcggtgttctctaatatgaaatgagctacctttgttcagatggtatgaagattgataataatactaatagaggattataagaaaaaaaaaaaaaaaaaaaaaaaaaaaaaaatcattcatactgcagaactcataaagtttcagaggacatatatatattggcatgaaatggtgttcaacttcaataagaaggcaaattcctcatctc

SEQ ID NO: 38736 - DNA, 305 bp, Oryza sativa
  unsure (1)..(305): unsure at all n locations
  Clone ID: PAT_MRT4530_42344C.1
cttgaacgcggagcggattcacggcccaccctccgatccgactcgggacgcgctacccaaaggagaagttcagaaaaatcccttcttccgtctcgctgctgttcttctactgtcctccaccctgtgttgcaattctccatcataacctttgatcatagagttagcataacttttggtttccctttatttggtttttgcccattcacattcttactntttgtntgagaatatatagagaaaccattaggcgaattaaggaattattaatgtctttcatttggtttagatatctcaaaaaaaaaaaa

SEQ ID NO: 38737 - DNA, 204 bp, Oryza sativa
  Clone ID: PAT_MRT4530_42345C.1
atggcgatgatcgattggcggcggcggcgagttgaggcgacggctagcgctagcgatggcgcagagagggagcgatgcgagagcgggagcggagattgcgcgatttggtccatcgacaacgaggcacctacggtgacttcgtcaatttcaaatatgtcgacccagtctttcaaaggtgctcatagagataagttgtgcgtgtga

SEQ ID NO: 38738 - DNA, 398 bp, Oryza sativa
  Clone ID: PAT_MRT4530_42346C.1
atttttagggggcggcctttttttttttttttttttcctgatcacctcattttatgggagcataacatttcattatccaacacatacacacgcacgataccctaatgttcaatgatatcatttacatgtttcatagtgcatgcacgatacatgaacattactatgtttattagggcacgcactaatagtagcttgggcatgaatccagtgtattggtcagtgactcaaagagaaaatggatcaaggtctggataattaccacctgttcttgaaagaacctgagccaggagaccaggctcattaccagccgtacattccgttttcttgttccagttcctgatccataccatgatgccataatagttgggcagtttgttgatgaactgtatcacggcgta

SEQ ID NO: 38739 - DNA, 315 bp, Oryza sativa
  Clone ID: PAT_MRT4530_42347C.1
atgacgcaggaccgtatggcgacgcggtcgcatacaccggagtccggaggtacatcggaacagccgcacgcggccatggcggcgctggagtatgcgctatgcgtcaatgggaagccctgcgcccggccgcgcgtcgatggggagcccggcgaccgaccgccgccgcgcgtcgatgaggagccctgcgctcgactgcgtgtcgtcgatggggagccgggcgtttggccgcgcgtcggggacttgggcggctggcgttccatcgatgggagtcggcgccgccttatactgagcaaatcgttttgggtgcacgtctag

SEQ ID NO: 38740 - DNA, 2052 bp, Oryza sativa
  Clone ID: PAT_MRT4530_42348C.1
atgtggatgatctcacaagacaatgagttgtagccggtgacagcagtggaggagtttgacccgatatctgcagtgccaatctccttgctcatgtcggcgctgacggaggggcttgaccgtctggcactcgccacgctgcgacaactagtcgcaaccatctccctgcctccaatagcctccatcaaataacggggtcaaagtccctagctcacagagcggattcatgggtacctcttcttaattgcaatacttgttgccgcgttatttaagtaaacattttgctctgggttatagtacacgaccttaatctttgccatgcatttcacgaacatgacattcgtgatcaccttcctcattactgcacccgtaatggtcgactcactggacacgatccacaaggcaggatctgtaaagatcatcggaacactcatgtcagtcgccggtgtcatgctcctcaccttctacaagggtgtggccttgacacaccaagttgtgtcttcaaccaagcttaccaagaagtacccagcactgtactccagtactgcatacatgttcttaatcagctccctccaaggtggggccctgacggcagcgatacaaaggcgagcatcagtgtgggttctgacaaggacagtggagattgttgcagtactatatacaggaattatggggtctggagtgggctacgtactgatgacatggtgtgtcgaaaagagaggtccagtgttcacttcagcctttattcccatcatccagatcatggttgccataattgatttcttctatctacatgagaacctctaccttggaagtgttgttggatccatattgatgattctgggcctatatattcttctgtggggaaagaacagggatacatctgcagcagcatctgccaaagaagccaaagaagaggaagaggacaaggagaagcaactcaaaattcacttgatgcttaaccctgacttctggggcaggccaccggatcaaactttagttgagagcaaaggaaaggcctctggttttcctgaaatgtggagggcaggatgcatggagcaatggatgccgacggtgtcaatggtcgccaccaatgttgtgatagccatcatgacagccttgatcaagcaagcactcaaccaggggatgaaccgcctggtcctcattactttccggcaaatggtggctactgtattccttggccccatagcctacttcaaggaaaggccggtgcttcttcagtatacactgtttgtagggctggagtttacaacagcaacatttgctgcaactttcggcaatttgcttccggtggttactttcttgatttcactcgttttcaggtttgaagcacttaatgtaaagagcagatcagggagtgccaagatctcaggaacattggtttctctcagtggagcaatgatgctcaccttctacaagggctcagcactgacccatacaccatcatctagcagtagtccagcatccagcagtagccacagccaagctgaagaacatgacacggcccattgggtgctcggttccgtctcgttgctcgcgaacgtagttgggttcgcattgtggctgatgctgcagaggaaattcaccaggaagtacccagcaatctactctgctactgcattcatgtcattgttcagctgcttgcaagcaggagcacttgccttgtccatacaaaggagcagcatctcaatctgggctctcaaggggaaaatagagatagccacagttgtatattgtggtgtagtggcgtctggctttgggtacctgatgctcacatattgtgtggagaagagaggccctgttttcaccgctgccttcagccctctctcccagatcttcgtggccggcatcgatctcttcatcctccacgagccgctctatcttggcagtgtgttagggtcagtcctggtgattgtggggctctaccttgttctgtggggcaaaagggaggagaccgccgccgtcagcaaagatgccattgcttcgccggagaagccagtgcaagacgtagaacagcagcaagagaaagtgtga

SEQ ID NO: 38741 - DNA, 275 bp, Oryza sativa
  Clone ID: PAT_MRT4530_42349C.1
gtcgacccgcgtccgatataagttgtgagcgagcttggagagttccatttgctcaggaaagtagccttcacttcaggttgtgacgtaagtttaggtttcagagtaatcgaatagaccagtgaaatctgccttatgtgggtcatttaatatagcacccacctgatgatattataatagactatgcatgtacgtgggtatactgtatgaactctgtgcagtgttgaaactggcggtcatggggcattctagatcttaacatttatttgctcccgcca

SEQ ID NO: 38742 - DNA, 237 bp, Oryza sativa
  Clone ID: PAT_MRT4530_4234C.1
aggttgttcatacgcatgttcctatatacaaaggggggtaaccaacgcagaagggctggaaacataataccatctttgcaggaggcataggctcgcactttgaaacattagacacgagatacagcctgtggttgacagagaaacattactggctggactgctatataatacatttaccgctaatagaataggcgcacaattggaagcaccggcctacttgaggcttctacgtaagcc

SEQ ID NO: 38743 - DNA, 1005 bp, Oryza sativa
  Clone ID: PAT_MRT4530_42350C.1
atggcggcggcggcttcggtggtggtgttgtgcgcgctggtcgtcctcgcggcggcggggggcgcgagcgcttggccggtgatgagcccgtcgtactacgaggcgtcgtgcccaagcgtgtacgacatcgtgcggcgcgtcgtccaggaggcgcgctgcaccgacccgcgcgcccccgccagcctcctccgcctccacttccacgactgcttcgtcaatgggtgtgacgggtcgctgctgctcgacgacttcggcgcgatgcagagcgagaagaacgcgcccccgaacaaagggtcggcgcgtgggttcgacgtggtggacggcatcaaggctgccctggagaacgcctgccccggcgtcgtctcctgcgccgacatcctcgccctcgccgccgagatctccgtcgagctgtcaggagggccgagctggaacgtgatgctggggaggagggacggcacggcggcgaacttcgagggcgccagagacctccccggaccgacggacgatctggacctcctgagacggaaattctccgaattcaacctcgacgacaccgacttcgtcgctctccagggcgcgcacaccatcgggagggcgcagtgcaggttcttccacgaccggctctacaacatcagcggcacggagcagccggaccagacgctggacatggcctacctcaacgagctccggcagagctgcccggcgagcgaccccgaaagcgcggcgctgcgcaacctcgacccgcccacgccggacgcgttcgacaatagctactacggcaacctcctgcgcaaccgcggcctgctccagtccgaccaggggatgctctccgcgccgggcggcgccgcctcgaccaccgcgcccatcgtcgtgtggttcgccggtagccaggacgacttcttcaggagcttcgcgacggcgatggtcaagatgggcaacatcagcccgctcaccgggagcatgggggagatcaggaggaactgcagggtggtcaaccgcggctga

SEQ ID NO: 38744 - DNA, 469 bp, Oryza sativa
  Clone ID: PAT_MRT4530_42351C.1
cagtcgccaggctgaggcgtcagccgcccgactgcccggaggagacgacgcgccggcgcgccgccactcgctggtccgcgctccgccgccggcccgcccgaggagacgacgtgccggctgcctctgccctccagcctccagcagtccagccgtcggccgccgcgtaggcgcgcacggcgccgtcggcgccttggcggctcgggcgctcggcgcatccggcatccccctgcggtgcccgtctccatgctccagccgccgccgcccgccggtgcggcgccgcggcgacgagttgccgcctggcgcctgcctgcctgcctacgctccaccgaggcaccgaccacggcagcctgccagcccgcaatcgcaggggcgcagggcgcccggccgcgttgtcgtcaccggtcaccgacctgccgttgccgttgacgaccaggcggctagactggtctcttactgagacaatgaccta

SEQ ID NO: 38745 - DNA, 267 bp, Oryza sativa
  Clone ID: PAT_MRT4530_42352C.1
ccagactcctttcactttgccgaggactgggtcaggaccgctttccacgccaagaagaaggttcagaccgagcacgcatgggtggctttggatgaccaatgcgccatctcgcataatgcggccgcgaaccaatccatgcagaccctaaagacctacccgttcgaacggaggggttcgtacggaccctaggtagtgcggcactactattaaattgcacttgctataaggcttaatcgacgctggcggagtggtcggactctcgctttg

SEQ ID NO: 38746 - DNA, 240 bp, Oryza sativa
  Clone ID: PAT_MRT4530_42353C.1
atggcgttaaagctggagaggaggggcacggtgggcccgatgttggggttccccctacgcgacgccgacgtgtgggcccgggggaaaaaaggtctggacgcgcggtgtcagtggcacagcgggctgtgggcccgccctggtgtagacaaggacaagagaaagttgatacttattgggcaacatattggcttcggctatgggctcaactacaaaagtgtgaggaagatgaagttttcctga

SEQ ID NO: 38747 - DNA, 1284 bp, Oryza sativa
  Clone ID: PAT_MRT4530_42354C.1
cccccgggctgcaggaatcggcacgaggcacaccacttctctctcctctcaccgggaaaaatgaaatccctaatcctagagactttccagtctctactctcacctctcctctccagattactcttgccctctcctctcctcgatcctaccagcggcgcggcggcaccacaggatgaggcgatgcgacggaggggctcggttggcggcggcaccacatggaggtgaggtgacggagggccactagtcgattggttggcggtggtgatgtcaagtgccactggatccggccgccatgggctcggtggtcgccagatctggccgccctgagctcgggggcagccggatccggccgccacaagctcgggtacggcggacctgcgcggggagtagctgcgacggtgggcctcccaccgcaagctggttcccacaactgcacatgcatgatgcgcagatcaaactgaccggcatggtgcgcccgtcgccctgtgcggaggggtacgacctgcctgcgtgcataggtgcaagtaaagctatcatgggctatgtcaaattgatgtgtgataactggtgaaaccttcggcttccactctccctatactacattgctcctttgtccgtgcaatgtgtaaaattaaaatgcgactaagaaataagagcacatgtgcgcgctctccctccgtgggtaatgatcagtacagttgtagggagtagggtcattctccatgtgtgctatagctttagggagtatgtgtgtgaatttcaaataaaaatcagtcatcaccatttcgtcttgtttgtctttgcttgtgatggtatatgtatgaccaattgccccgttgattggtgcgcgcaggtgtactatcagcatgctagtgactgtctgacagacctattccccagttagcagttttcctgactggggtttgctctatgtaggcttgcaatgtgcatgctctcgaagtactggaagtcttcagttccttttctgaaggacaccagcgacatcagtgaacaagcagtggcatcctcactaattcttccatgctgatcagcaaatccaaggtgctaatatgatattatatttttctatccatctttataggaaacaaattgttgtcctaatagtttattgcaaccacatgcatgggactgtttgttaattagtgtagtcaaattactttacaatggactttaaatgttcagtctactctaagtcgatagctatagcgattaaggaatacttgacatgatgtgggagctcattgggatattaatttgtttgct

SEQ ID NO: 38748 - DNA, 435 bp, Oryza sativa
  Clone ID: PAT_MRT4530_42355C.1
atggggaaaagcaagtacgtggccgcggataagcacggcgtactttacaacctcaaaaggagggccgagccgtggcccgtggggcgcgccaccgatcgatccgcgcggctgctgggggaccagggggcgggcgggcgctgtggctgcaacaaccgtgacgacgtcgcgctcgtgcacgtacgggtgcgggaccagctgctgctgcgggcacggtcccggatggcgacgacggtggcggcgatgtgcggggcggcggaggagcgggtggtggggacgcacaaggcgcccggggcgtgcccgcggtgcggcggcgcggtggtggccaccgacgtcgagagcgagcgccgcatcctctgcctcccgctctgcgtcaagagcaagcgcaagtactcctgctccaggtgcctccgccgcctcgtcaccctctacagctag

SEQ ID NO: 38749 - DNA, 922 bp, Oryza sativa
  Clone ID: PAT_MRT4530_42356C.1
atggggaaaagcaagtacgtggccgcggataagcacggcgtactttacaacctcaaaaggagggccgagccgtggcccgtggggcgcgccaccgatcgatccgcgcggctgctgggggaccagggggcgggcgggcgctgtggctgcaacaaccgtgacgacgtcgcgctcgtgcacgtacgggtgcgggaccagctgctgctgcgggcacggtcccggtcccgggcggttggtggcggggagccggggacgagggatggatggatggatcggtcggtctttcgggcgtccccgcaagctgcgtgccggatggcgacgacggtggcggcgatgtgcggggcggcggaggagcgggtggtggggacgcacaaggcgcccggggcgtgcccgcggtgcggcggcgcggtggtggccaccgacgtcgagagcgagcgccgcatcctctgcctcccgctctgcgtcaagagcaagcgcaagtactcctgctccaggtgcctccgccgcctcgtcaccctctacagctagacaaaacttcttgctactttcatcacagtggttaatttcttgattaggttcatttgcccttgattaattaaggataatccatccttccttccttcctagctctcgtctcggctagctagtgtgtgctcttcttgtctagcagtacaactagttgatagggactagctagctgatcatcggcagatggattaatgtttcgtctggtgcgatcaaccgtgtgtctaatcttgcgatcagcggacagcagatgtgcctacatgtgcatcacgtgacgctgtgcgtgcctgacgctttttgtgttggtatgtttgtaaaattgtaaaaaatgtaaatcaggtgtgtgtaactatgtgttcccagtgtcttgtatttactcctccagttagtgaaaaaaaaa

SEQ ID NO: 38750 - DNA, 1040 bp, Oryza sativa
  Clone ID: PAT_MRT4530_42357C.1
ccgacgccgacaccgcctccatcgctcgcctcgatggtacacctcacctcgcctagccttcaattctctgtcgctcgcaagcaagctaattgtgatgaaggatggagtagcaggaggaggaggcgagaggccatgcatgtgctacttccacccgcgggaggaggtggtgggcgtgtgctcgcaatgcctccgggagcgcctcctcctcctcctcgcctccaagacctcgcctgccgctgcccacctcctcgccgaccgaccgctccaccgcaagaacagcagcatctctctccccaaggtgttcgcgctcggctcctccttcctccagcgcctcgactcctctcgccaccaccttcgccccgccccccacgactccgacgccaactccgacgccgacaccgcctccatcgctagcctcgatgattccttcatctccatcaagttcgaggacaacggcaaggctacgtgggacagccagaaggccgccgccggcgagaaaaagacagatacgacgaccacggcggtggtggagcacgtgaagcggggcggcgtaacccggtggcggaagcaggtggtggggcggctgctgcagctggcgcggtggaagaggtccggcaacggcaaggcggcggcgtgccaccagctggggatcgacggcaagaagacggcggagcggtcgtcgtccaaggggacgacggaaatatctgttggagtcatggactgttactctgaattgcctagcctggctcctactctgaagcttgttataaggcagctggcagcaaggacagtgtattggcaactataagcagagacatcgatccatctatccgtctcatccatcttcttgtttttttaacttgcaactgggaatgacgaggtttctgctcatcgatcttgaactttggccaagatggaaaaaaatgacttggagcttgtgtgtaaatatctgaatgttcattcatgtacttgtgtaacactgcttttaagggcctcctatttttctggggaaaaaattatctatcagaagaatattcatt

SEQ ID NO: 38751 - DNA, 464 bp, Oryza sativa
  Clone ID: PAT_MRT4530_42358C.1
tcccctttttttttttttttttttttttttttttttaaaccaaaagctctgatattctgaatttttcagaacacatcattcggttcaagaatatagacagaaaacagataatatatgcctaactggaaaagaaataagattttttcagcattgttgatcgacatgctgggtaaccatgcactatctgaattctgacactcttatcaacaattacatggcttgctcaaggaagtaaggaacttcatcatgccgtgctcttcgttccttctggcagagatatctgattcatgttaagaaggtgatgaaggccagcgatgacgtgctgcctgctagtcggtacgccagtcttggctaaggctcgtccattcttgtcaagaagcacaaagcacgggacatatctgatgtcgtaatgcagaagctcggggagccaccggtcgtcctcggcgtcggcgagcacgaagccg

SEQ ID NO: 38752 - DNA, 345 bp, Oryza sativa
  Clone ID: PAT_MRT4530_42359C.1
atgggtgaccctgacaacgctggtgacaaggcggacaaggaaggcgagaccagggagcacaatgtcgtattcctctcagcgcccactccattatccgcagcaacaaggagaagccgagtatgctgttgtccgcagggccgaggtcctcgctccagggatctggcggctggccgcccgccgtcgtcgggagccgagggggtccgttgcctagtgccctcgccgcttgaccgcccagatctggaggctggccatccgccgcctcgggagcctggaggcccgctacttggtgccttggtgtcctccgtctggtggacctcactcccggggaagacattgctccggtga

SEQ ID NO: 38753 - DNA, 3255 bp, Oryza sativa
  Clone ID: PAT_MRT4530_4235C.1
ccacgcgttcgcccacgcgttcatggagtcatgcgtctgcgcgtgcgcgtggccaactgcgcctaccgtggtggcactcttcgccaccggttatgaagaaggggtggctgaggcgcctcatgatgtcgatcccatgacaaatgggcatgtggtttttcaaagagtggagaacaactgtagcctaagatattttacggaaaatgagatacggcaaatcacccgtggttatagcattttactgggaaaaggttcattcggtaaagtctacaaaggaatgctggatggtcgatgccctgttgctgtgaagcgatacatacatggaacccggaaagaggagtttgccaaggaggtgatagtacattctcaaataaatcacaagaatgttgttcgacttttgggctgctgcacggaggaaaatgctctaatgatcgttatggagtttatctgtaatgggaacctgaatgatatccttcattgcagcaacacaaatggacgtgttcctttctctttgggcaaacgtttagacattgccattgaggttgctgaagtgctctggtgcatgcattcaatgtataatcccgttctccatggtgacatcaaacctgctaatatacttgtggatgaaaatctttcaccaaagctatctgattttggaatagcaagattgctttgtgctaatggggctcaacatactaacaatatcattggatctataggttatgttgatcctgcattctgcatgaatggaattctaaccccaaagagtgatgtttacagctttggagtggttttgctggaaatcatcaccagaaaaaaagcagtggatgggaccatcacccttgctcagcgtttcactgaggctgttgaacaagggaagaaggtgatgcatttgtttgacgaggacatcaacaatacaaaaaacatgaacttcctcgaagatattggcaagttagcagttaaatgcttgaggagggaggttgaagtgcgtcctgaaatggttgaagtagcaactagtctaagaatgattaggaaagctctagaggaagaagagggaaatctgattcagcagaacataagtgcaccaagcaactcaattccttcaaagaatgtgaagtcatcagcacagcaatttggcaatctaaaaatctttaaacaagaggaaattaagcttatgacaaaaaactacagcatgaaatttagggaagagttctgtgaacggctgtacaatggagtcattggcacaacacatgcagttatagtaaagcaagtgagaacatcttcagaaagtgacagaatgatgtttctgaagactatgagcatactgtctcagaagtatcacaaaaatattgccaatgttgctggcttccacttaggggattccatttcagagtgtgtgtatgaatcttgctgtgatttatcccagggaaatgacggccatgtttgcttctgtaaccgaaacctttatgacattatctgcaccagggaaaaactcccccttcatctacgtttatcaatagccgtccagtgtgcagagggcctggttcatatccattcattgttagctgaaaatcctgattcacattctacaggcctcttgggaaacttcaggtcgatcaatatttttctggacaagaacttcgtgccaaaagtcttcaattctaatttatcaacatttcttgggctttcagtcatgcagaaacataccgcctctgtcgatcgtcctaatgaccaaagatcacaaatatattatttagatggaagggatatttctggtcagctgttcaatcccaagtctgatgtttatagctttggagctgttcttttggaactcatcacttggaagacagtgagatacatgtctagtggaagagttcacatgcttaccaaagacttccttgatacttatagaatagaccatagtgcagcgatatcttttggcaagaaggtttatgatgagcaagctagtggtgacaacaaaccaaaccaacatgtagcccctccccttaccaagaagtttgtcaaaactccaccaactattgtatcgatcattcccctgaacatattggagaagataactagcaacttcagtaatgatgccctaataggagagggcccagacgccagagttttctttggagagcttagtgatgggcagaaatctgcaataaagaagcttgatcctaatgaaaaaattgtagtgcaggttttgaccatttcaagaatgttgaagcatgacaacattgtccaaattcttggatattttattgaaggggaaaatcgtgttcttgcttatgagtatgcaccaaagggttccttgcacgatattcttcatgagggtgtcagaggagcccagccaggaacacctctatcatgggagcagcgagtgaagattgctctaagtgctgcaaaagggcttgagttcctccacgagaaggctgtgcctcctgtcatccacaccaacatcaggtccaacaacatatttatctttggcaatgatgttgcaaaaataggtgacctcggcgtctccaagcagctttatcctgaaagtgataatgactactacaatacccgactagatcctctgcgcagttttggctatgatgcaattgcaccagagtatgcaatgaaagatttccatgcttgagtgcaggttgagaggacagtatagtgtaaagagcgatgtctacgcctttggggttgtattgttggagcttttaactggtcgcaaagtatttgatcatacacttccgcgtggccagatgagccttgtaaaatgggctacaccaaggcttagtaaagacaaggtgaaacaatgcgtagatccaaagcttggacgagcattcccactcaaggctgttgccaggatggctgctgtggctgcgctgtgcatacaattcgaggcggaatttcggccctccatgagtatcgtcgtcagggctctgagcatgttagagagcagcacgtcaagcaagcaaccgagcatcggtgaagcagctggagcgtgaagctcgccgttccgttggatatagggtgattttgttgcatgatattgtgcgttcaaaggaaggaggtttcatgtgggtaactatttgattgttccatattcacctaactaaacttgaacttcactatagtttgtctcagattgtacatatgatttaagtattacgaattcgtgatgttcggtctcattgttggaacaaaagagtgatcatacatgaaagacaaaatcaatactgtgcattattcctggcc

SEQ ID NO: 38754 - DNA, 721 bp, Oryza sativa
  Clone ID: PAT_MRT4530_42360C.1
ttatgtgggtcacctctatcttttctttaaaaattttacaccggaatgtgaccgatgttcagcaaatgctagccaacttttaaaatatgctcacatgcatcttattttattttgcatgcttacaggagtgctgctgcccaaccaagactgcttattccagtggcacttgtgatgatgtataaccgatggaatgagattttagttccagattatggcttcatgcacctggaattaatacccatgcttgttgggtttttcacctacaagattgcaacatttgctcaggcaattcaagaatctatacctgcagttgggaatcgtgaatcttgaacatagttctggtgaatagaattaaaggtagttgccctgaggaagataggtcacggagatactgaggtgcaagcttttatcctttcttcaacacagtagtaatagttgcctgtgtcaggtcaacaatagtttttaagtagctatgagtatgcttgcagccgatgcatgtacttacgtccaagtgaccattgagaaagtaataagtcctcacggtgcctttgaagccgcataaccatagacttgaaggagtagacaccaattcagaatgatgacatatcttttgctgtcaacagtggttttaaattgctatgaatgtacttacaactgatgcatgtgattctgactgttgaataaatttaaaagatttacgcatatcgtacctttgaagcag

SEQ ID NO: 38755 - DNA, 1110 bp, Oryza sativa
  Clone ID: PAT_MRT4530_42361C.1
atggggaggaaggcgccgtccgtggtttgctgttgcttccctttcaccgttgccgagctcgtcgtcctcgcggtcgtctgcgtccctgccgcgctctgccacctcgccgtccgaggtggccaccgccgccgcgtctgctctgcgaagcagaaggagatgggcgagctcctcaccctggacgtcacctccccgaggtcgctggccgctgcggccgccaaggccaggaaggtggaggtcgagttcccggccacgcccatggccgaacacctcggggaggcggaggtggcgcgatggaagtcgggactgcaggcggcgctgcactgggtggcacgcttgctctccagcgccggggaagacgcccggcccgccgccgacctccgcgtgctgctccccgtcctcgcttgcccgctctcccccgtgcccatcctcccccgcctcccccgccatacacatttgcccttcttccccgacctagcgctcttctcccttggtgatgttgccgcgcccgtgtcgccgacgcttggtgagctgacggagccgcgcttccctcccacccgcccgctcagccgctcccgatcggcacccgccaccatgcctcccaccgttgctcgcgccagatccgccacgccgccgaacgattcgcgcgtgtggggtggagcaccggccagatccgcacgggaggaaggcggtggaggaggaggtggagacgccgcgcttccggcctgccggctcctggccgcctattcgttagcggcgtcgccgcccaaggtcacggagccgacaaagcccgcagtccgcccactcacgaatcatcccaacatccgccagcgcgcgccacagccccgctgcaggtcatcgtccccgtcgctgtcatcgtcgtcattgtcacgtggaagtagtggcaagccagcgcgctgcggcaccgtggcgagggagaggttgttctggcgccgagtacggcaactacgggccacatccatccatgccgaagctagggccgcccacgtcatcgtcgtcgtcctcgtcgtcaagctgccgccggcgcgggaggcttgccctcgatcaacagcgccgagtgccagacagggtccacctcaccgtcggcggtga

SEQ ID NO: 38756 - DNA, 303 bp, Oryza sativa
  Clone ID: PAT_MRT4530_42362C.1
atggcgcgcggcttccacctcgtggacctccgcctctccgccagcgccacgacggcgagcgctgtcgcccgcctctccgccatggccgccgccggcccgccccctccatttcctccaccttcccatccacctccactcccccatcccctctacctcccctcgccgacgcttccggccatcgtccgcctctccaccatggccgccgacctctccctcccccatcccctctacctgcccgatagtagcaacttctatggcggagccgaccgcttgaccaactcgggaggtggctacgagctatag

SEQ ID NO: 38757 - DNA, 194 bp, Oryza sativa
  unsure (1)..(194): unsure at all n locations
  Clone ID: PAT_MRT4530_42363C.1
ccactagcaccacgtgaaccagcatggaagaaggaaccgccgcatggcgaggttttcaacgagccccatgaatatgaacgcccattctaaactgttcgtatcaggccattntccgaatggggtgaccaagcccggcggattgaagaaaagaagcatcatcacgaggacgaagggggatttcaggatgaccagaa

SEQ ID NO: 38758 - DNA, 794 bp, Oryza sativa
  unsure (1)..(794): unsure at all n locations
  Clone ID: PAT_MRT4530_42364C.1
gcgactccntcatccccgtactcgtntgccncttccgatcggntttcctggttgttcgtcgtgcacctggctgacgattccgatcaccggcactgggcatcagacccggcgaggagcctcggcnctcgccgtnctgtcacaaccagcacgcagcttggacaagatcactngggcatcgtttcttgggctcgggtgccctgcgtggaatcggtgcgccgtgtcttcggccggccgngccgttacaccaccanaggcctggtgctgccgcggcccgacgccacagcccacatgcgcagcatccagcttcacgtgtccaagcgcagccaccaagcgtggacggcgtagaaggaaacgactgactgcattgttgcatgttggatgacgtacgaagtatccgatgccatgctgagcttttgtattttatacttggtgtgctttcgattttctgcttgttccacatgttcaccacatgcttacatgacttcatgngtgcacagatcaatgcatattgattatagatcagagtgcactgcgtctcatgtgtcaagttttattctgggacctttcaagtagtgaggagatgctgatattggttgtaaaattaagtggaggtgatcgtgatactgtaatcgtgatatccantgcaccggcaccggtacgcgatgtttatggatgatgctttgttacgtagcaggcttaatctaagtcaatatcgtgtgcgtatgttgtcgtggtaaattattatactgggaaaanatatatacttgtgcagctttaaaaaaaaaaaaaaaaaa

SEQ ID NO: 38759 - DNA, 1056 bp, Oryza sativa
  Clone ID: PAT_MRT4530_42365C.1
atggccgggtaccgccgcaccatctcattcccggcgcccaggcccgccgccttcgcgatcggcgcgaccgcgagggacaagctggctgccgcgtaccacgtccgctcggccagcctcccctgccgcttccacccgctggtggtgcagctcgacgacgacgtcgcggcgctgcgcctggtgatcggccagtctcctcccgccgcgccgtccgcgtcgtccgtctcggcggcggcgtcgcaggtcgggagggtgctcgtgtcgctctcggagctgctgcaccacccgcaggcgcaggagccgctgcgcaggctcgggcggtccacgttcgcggagcggctgctcgacgacttcctccgcctcgccgacgcgcacggcagcttccgggaggcgctggtcgggctctccgcgctccaggccgagacgcgcgccgcgctccggcgcggcgatcccgcgcggctggcgtccgcggcgcgcgcgcagcgacgagccgggcgcgacctgccccgcctcgccgccgccgctcgcgccgtggtgagcaaatcacccgcgcagctaccggaggacctcccggccgacaccgcagccatcgcggccgcagtcgctgacgcgacgatcgccgtggcatccggctccgcggccgtcttctctggcctctcctccctctccaactccgccgccgccgcccgtgtcgaggtcgcctccacgccgtgctgggtcaccgccccggcaagactgaccgcctcgtcggacgaaccaagcaccagccaccatcgcatatggtgggtggccgacctcgttcgttggatgtcgcgcgccaaacggcgttccgccaagaaacaaaacgacggcggcggcgacgacggcgagtcgtccaccgtgcagctccgatctgagtcccgcatgaagccagaggagaaggcgcggagagcggcattcgagcgccatgagaacttagagcggtgcatcgccagcgtcgacagcagcggcgagaaggtgttccgtgctcttgtcaacactcgagtctccttgctcaacattctgagcccaagcttctga

SEQ ID NO: 38760 - DNA, 672 bp, Oryza sativa
  unsure (1)..(672): unsure at all n locations
  Clone ID: PAT_MRT4530_42366C.1
ttccaaagaaaaaaggccaaatctaagaaaaccaagccaaccgacgacctgcctgctttggatccatccattgaacatgctctggatgaagaagatattgaggatgatgttgatcaggctacagccgaagcaaattatcttgatgaggcagaaaaagatacttcaagcaaagctctagctcccttatctgatgatgcaaagaaaacactggaagatatctcgcgtcggctagaggcctcttctctggatagcttagtggtcgactatggatcgattaggacacgattgcacgaagttcaagctctaattcctgaagaactggcgggtgtcctaactctagccacttatcttgagcaacatcaatttaaactagaaaaagccaagctaagattagccgaacgccgtgagcgcaaggagattgaagccacaatccaagtcaatcggcagcttgtgcatgaagaaaaagtcaaactcgatcaactatccgaaggtccgatcaaatccaatatcgatcggcttgaagcccgcaagatcaaatccaatattctcttggcacagcttgaagaatgcaatgctgaattggatatggagcacaaaaaactagccgatctcccaaaatttgtnaatagcaaaaagcaaggctcaaatcggcatatcaagatatgttgctga

SEQ ID NO: 38761 - DNA, 1224 bp, Oryza sativa
  Clone ID: PAT_MRT4530_42367C.1
atgtcgtcttccaccagcccttctaatgcaccatcgggcaagtacgctgagcacctttccaacctagtcgcgattcctagcctttcacacaaaaaccactattttcttggcccattcggcaatctcgaccccactgatttcatcatcgtcgctctcaccatagcaaattctgctaaggatgaacctctgatggctgccgccacctacttctggtccaacaccatcaatgctttcttattcaaccaaaggccattgactccaactttaatcgacatcaccatgattactggattagatgtaacttcatcggctaaccctatgagtatgaacaccaagaaccaattggacttcaagaccaaaagcataggtggctggtctggctatgtggcggcatatatgggccaaggcttcctcctccttctcctcctgtacagcaatcgtcaagtaatcagactccatcggctgtggggagtcatcacgtcgaagaggaagaacaaccagctgcttctgctatcccaagattaccttgatgaggcagaagaagacacttcaagcaaagcccaagctcccctatccgatgatgtgagaaaaacacttgaagacatcgctcatcggctagaagcctcttctttagacagtttggtagttgactgtgggtcaattaggacgcggctgcatgaagttcaagctctgattcccgaagatctggccgatgtcctaactccagccgcttatctcgagcaacatcagttcaagctggaaaaagccaagctaagactagccgaacgccatgagcgcaaagagattaaggccataatccaagcgaattggcagcttgtgcatgaagaaaaaaccaaacttgatcagctatctggaggtccaatcaaatccaatattgatcggctcgaagctcgcaagattgagctcttggcgcaacttgaagaatgcaatgccgagctagatatggaacacagaaatctagccgatctcccaaaatcaattgaagaacaaaaagcaaggctcaaatcggctatcaaaaatgttgctgacctaaccaagtccctgaaagtcatctctggaactgatgctcaagatgcccaagctattgtagaaaagcagctggttgttcttcctcttcgacgtgatgactccccacagccgatggagtctgattacttgacgattgctgtacaggaggagaaggaggaggaggctgcgaaatag

SEQ ID NO: 38762 - DNA, 2040 bp, Oryza sativa
  Clone ID: PAT_MRT4530_42368C.1
atgtcgtcttccaccagcccttctatcgcgccatcggtcgagtacgctgagaataccttcaagtcttggccatctctcgaaaaacctactcctgataagagctggaccacctggtaccaacgcgtatcggctagtaagaaagttcactgggatgaaattggaatcggccaagcactcactctcaccatagccaattctgctaaggatgaacctctgatggctgccgccacctacttctggtccaacaccatcaatgctttcttattcaaccaagggccgatgactccaactttaatcgacatcaccatgattactggattagatgtaacttcatcggctaaccctatgagcatgaacaccaagaaccaattcgacttcaagaccaaaagcataggtgactggtctggctatgtggcggcatatatgggccaagggtctgttacccctcgagagcatgtagctttcttgcttatgtggctggaaaaattcctcttctatggatccagttgtggccctacaaccaactggcaattcgtaactgaagccttagaatcaaagaaagaatttcctttgggcaaaatccttctcggctatctgtaccagatgttgaacaatgcatcggctaaaatagccgtcggctcaatagttggagcaggtggaccatggtggctgctgcaaacttggttaaacctggtagtcatgaaggttgtcaatcggccctctgtgacagaagctgaattcccattgccagagccgattgtggaagatgacggagaagagcgtacccatcgcagatgcatgtcatatggagaatatgcatccacaccaaccgatgctggagcgaagctatcggctgagttactcaaggactggttctgcagtttctacgaaggtctaattccgaatggaggtggactatctccccctttcatcggctaccatgcccccaagacttcaactctccttcacggcctaactagagaaccagccgatgcaggcaagaaaaggaaaaccagatcatcagccatgagtaccttagccttggctccaaagaaaaagaccaaattcaagaaaactcaaccacaaccaactgatatgtcgactgatgatctgcccgccttggatccatctattgaacaagctttagatgacgaggaaattggtgaagatgttgatcaagctgtagccgaaatgagtgacacagaaagaacaccatcggcttcacccaagcaaacgcctccaactccttacgcccccgttcattttacaagacaatcgtcaagtgatcagactccatcggctgtggggagtcatcacatcgaagaggaagaacaaccagctgctcctgctatcccagctctagccgatctcttctcttttgacatcagagattaccttgatgaagcagaagaagacacttcaagcaaagccctagctcccctatccgatgatgtgagaaaaacacttgaagacatctctcatcggctagcagcctcttctttagacagtttggtagttgaccgtgggtcaattaggacacggctgtatgaagttcaagctctgattcccgaagatctggccgatgtcctaactctagccgcttatctcgagcaacatcagttcaagctggaaaaagccaagctaagactagccgaacgccgtgatcgcaaagagattaaggccacaatccaaactaatcggcagcttgtgcatgaagaaaaaaccaaacttgatcagctatctgaaggtctgatcaaatccaatattgaccggctcgaagctcgcaaaattgagctcttggcgcaacttgaggaatgcaatgccgagctagatatagaacacaaaaagctagccgatctcccaaaatcaattgaagaacaaaaagcaaggctcaaatcggctatcaagaatgttgctgacttaaccaagtctctgaaagtcatctctggaactgatgctcaagatgcccaagctattgaagaagtagaacaaatcaggcaaagggctattttggctatccagcgatacttgtctcaataa

SEQ ID NO: 38763 - DNA, 252 bp, Oryza sativa
  Clone ID: PAT_MRT4530_42369C.1
atgctgtaatcgagcaggcagactgggactactctaaaatactagagaaggttcggcgcgatgttgaagaccacacactttcaattcgtgaaggcaagctatcagaattgacaaatcatgctaaggtttctccaaagtataccctcatcactccttctcaatgcaagtcactgtggaagcagttcaaagcagaaactgagttcgccattacacaagcggtttccacgcagcaagctcacaagcgcggcaatg

SEQ ID NO: 38764 - DNA, 793 bp, Oryza sativa
  Clone ID: PAT_MRT4530_4236C.1
ctacgtctgatcaggcgtcgccgctgccggctcgtaggcaaggccttcgcccgttgttctgctctcctgcgccaaagaatgcatgtcagcttcagcggaaccaccagcaaatccccttcgacgtgcagccgctgcgccgacgcctcgccgctggccggccatcaaagaagagtctcgacctccgttgcacttccactccatccacgtggatggattggagagggagagggtgagagagaaggatggatcccctctcccccgcactagcccatccaacgtggccatcttacggcggcaagccaccgccgcaagaggacagacgcctggaaggaagctcaccgcaggcttcaacacccccttatggcgttaccgtcgtcgccgcctcaaccaggctacccgtgtaggccgcctggtcgcatcgccgtcgcctccatcctccaaccacagcaacctcaccagtgctgtcctctgctgctcctcgtcgcgctgcaccgctctccgccgtcaccggctgcccctcgcgcgtgggccagcctccgccgtcgccggccacacctccgagaacgcggcctcccctgctgccagccacgcctccgcgagcgccggcctccaccgccgcggccgcgcctctgcgagcgccggcgtccacagccgccggctgcccctccgcgctccttacgcgcgccgcatccgctcctctcccctccgaccgccgtctccggccggatccggcaggagtggcgccggatccgccgcctccacgccgggaggagtcgccgctgccgcgtcctag

SEQ ID NO: 38765 - DNA, 276 bp, Oryza sativa
  Clone ID: PAT_MRT4530_42370C.1
atggaggagcagcaacgaccacctccatgccgcgacgccgtcaatgtccagccagcgccagtcatctccgccaccaaccaccggccgattctcctccacaccctgatgctgctggtagtaactgtcaactatgaaggatatggacctgccgagaagatcaccaagaactgcagaaaagaaggaaactctacctgccagaggatggtggaggcgcgccggcggaagatctccccggcggccatcgccggacctgacgccgtcaccatgagcctgtga

SEQ ID NO: 38766 - DNA, 425 bp, Oryza sativa
  Clone ID: PAT_MRT4530_42371C.1
ccggccgggaacctacggcgccgaccacctccaaaaccagaccccgaaatctcgaggagcttgtcttttttcggtagcaatggcgttggagcagaccttcatcatgatcaagcccgatggcgacttcgctgtcgacattggcaggaatgtcatccacggaagcgactcggtcgagaacgccaggaaggagattgctctgtggttccctgagggcatcgccgagtggaggagcaaccagcacccatggatctatgaggtctaaaatgccttgtcactatgaacctggagagttggcatctgaagatctaccgtgctatttagctgctattttatagttgagaattgagatcagcatctcaagaacctttgtctgtgcgaactgaagtttttcttcattatgttgcatgttatgcatgcatttaccg

SEQ ID NO: 38767 - DNA, 2508 bp, Oryza sativa
  Clone ID: PAT_MRT4530_42372C.1
atgtcgttttccaccagcctgtctactgcgccatcggccgagtacgctgagcacctttccaacctagtcgcgattcccagcctatcgcacaagaaccactattttcttggcccaatcgacaatcttgaccccactgatttcatcattggtgaaaccaacagaatcccctttagacaagccaaccctaacctgggtcactggaagaataccttcaagtcttggccatctctcgaaaagcctacccctgataagagctggaccacctggtaccaacgcatatcagctagtaagaaagatcactgggatgagattgggatcgaccaagcgcttgctctcaccatagccaattctgctaaggatgaacctctgatggctgccgccacctacttctggtccaacaccatcaatgccttcttattcaaccaagggccgataacttcaactttgatcgacatcatcatgattactagattagatgtaatttcatcggctaatcctatgagtatgaacaccaagaaccaatttgacttcaagaccaaaagcatagccgaagccttagattcaaagaaacaattccccttgggcaaaatccttctcggctatctatatcaaatgttgaacaatgcatcggctaagatagccgtcggctcaatagtcggagcaggtggaccatggtggctactgcagacctggctaaacctggtagtcatgaaagttgtcaatcggccatctgtaacagaagctgaattcccaaggttggagccaattgtagaagacgatggagaagaacgcacccatcgcagatgcatgtcatatggagaatacgcatccacaccagccaatgctggggcaaaactatcggctgagctgctcaaagattggttctgcagcttttatgaaggcttccagaaagatgcccgagtttggtttctttatgaagactcagtagaccttgagctcccatcagacttcagatttgaagacatcaatcatgaaagatatcaaacatcagggaagtctttacagctgcaatcagcccatgcatcctacctgttgatccaatgccggggagaaatttcttcaactcttatgatggatcgattgcttaacctccaaggacctcccttaggcagtatcgacaatattgagctagcagtattccggagcaggaactttgacagatggtggggtgaatggaagttgcatctatttcatcaattggcctcaatgtacatgacagatctattccctgacgtcataccccagacaacagagtcctcccctccacatcagagcaatagtggtaagagcattgaatatgccccaggtctgattcctaatggaggcggattgtctccccctgtcatcggctatcatgcccccaaggtttcaaccctcctccaaggcgccatcagggaaccaaccgatgtaaccaagaaaagaaaaactagatcatcggctgcgagcaccttgactctagctcccaagaaaaatgccaagactaagaaaaccaagccaaccgacgacctgtctgctttggatccatccattgaacaagctctggatgaagaaaatattgaggatgatgttgatcaggctgcagccgaaataagtgatactgaaaaaacactatcagcttcgcctaagcagatacctccaactccttctgcccccactcacttctttagacctcctcctcctccttcttcccctgtacaacaatcatcgagtgaccgaactccatcggctgtggagagtcatcatgtcgaggaagaagaacaaccagatgctcatgctatcccagttctagccaatctcttctcttttgacatcagagattatcttgatgaggcagaagaagacacttcaagcaaagctctagctcccctatctgacgatatgagaagaacacttgaagatatctctcatcggctagaagcctcttctttagatagtctggtagttgactgtggattaattaggacacggctacatgaagttcaagctctgattcccgaagatttggccgatgtcctaactccagccgcttatctcgaacaacatcagttcaagctggaaaaagccaagctaagactagctgaacgccgtgagcgcaaagagattgaggccacaattcaagctaattggcggcttgtgcatggagagaagaccaaacttgatcagctatctaaaggttcgatcaaatccaatattgattggcttgaagcccgcaagatcgatcttttgacacagcttgaagaatgcaatgctgaactggatatggagcacaaaaagctagccgatctctcaaaatctattgaagaacaaaaggcaaggctcaaatcgactatcaagaatgttgctgacctaaccaagtccctgaaggtcatctctggaactgatgctcaagatgcccaagctattaaagaagtagaacaaattaggcaaagggctattttggctatccagcgatacttgtctcaaaaacgtttgtgtaataggacttag

SEQ ID NO: 38768 - DNA, 2633 bp, Oryza sativa
  Clone ID: PAT_MRT4530_42373C.1
atggacgaagcggcggcggcggaggcggtgcagctgatcgacggcgagggggagttcgcggccgactccgcggagcgcttcatggcggccgcgggcgtcgccggctgcggcctctcctacgccgtcgtctccatcatgggaccccagagcagcggaaagagtacgttgctgaaccaactctttggaactaattttagggagatggatgcgttcaggggaaggagtcaaactaccaaaggtatctggatagcacgatgtgttggtgttgagccgtgtactgttgtgatggatttggagggtactgatggaagagaaagaggagaggacgacactgcatttgagaagcaaagttcgttgtttgctcttgcaatttcagacatagttctaattaacatgtggtgccatgatattggccgggaacaagctgccaataagcctcttctaaaaacagtatttcaggtgcaagtcactgcattgcccagttttgaagaaaaagaagaacaattcagagagcaggttcaacaacttaggcagagattttcaaattcaattgcaccaggaggtcttgcaggtgatagaagaggagtggttcctgcttcaggatttttgtttagttcacaacagatttggaaagttatacgagagaataaggatcttgacctacctgctcacaaggtaatggttgctacagttcgatgtgatgaaattgcacacgaaaagttttcctgcctaacctcagatgcagaatggatggaattggagagtgatgtgcagtcaggtccagtacctggttttggaaaaaaacttggctatattgtggacgtccacatgcaagagtatgacaaagaagccatctatttcgatgaagctgttaggacagcaaaacgacaactgctgaaatccagagtactgaatcttgtccaacccgcattccagaaaatgttggctcacctgcgtacgagggctcttgaaaaatataaaactgaacttaatcttactttggagagtggaaaaggttttgcagcagctgttcgagacactactgaatccaatctcaacgaatttgatcaagggtgtgcagatgctgtaatcgagcaggcagactgggactactctaaaatactagagaaggttcggcgcgatgttgaagaccacacactttcaattcgtgaaggcaagctatcagaattgacaaatcatgctaaggagaaactaagaaaagcactagttgaacctgtagagtctcttttcgatgctgcaggcccttcaacctgggcatcaataagaaacctttttaaacgagaaacggaggctatcctgccagagtttcagaaaaaccttgctgggtttgaaatggaaagtgcaacgtcagaaggaatggtatcaaaattaagggattatgccagaagtatcgtagaaaataaagctaaagaagaagctggcaaagttttgattcatatgaaggagaggttggcaaaatcatctattattcgttcaccataccgatcaatttctcgcacttctgacaaagttgcttgccattgccaggctctcaaacttctttctgtattggctgccattcgctgggatgagaaaccggataagatcgaaaaaatcctcacttccacactcctagatggttctgttacaccgaagtcgaagggtgcaagtgcttctagtgatccacttgcttcaactacttgggaagaagtttctccaaagtataccctcatcactccttctcaatgcaagtcactgtggaagcagttcaaagcagaaactgagttcgccattacacaagcggtttccacgcagcaagctcacaagcgcggcaatggtaggctgcctcctccttgggccatggtggcaattgcagttcttgggtttaatgagatcatgacgcttcttaggaatcccatatatctattcttgctatttgtgggttatttgctggtcaaagctttagcagtgcagctagatatcaacagagaattccaaaatggcgtggttcctgggatcatctctgttacagcaaaactaatccccacactacagaacattctaaacaaagttgcaacagagcaacaacaacagcaagggcatcaccaagatgctgctgcagaagctccacagcaacagcagcaaccacagccgcagccacctcctctactcctgagccccagaagcccaatgagcgaactgcggaggccgctgcacatgccattcagcccggtgcgcaaggcggtatcgccttcgccatcctcatcgtcttccaccgttacatcgcccaggaacgctggtgaagaccagaagcccaggcaaatggtacagcctgacaacgaatccaacaatgcttactctatagtttgatgatcttgggtgttcagggtcagctggtggtttatactgtccaactggaaattggaaggtatgagcatttcgttgtcctcatttgaatgcataggtacactgattgcagcaatgatccatcgtcagtagggtatcaagacagaataattcaaaatattttgtctcgcaaaattttgtaaggagggtggttaatctgtagaatggacagaacaattgctactgaacaccatttatcagcatgtatataggaaagattcaactgc

SEQ ID NO: 38769 - DNA, 215 bp, Oryza sativa
  Clone ID: PAT_MRT4530_42374C.1
caggcgtgtggagcaacatccagcgatccttcgagtccgggaaggcacacgccgagggcgagtaccaggcgcgacgtgcggtggaggcggtgacggacgccgccggcgccatccacattccattcaaaattttcactactggtgagcaggtggcgcaagcggcacagaacgcggcgaccgccaccaagggatcccctccaggcaggcatccatcc

SEQ ID NO: 38770 - DNA, 1020 bp, Oryza sativa
  Clone ID: PAT_MRT4530_42375C.1
ccggccgggcccttctccctcaacctacggcgccgaccacctccaaaaccagaccccgaaatctcgaggagcttgtcttttttcggtagcaatggcgttggagcagaccttcatcatgatcaagcccgacggcgtccagaggggcctcattggcgaggtcatcggccgcttcgagaagaagggattctacctcaaagccatgaagctcatcaacgtggagaagtcgttcgccgagaagcactacgccgatctgtcctccaagcccttcttcggagggctcgtggagtacatcgtctccggccccgtcgtcgccatggtctgggagggcaagcaggtcgtctccaccggccgcaagctcgtcggggccaccaaccccctggccgctgagccgggcaccatccgtggcgacttcgctgtcgacattggcaggaatgtcatccacggaagcgactcggtcgagaacgccaggaaggagattgctctgtggttccctgagggcatcgccgagtggaggagcaaccagcacccatggatctatgaggtctaaaatgccttgtcactatgaacctggagagttggcatctgaagatctaccgtgctatttagctgctattttatagttgagaattgagatcagcatctcaagaacctttgtctgtgcgaactgaagtttttcttcattatgttgcatgttatgcatgcatttaccagttgctcttgatatatggtattgctttaatcccaaaaaaaaaaaaaattgggggggggcccgggccccattccccctttgtgagccgtttacccccgctactggcctcgtttacaccgccggactgggaaacctggcgttcccaattatgccttggaccatccctttcccagtgggtaatacaaaggcccacccacccttccccgttcccactgatggaatggccccctggcgccttaacccgggggtgggttccctggacctgtcatccacctacccgttttgttattcctttttacatgcagttagga

SEQ ID NO: 38771 - DNA, 2004 bp, Oryza sativa
  Clone ID: PAT_MRT4530_42376C.1
ttactcttcgacagaccgcgggagatcggctagtttcttgtgctccagatctaattcggcattgcattcttcaagttgtgccaagagctcaatcttgcgagcttcgagctgatcaatattagatttgatcggaccttcggatagctgatcaagtttggttttttcttcatgcacgagctgccgattagcctggattgtggcttcaatttctttgcgctcacggcgttcggctagtcttagcttggctttttccagcttgaactgatgttgctcgagataagcaactggagttaggacatcggccaaatcttcgggaatcaaagcttgaacttcatgaagccgtgccctaattgactcgcagtcaactaccaagctatctaaagaagaggcttctagccgatgagagatgtcttcatgtgtttttctcacatcatcggatagaggagctagagctttgcttgaagtatcttcctctgcttcatcgaggtaatctctgatatcaaaagagaagagatcgactagaactgggatagcaggagcagctggttgttcttcttcctcgatgagatgactccccacagccgatggagtctggtcacttgacgatttccttgtaaaatgaacgggggtagaaggagttggaggcgtctgcttgggtgaagccgatggtgttctttctgtgtcactcatttcggctacagcctggtcaacatctttgccaatttcctcttcatctaaagcttgttcaatagacggatccaaggcgggtagatcatcagccggcttatcagtcggcttagttttcttgaatttggactttttctttggaactaaggtcaaggtactcacggccgatgatctggttttccttttcttgtctgcatcggctggttccctggttaggccatgaaggagagttgaagtcttgggggcatggtagccgataacagggggagatagtccacctctattcggaattagaccttgagcatattcaatgtttttgccactgttactttgatgaggaggggaggactctattgtttggatgtttctcccttgatgaatgccgacaagaaggatgcatgggctgatggcagccataagaacttctctggatttttggaatttctcatgattaatgtcttcaaatctaaagtctgatggaagttcaaggtctcctgagtcttcataatgaaaccagattcgtgcatctttcttaaaaccttcgtagaagctgcagaaccagtccttgagcagctcagccgatagcttcgctccagcatcggatggtgtggatgcatattctccatatgacatgcatctgcgatgggtgcgttcttctccgtcatcttccacaatcaggttctgtagtgggaattcagcttctgttacagagggccgattgacaactttcatgactatcaagtttaaccaagtttgtagcagccaccatggtccacctgctccaactattgagccgatggctattttagccgatgcattgttcaacatttggtacagatagccgagaaggattttgcccaaaggaaattctttctttgattctagggcttcggctaaaaactgccagttggttgtagggccacagcagaagtaggtggcggcagccatcagaggttcatctttagcagaattggctatggtgagagcaagcgcttggccgattccaatctcatcccagtgaaccttcttactagccgatacgcgttggtaccaggtggtccagctcttatcaggtgtgggtttttcaagagatggccaagacatgaagatattcttccagtgacccaggttagggttggctagcctaaaggggatccggttggtttcaccaataatgaaattagtggggtcgagattgccgattgggacaagaaaatagtggtttttgtgcgaaaggttgggaatcgcgacttggttggagagatgctcagcgtaatcggctgatggcgcatcagatgggttggtggaggatgacat

SEQ ID NO: 38772 - DNA, 1113 bp, Oryza sativa
  Clone ID: PAT_MRT4530_42377C.1
ttactttgttcccgcaacaatccttatctctgactccgcttcgatcccatcttcacctccgatgcgctcaagcgaaaccttgtcctctctctctccggcgattcctccgacgcaaaagagatttccaagcgacttcatcttcggcgagatttccgcccgcagcgatgtcgtcctccaccaacccatctgatgcgccatcagctgagtacgctgagcatctctccaacctagtcgcgattcccagcctttcgcacaaaaaccactattttcttggcccaatcggcaatctcgaccccactgatttcatcatcggtgaaaccaaccggatcccctttagactagccaaccctaacctgggtcactggaagaataccttcaagtcttggccatctcttgaaaaacctactcctgataagagctggatcacctggtaccaatgcgtatcggctagtaagaaagttcactgggataagattggaatcggccaagcgcttgctctcaccatagccaattctgctaaggatgaacctctgatgactgccgccatctacttctggtccaacaccatcaatgctttcttattcaaccaagggctgatgactccaactttaatcggcattaccatgattactagattagatgtaacttcatcggctaaccctatgagtatgaacaccaagaaccaatttgacttcaagaccaaaagtataggtggctggtctggctatgtggcggcatatatgggccaaggatctgttactcctcgagagcatgtagctttcttgctcatgtggttggaaaagttcctcttctgtggatccagttgtggccctacaaccaactggcagtttgtagccgaagccttagaatcaaagaaagaatttcctttgggccaaatccttctcggctatctgtaccaaatgttgaacaatgcatcggctaaaatagccgtcggctcaatagttggagcagagccaattgtggaagatgacggagaagagcgcacccatcgcagatgcatgtcatatggagaatatgcatccacaccaaccgatgctggagcgaagctatcggctgagctgctcaaggactggttctgcagattctacgaag

SEQ ID NO: 38773 - DNA, 1248 bp, Oryza sativa
  Clone ID: PAT_MRT4530_42378C.1
atgtcgtcttccactagcccgtctactgcgccatcggccgagtacgctgggcacctttccaacctagttgcgattcccagcctatcgcacaaaaaccactattttcttggcccaatcggcaatcttgaccccactgatttcatcattggtgaaaccaacagaatcccctttagactagccaaccctaacttgggtcactggaagaatactttcaagtcttggccatctctcgaaaagcctacccctgataagagctggaccacctggtaccaacgcatatcggctactaaccctatgagtatgaacaccaagaaccaatttgacttcaagaccaaaaggatagcagggtggtctggttatgtagcagcatacatgggcaaagggcttgtcactcctcgggagcacgtagctttcttgctaatgtggctagaaaagtttctcttctgtggatccagctgtggtcccacaaccaattggcaatttgtagccgaagccttagaatcaaagaaacaatttcccttgagcaaaatccttctcggctatctataccaaatgttgaacaatgcatcggctaagatagccgtcggctcaatagttggagcaggtggaccatggtggctactgcagacctggctaaacctggtagtcatgaaagttgtcaatcggccatctgtaacagaagctgaattcccaaggttggagccaattgtagaagacgatggagaagaacgcacccatcgcagatgcatgtcatatggagaatatgcatccacaccaaccgatgctggggcaaaactatcggctgagctgctcaaagattggttctgcagcttttatgaaggcttccagaaagatgcccgggtttggtttctttatgaagactcagcagaccttgagctcccattagactttagatttgaagacatcaatcatgaaagatatcaaacgtctagggaagtctttacagctgcaatcagcccatgcatcctacctgtcggtattcaccaaggaagaaatatccaagtctcctacgaattctatcaccctatgagttcagctagacaacttggattaggccaactcccaatcggcttattctttgctaacaagatccaatgccgaggagaaatttcttcaactctaatgatggatcaactgcttgtagacccccgtttttataacaggaatcaatcgtgtaaacagtaccatttccctggatcaagtagtctggtacacacgaattcatag

SEQ ID NO: 38774 - DNA, 319 bp, Oryza sativa
  Clone ID: PAT_MRT4530_42379C.1
ataaggggatatttcataatataagagaagtgtttcatacattctacatcaaaactactgagaacccccccgggcacaaaggcaacagcaatacaactagcaaactgagcatgaacactgctccttaaaagacattgaaactccgaaggaaaatctaagagagataagcaacatcctccacacttcaagagtctccagatgcttcaaggcttcatgaagactatgacaatgcgccccatggaagcggaggtccggccgaacttaaacgttttgcaaaccacgccggaacaacaaagactcacctgaccccccccaaaac

SEQ ID NO: 38775 - DNA, 596 bp, Oryza sativa
  Clone ID: PAT_MRT4530_4237C.1
ataacaaaccgaccaagctatacttttttcaaatcatcatcatgattatttacaaggatttccttactggcgacgagatgatgtcggactcatatcctatcaaagaagttgatgatgtcatcttcgaagttgactgcgatgcaatctatccagaatcggttgctggggatgatgaacccgttgaattcaacaacgtcatttactctttccgtctccagcctacgacatatgacaaaaagacttatgtgtcttctctgcgttcttatctcaagattgttaagaacaggcttaagaaaattggaaagaatcccgagtacattgccaatttcgagaaaaatgcgcaagatttcttgaagacaaagctacttcccaacttcgacgacttggaattttacaccggagaaagtatggacctcgatggaatgattgccgtaatgggatatcgggaggatggtaccacaccttatttcatgttctggaaggatggccttaaagagatgagaatttgaacataactaagtcagaatgcctaggcagaagatacggacggcgagatgcttggtttggaacgcaacaatataaatatcttgatacgc

SEQ ID NO: 38776 - DNA, 201 bp, Oryza sativa
  Clone ID: PAT_MRT4530_42380C.1
atggccgatgtgctgatcaagcttggacttctctacatgcacaagctgccgattgtgctggattgtagctttaatatctttgcgttcccggggcagctggttgttcttcttcctcaatgtgatgactcctcacagccgatggagtctggtcacttgacggttgctgtacaggaggagaagaaggaggaggctgaagaatag

SEQ ID NO: 38777 - DNA, 1240 bp, Oryza sativa
  Clone ID: PAT_MRT4530_42381C.1
tttcagagacttggttaagtcagcaacattcttgatagccgatttgagccttgctttttgttcttcaattgattttgggagatcggctagctttttgtgttctatatctagctcggcattgcattcctcaagttgcgccaagagctcaattttgcgagcttcgagccggtcaatattggatttgatcagaccttcagatagctgatcaagtttggttttttcttcatgcacaagctgccgattagtttggattgtggccttaatctctttgcgatcacggcgttcggctagtcttagcttggctttttccagcttgaactgatgttgctcgagataagcggctagagttaggacatcggccagatcttcgggaatcagagcttgaacttcatacagccgtgtcctaattgacccacggtcaactaccaaactgtctaaagaagaggctgctagccgatgagagatgtcttcaagtgtttttctcacatcatcggataggggagctagggctttgcttgaagtgtcttcttctgcttcatcaaggtaatctctgatgtcaaaagagaagagatcggctagagctcttgtaaaatgaacgggggcgtaaggagttggaggcgtttgcttgggtgaagccgatggtgttctttctgtgtcactcatttcggctacagcttgatcaacatcttcaccaatttcctcgtcatctaaagcttgttcaatagatggatccaaggcgggcagatcattagtcgacatatcagttggttgtggttgagttttcttgaatttggtctttttctttggagccaagggtaaggtactcatggttgatgatctggttttccttttcttgcctgcatcggctggttccctagttaggccatgaaggagagttgaagtcttgggggcatggtagccgataaaagggggagatagtccacctccattcggaattagacctgaagcatattcaatgttcttgccactgttactttgatgaggaggggaggactctgttgtctgcaaaacaggagcaagagattagtcaagtaatgaatcggctaactggttatgcaatttagtaatgacaaagtttacctggggtatgacgtcagggaatagatctgtcatatacattgaagtcgattgatgaaatagatgcagcttccattcaccccaccatctgtcaaactttttgcttctaaatcctgccaactcaatcggacgcttgttcgac

SEQ ID NO: 38778 - DNA, 711 bp, Oryza sativa
  Clone ID: PAT_MRT4530_42382C.1
tttttttttttgcaaaaatggtatttccattcaccaaaaaactggcatttacaaatcgaggtatctatctactataatatacatcctgacatttttttattgaataatatatctaccataaggtatcgatatattatatgagacattttttttttcagggatgataaaaacatatgggcggattcagtcaaaaaaaaaaaacatatgggcagatggcacaattctacaaagggggcggaatagatgtttagcatttcagtaaaacaacgaatttttccaccccaaaagatttcaagaactcatgtgaatcaaaatcaccagaagaaatcacttgaggcgaactggcaaaccataaaaataaataaatcagaaaatgatatcccattgagcgcaaacagaggttctttcatgaatatcactgaatcaaagcgatttgcacctcttcacaacgcaagcctctggtgcggctgatcagaacttcctggagtcgatggctatcgatcagcatgcctgagtcagcggagtgcacaccacaaggaaaaaaaaaacaccagcaagaagattgttaggattacatatcggaacacatcaacacattgaagacgatagcctgcgagaagcatgggaagaagatagtatccagcaaaagtcttcgagacctagaaattaaaaaaaaaacagcacaccaaaaacaaatccgcacatgaaact

SEQ ID NO: 38779 - DNA, 152 bp, Oryza sativa
  Clone ID: PAT_MRT4530_42383C.1
atgaagcaacaaggatcccctcctatagctcagcaacagccatcactatcagactccgcaatttctcgctgcaacagccgcatccatatccacaaaattgctactaatttgctactacttgctaagctcaagatcctcctcctacgcacaca

SEQ ID NO: 38780 - DNA, 201 bp, Oryza sativa
  Clone ID: PAT_MRT4530_42384C.1
ggggaggggataggtatgatatgttttttttgggaaaaaacctcttgttttttatgtttacactcgctacccctaagagtagaactttaccttcttcgtgttgtatttctataaaatacgagggttgtttcgtataaaatggaacgtgatgttagtcggtggaaggcagtgcacgctattccgttcaaaaaaaaaaaaaaa

SEQ ID NO: 38781 - DNA, 120 bp, Oryza sativa
  Clone ID: PAT_MRT4530_42385C.1
attatgtccaacgtcacactaacccaaccaccatgactaattgaaaacaatggccgaatacccgacaacatctcgtatatcgtaaactacaacgacgacctcaacctgtagaacatataa

SEQ ID NO: 38782 - DNA, 135 bp, Oryza sativa
  Clone ID: PAT_MRT4530_42386C.1
atggtgtaccagagcagctcatctcctgctatctctgcctccgctgttcgctttctgcatgacacggacacgtggcacgaagctgcaattaacaaggaggaagcatctcacatgatcataggtcaactaccatag

SEQ ID NO: 38783 - DNA, 489 bp, Oryza sativa
  Clone ID: PAT_MRT4530_42387C.1
atggtgggccccacacaacccatcttctccatccccaattccccacacgacaaccgcacggaagaagcacgaggaggaggcgctcgccacgaccgccgctccgctcgctgtcgccgctgccagcccccgcgcggcgcggccgccgtccctcgcacacggtgcggccaccggcctccgctcgccgtggccgcccgcccccgcacggcgcggcccgctgcctccgctcgccgcggccgccgtcccccgctcgccgcggccgctggccccgcgcgccacgcgctgcgcccgccgcatcagctcgccgcggccgtcgtcccccactcgtcgcggccgctgccgccgtccgtcacgcaccgcgcccgccgcctccgctcgctcccagcttgtcggcgccgcctgcttccagccaacacgagaaaaaagagaaagaggggaaggaaggggaaaaagaagaagggagaggctgacatatgggtcccggtgtcgtag

SEQ ID NO: 38784 - DNA, 315 bp, Oryza sativa
  Clone ID: PAT_MRT4530_42388C.1
atggcgccgcggcggcgggtgaggctcatctgctccgcggtgtcgctggcgctctacaccgcgttcctcgccttctacctgctctgcgccacggggaggtcgttccgcggcgtggtgctcgggcccggcgccggcggcgtcccgccgcacgtggagctcgcgtggaagcttgccaactgggtggccgtgctgctgtgctgcgtcgtctacgcgtacctcgtgtcctccatcgtcgtctcgtgtcgccgctccgggaagccggccgccgcgccggcggggctcccgcctcctcccgtgcagatggacatttgctaa

SEQ ID NO: 38785 - DNA, 393 bp, Oryza sativa
  Clone ID: PAT_MRT4530_42389C.1
gttccccaaaaaaataaccccttacaaggtggtccttgctgattcacacgggattccacgtgccccatgctactccggtcaaagcgtaagctagagaggctttcccctactgtactaaaaccatcataaggtgcggcaactaaaccgattcggctagcacctcaacaaaaagataaggggggccacaaccccgtttttacggccaaagaaactcccattatttctcgccgctacaacagggaatctcttttgctttctttacctatggctactaggatgggtcattttggcaggttgtggctggcctgctcatggattcagaatgtatttcaaaacgttgacctatttgggaatctccggaactatgcttatccccaactcccccctcccgcc

SEQ ID NO: 38786 - DNA, 664 bp, Oryza sativa
  Clone ID: PAT_MRT4530_4238C.1
ccggccgggacttctcctcccccaacctctccggcgacgcatcgaaccccaaaattcttcctctctcgagagagagctaggttaggatcggatcaatctctcgcttccttcccgtgaagatgtcgtcgcccgcgggggaggatgagaagaagccggcggggggagagggcggcggcgcccacatcaacctcaaggtcaagggacaggatggcaacgaggtgttctttcgtatcaagagatcaacccaactgaagaagctgatgaacgcctactgtgatcgccagtccgtggatatcaaatctattgccttcctgtttgatggtcgtaggctcaatgctgagcagacccctgaccagctcgagatggaagacggcgacgagattgacgccatgcttcaccagactgggggctctctgcctgcctagagctcatatgaagctgttgcaacaatgcaaccgcattactattttctgccttgttagagtcagtcagtctagaggacatgaaactagtctaaagaacttgtgaatcttttggtcctgtgccccagctgaaggacattagggtggctttgtttagcgagacttggtactttggtgtgttaatccatcgcctaatttatccgaaaaaaaaaaaaaaaaaagcggccagactagttctctcc

SEQ ID NO: 38787 - DNA, 858 bp, Oryza sativa
  Clone ID: PAT_MRT4530_42390C.1
ctcttctctccccccgccatttattctggctcattagctgcagccgtgcaagcgagcatcgtcctgttcctcgcgtcgggggaatcaagaatcggtaggaatcgatcgaggggttgagtggtaggtgctcctaggaggcggcaataatgctggaggggaaggcgcgggtggaggacacggacatgccggcgcggatgcaggcggcggccacgtccgcggcgtcgcgggcgctcgacctcttcgacgtcgccgactgccgcgccatcgccggacacatcaaggcggagttcgacaagaggtacggggtggggtggcaatgcgtggtgggcgcaaacttcggctgcttcttcacccacaccagcggcaccttcatctacttctccctcgagcgcctctccttcctcctcttcaaggccgccgccgccgccgccatcgccgcctcctaatccttccatgcccggagatccattcgccggcgaactacggcgtcgagcgatagcaagagaagagaccaacttatgtacgtacgtaagaatgtaatgtaagctagctcagatgcgccccatttgtacatacaccatgcttgtgcaatctttgccttctccttcttgatgctgctcatgttcttggtcaccgtggacgcctacgccacagccttgtatcaagcttccattttcagttttacagcgtttcatccccacttccgagttcagcacattcagcttgaaatcaagagaaaaatccttggctggatgtgcaagatcttttcttgcagtgcattcagtactgacgttttggatggatgtgacatgtgaattgcgatcgagatgaacttttccatgtaccttttctccaatt

SEQ ID NO: 38788 - DNA, 564 bp, Oryza sativa
  Clone ID: PAT_MRT4530_42391C.1
atggaaggattaggaggcggcgatggcggcggcggcggcggccttgaagaggaggaaggagaggcgctcgagggagaagtagatgaaggtgccgctggtgtgggtgaagaagcagccgaagtttgcgcccaccacgcattgccaccccaccccgtacctcttgtcgaactcctgcaacatcaacaaacaaacaacaaatcgaacccaaaatcatctcctctgatccatcctgcacaatcgaatcgattgatgcatggtcgattcaaccaaatccatgggggtttcttgggagcaacttgccgccttgatgtgtccggcgatggcgcggcagtcggcgacgtcgaagaggtcgagcgcccgcgacgccgcggacgtggccgccgcctgcatccgcgccggcatgtccgtgtcctccacccgcgccttcccctccagcattattgccgcctcctaggagcacctaccactcaacccctcgatcgattcctaccgattcttgattcccccgacgcgaggaacaggacgatgctcgcttgcacggctgcagctaatgagccagaataa

SEQ ID NO: 38789 - DNA, 345 bp, Oryza sativa
  unsure (1)..(345): unsure at all n locations
  Clone ID: PAT_MRT4530_42392C.1
ccttttggtgcagggattcgccattagcctnccagtgcagcaacgtcgtcccacgaagtggtggtggcgggacgagaagaatgggacagcatggtgctggggagcgaggcgcccgtgctggtgganttctgggcgccntggtgcggaccntgcangatgatcncgccngtgatcgacganctggccnaggagttcgtccgcnagatcaaatnctgccaggtgaacacggacgaatcaccaaacatcgccnccaactacggnatccggagcatcccccccgtcctcatgttctagaacggnganaaaaaagagancgtcntcggggccgtcccnanancaccctcg

SEQ ID NO: 38790 - DNA, 397 bp, Oryza sativa
  Clone ID: PAT_MRT4530_42393C.1
gaggaaaacagagtttttttaagctggctgggatttggacagaagtaagccgcaaagcctttggaagaaacatttgtgggggggatttttgcatcctcaattgcttttcttatctccattttttcattaaatggaaccctcccaggttcaagagcattccccatccttgatggatccatgccaaattttgacggggggaaacgcttgacatttccagtttttttgatggcctcaacaagcttgagctggaacatgaggttgtggcttcggaggtggacccccgacatgggggagaccacaaccttcacctgccggaccggggggactaggccattggtgttgttgagcgacccccttaggagccgcgcccctttccccttgaaggcccatatttttt

SEQ ID NO: 38791 - DNA, 1547 bp, Oryza sativa
  Clone ID: PAT_MRT4530_42394C.1
gcacgagggtcgcgtcgctctccacctcctcccacggaattccacctccaacctcgtgagctccgcctccacctcgctgctgctccgccagctagtagccgccatcctccacgcctacaaagctcgcggccccgcaggtgcatgctccgctgcccgcctcctcgccgcctctgcctccgcctccgcctccgcctcggctcgccggtgtctacgatggcctccacgctctccttcctcaggccctccgcgccggccccgctcgcagcctcgcgcggcgccgcgaggggcgtccccgcggccgtgagggtgccgtgcagatctagggtctcggcggccggcgtgtccctcggatcggaggaagcggtgggctccgacgcgctcttcgccgactacaagcccaccaccgcattcctcttccccggccagggtgctcagactgttgggatgggtgcagaagcagtgaatgttcctgcagctgccaaactatttgataaggcaaatgatatacttgggtatgacttgttggatttttgcaccaatggaccaaaagaaaagcttgactcgacagtaatcagtcagccagctatatatgtcaccagccttgcagccgtagaggtactacgctcacgtgatggaggccaaaatgtaattgactctgtagatgtcacatgcggtctcagcttaggggaatacactgcacttgcatttgctggtgcctttagctttgaaggatggtctgaagcttgtcaagcttagaggagaagccatgcaggatgcttcagatgctgccagcagtgctatggtcagtgtgattggtctagattcagagaaggtgcagcaattatgcgatgctgctaatgaggaagtagatgaaaaggaaagagttcaaatagcaaactttctgtgtcctgggaactatgcagtttctggtggtgtgaaggggattgaagcagtcgaagccaaagcaaagtcctttaaggccagaatgacggtgcgcctagctgttgctggtgctttccatacaagcttcatgcaacctgctgtttcaagattggaatctgcattagctgagacagagataaaaacaccaagaatcccagttatctccaatgtggatgcatcaccccactcagatcctgacacaatcaagaagattttggcgcgacaggtaacttcccctgtgcaatgggagagtaccgtgaagactctgatgggtaaaggacttgagaaaagctatgaacttggtcctggaaaggttatagcaggaattcttaaaaggattgacaaaggcgcaagcattgagaacattggtgcatgagtttggaggtatcaagagtcaaagactatagggataataaggttagggagagcctgcaaattcaagcagtactccgaatgtatcaaatgttagccaacatggctgttgtggcaaactggcaattgccgtctgaggaaacgatattgattactgttgaggcccataatttggagacttttgtggtttatggtccagcctgctgttcagatttaaaaaaaaaaaaaaaaaa

SEQ ID NO: 38792 - DNA, 4133 bp, Oryza sativa
  Clone ID: PAT_MRT4530_42395C.1
atggtggatacgcggcggatcgccgcagcgtagcaggggccgttgtcggaggaggcggcaaggccggcgtcgttcgcggctgcggcaggggtggaggcgtcggggagttccacgcctcggagccggccggggaagcgggcgaacgcggtggcgacggcagggactccagcggcgagggccgagggagccaacgcatcgatggcggcgacgatagaagtgatcgatagcgcggttgaaaacttgcacggtgcggcgtggcccactgccgccgtaccggcgtctagtacggtgtttatgtatgaagttgaggggaaaaggacaaagtgtataaatgtaccatcagcggaagaactctcactcaggaaggaaaggcaggcggtagagagcgggcgtgctgagaattgaagaaaaagaatgcgtatatgttcttgctttctaccaaaaggccattgacatcttgacgaagctgtcgttaggaggcgccccaggaggttgctggtgaattcgccagttgactcaaataagatcatcgattctccagcgtaaataatggcctaaagaagctggggctgagatataccaacagtcattactgaaggatctgaccaaacgttttgcagcaaggctgctgatgaagcatcgttcgtcggtggcgaatggccactttacgaagaccaaggaatctgagtcgaagaagagaggagacagcgggagccacattggatcagtacaaccaacagtgattctcctggagggaggaagaccctcagattatacgtcacaaggcgagcttaggctgccgtttggggcaaatgaatcctctaaagtgggagacatatctgagcttatgcatgcgggacgatttatatggggagggagggtccaggaagacggctgctccttgcgtcctcatgtagccttctgcctcgctagcccaggacaggaagagaaagagaaaaatccagttggggggattgtccggatttacttctgcaagaaagtctgaatgagtggtctgatactattttagaaggatgttgagaaactgtgtgggaacagttactcctctcatggcctaaagatagagattgaaaagtttcccagctggtgtttttattgttgggtcccagatccatactgacagtcggaaagacaagtcaaacagtggctctcctttcctttcaaaattcccatacagccaagcaatactcgacctcaccttccaggatagctttggtcgggtgaatgataaaaacaaagaggctctgaagatagcgaagcatctgactaaactcttcccaaataaagtgacaatacaaacaccgcaggatgaattggaactctcacagtggaaacagctattagaccgtgatgttgaaattctgaaggcaaaagctaacacgtcaaagatccagtcgttcttaacccgcaatggtctggaatgtgctgacatagagacatcagcatgtgttaaagatcgaatccttacaaatgaatgcgtcgataaagtcgttggttatgctttgagtcatcaatttaaacatagcacaatcccaactcgtgaaaatgatggattacttgccctttctggtgaaagccttaagcatggagttgagctgttggatagcatgcaaagtgaccctaaaaagaagagcacacaaaacatatatcttctctttgccaacgggtattattgtctggtccagctggatctgagatataccaagaatcattagtgaaggctcttaccaaacactttggtgctaagctgctcattatagatccttcgttgctggcgagtggacagtcttcaaagtcgaaggaatctgagtcgtacaaaaaaggagatagggtgagatacattggttcagtacaatcaacagggattatccttgagggacaaagagctccagattatggctcacaaggtgaagttaggcttccttttgaggaaaatgaatcctcgaaagttggagtcagatttgataaaaagattcctggtggcattgatcttggaggcaattgcgaggttgaccgtggtttcttttgtccagttgattctctttgcctcgatggcccaggatgggaagatagagctaaacatccatttgatgtaatatacgagtttgcttccgaagaaagtcagcatggtcctctgatactatttttgaaggatgttgagaaaatgtgtggaaacagttactcctatcatggcttaaagaataagattgaaagtttcccagctggtgtttttattgttgggtcccagatccatactgacagtcggaaagacaagtcaaacagtggctctcctttcctttcaaaattcccatacagccaagcaatactcgacctcaccttccaggatagctttggtcgggtgaatgataaaaacaaagaggctctgaagatagcgaagcatctgactaaactcttcccaaataaagtgacaatacaaacaccgcagtggaaacagctattagaccgtgatgttgaaattctgaaggcaaaagctaacacgtcaaagatccagtcgttcttaacccgcaatggtctggaatgtgctgacatagagacatcagcatgtgttaaagatcgaatccttacaaatgaatgcgtcgataaagtcgttggttatgctttgagtcatcaatttaaacatagcacaatcccaactcgtgaaaatgatggattacttgccctttctggtgaaagccttaagcatggagttgagctgttggatagcatgcaaagtgaccctaaaaagaagagcacaaaaaaatcacttaaggatgtaacgacagagaatgaattcgaaaaacggcttcttggtgatgtgatccctccagatgagataggtgttacctttgaggacattggagcactagaaaatgtcaaggaaactttgaaggaactagtgatgcttccgttgcaaaggcccgaattgttctccaaaggacaacttatgaagccatgtaagggaatattgctttttggcccacctggtacggggaagaccatgcttgctaaagctgttgcaacagaggctggcgccaattttatcaacatatcaatgtctagtattgcttcaaagtggtttggcgagggtgagaaatatgtcaaagctgtgttttcacttgcaagcaaaattgctcctagtgtcatttttgtggatgaggttgatggcatgctgggtagaagggagaacccaggggaacatgaagctatgcgcaagatgaaaaatgagtttatggtaaattgggatggtctgagaacaaaagataaagaacgcgtattagtacttgctgccaccaatagaccatttgatcttgatgaagctgttgttaggaggctccccaggaggttgatggtgaatttgccagatgcatccaaaaaaagattcttagcgtaatactggcaaagaagatttggctgatgatgtagatctggaagctctggctaacttgactgatggttattcaggcagtgatatgaagaatctgtgtgtaactgctgcacattgccccataagggagatccttgaaagagagaagaaggagagagcatcagcagaagcagaaaataaaccattacctccccctcgttctagcagtgatgttcgttccctaagaatgaacgatttcaaacatgcacatgagcaggtatgtgcaagtataacatctgattcgagaaatatgactgagcttattcagtggaacgatctatatggagaaggcgggtccaggaagaagacttctctaagctacttcatgtagcctatcgctagcctatgtacatacaacataagcattagcgtaaagcggtccgggagatagacaagaaatagctcttctgttgttgttcatgtataggtgatacccagtcaaattagtcgttgatctctctattcatgtcaactgtaagttcgttaggccgaagtgtagcgtagaaaaaccggtttggaacttgaactatcaagcctgtaagcctgaccatcagatcggttgatttatgtcgacagccagtgcaattcatttaatcaattaaaaaaaaaaaaaaaaaaaaaaaaaaaaaaaaaaaaaaaaaaaaaaaaaaaaaataaaaaaaaaaaaaaaaaggggggaaaattttaa

SEQ ID NO: 38793 - DNA, 549 bp, Oryza sativa
  Clone ID: PAT_MRT4530_42396C.1
atggagacccaggaggcgaagagagcagatgtggcggcggcgccggcgacggcgaccggcggtgaggccgtcaaaccggccgccggcgatgctggcgcagtaaccaagacgaatgcagcagatggaccttcagcaccagcaggcaaagctgcaactccaacgggttcggttgacagagacgccatactcgcaaacgtggagctggagaggaaactgtcaatgatcaaggcgtgggaggagagcgagaagagcaaagcggagaacaaggctcagaagaagatgtcatccatactctcatgggagaacacgaggaaggcagctatagaagcaaaactgcgaacacaagaggagaagctggagaggaagaaggcggagtacgcggagaagatgaggaaccaggtagcggcgatccacaaggcggcggaggagaagagggcgacggtggaggcgacgcggcacgaggagataatcaagtatgaggagatggccgccaagcacaggtccaaggggactacacccaccaaattcctctcttgtttcggctcctag

SEQ ID NO: 38794 - DNA, 477 bp, Oryza sativa
  Clone ID: PAT_MRT4530_42397C.1
cccacgcgtccgcccacgcgtccgtaactctcgagtcttacattacctgattaaacagagtgcagtagttaataggccgtgcaagttcatgaatcctgacaaattaactaagcattttaatgacgcctaatttacaaattaacttaatcagacaatagaagtgaccctaattgtgcattacactccagtcaacatcagacacctacgccgttgtatcttcttgccggatatgcattgctgcattgcatgccaataaacagataggacgattccctcgcgtaggcagcgcactgttagtagtccctgtcttgctgtcgatcgtccgcagcaaacgtgaggtggcaaatcgcaaatggtcggtacttaatgaggacatatattgatctatggataggaacaaagagcaaaattccaagagaaatttctgacgatatgaaacgaacacagcatcctacagatatacttctccttcagata

SEQ ID NO: 38795 - DNA, 369 bp, Oryza sativa
  Clone ID: PAT_MRT4530_42398C.1
cattttacaagaaaaaataaaaaaaatattagatcaaggtgaaaaaatccgaaaaaataacaaccccctcatattaagtataagctttcttttccaagtggaatcattcaaaaacattgagctttgctaccccaaatcccctctcccaataattcaaaaaaaaagatttataaaatacaaaataaatattaaaaaaatctgaaaaaatcgaaaaaataactaagaactagatttttcaagctcgattcggttattcaaacgcgaaacggataagcggactccaaaaaagggggggtggctctcgacacatttgttcaactgctggaatgaggaaaagctcaatgtcatatatagggagggggttgcgcc

SEQ ID NO: 38796 - DNA, 2043 bp, Oryza sativa
  Clone ID: PAT_MRT4530_42399C.1
atggctgcgctggtggtgttgtggccgaccctactaccactagttctgcttgcaaatctccttcccctgccccgccatggccgcgctctggagctcatgaactggtcatgcaacaacggcagctcctacgccgccaacaccacctaccacagcaacgtccgcgccgtgctcaccgcgctgtccgccatcacgcccaactccaccgcgcgcttcgccaccgcgtcggccgggcgtggcggcgcggacgcggtctggggcctcgcgctctgccgcggcgacaccgaccgcgccgggtgcgcgtcctgcctcgccgccgtgccggccgtcgccttcggcgagtgccgcggcgacagggacgtggccgtgttctacgaccgctgcctcgcccggttctcgtacgcggacttcacgtcgaggcccgacaacacggaggtcctgatcgggagccccagcgagaaccgcgtcaccgtcgacgccggccgcttcgacgcgctcgtggcccgcctcgccggcgcactggccgactgggcggcctacaactcgacgcggaggtacgccgccgggctgatggcctccggcgacgggttcacgtcgacgacggaggacatggtgcacaacatccacggtgtggtgcagtgcacgccggaccaggcggctgcggcgtgccgggcgtgcctggagacgctcagggtggacatgcccaaggtttttgctggaaggataggagggaggtttgacgccgtgtggtgcaacctcaggtacgagaccttcctcttctacgacggtgacccaacggtgaggctcgccgcgtcgccgtcacctggatcatcgtcatcgccattgccgtcgccgtcgccgtcactaccgccgctagagggaaaaaggagaaatcgcccaaaaaatgcagcaattgttgttgtgtctgtccttgcttctctagttgtacttctgtctctgctctccttttacctctggaggaaattgcaagcgaaacaatataccgatgagaatgatatctattcagggtcacttctctttgacctggcaacactaagaaaggcaacagctagctttgcagaacataacaagcttggtcatggtggttttggagcagtatacaaggggtttttgcctgatggacgtgaaatagctgtgaaaaggcttgacaagacatcaggacaaggccttgaacagctgagaaatgagttgttatttgttgccaaactccggcacaacaatcttgcaaagcttctaggtgtttgcatcaagggggaggaaaagctgctcatttacgagtacctgccaaatcgaagccttgacaccttcctttttgatccagagaagcgaggacaattaaactgggaaacaagatatcagatcatacatgggatagcacgcggcctgctctacctccacgaggattctcagataaagatcattcatcgtgacctcaaggccagcaatgtattgttagatgccaacatgaacccaaagatctccgactttggcttggcgaggctatttgatggtactaaaactgctagtatcacaaaccatgtcgttgggacgctaggatatatggcgccagagtatgcagttcttggacatgtatctgttaagttagatgtctatagcttcggaattttagtcctggagattgtgacaggaagaaggaacactgatgtgtcaggtgaagtggaagaatctaacaatctgcttagctatgtgtgggaccactgggtgaaggggacgccactagaaattgctgatgcatcactgcttggtgatggccgcagcctatcagatatggagctgctcaaatgtgtccacttcgggctcctttgtgtccaagagaacccagtggatcggccaacaatgctcgacattctcgtcatgcttcatgatgttgacaccaatagctttgttgcaccatcaaaacctgcgttcacctttgcgcatggtgggaacacgacaagttctagccaaggtgttgccgcattatcaacaaatgaagtgtccatatcagagtttgttcctagatag

SEQ ID NO: 38797 - DNA, 383 bp, Oryza sativa
  Clone ID: PAT_MRT4530_4239C.1
ggccgcaaattttttttttttttttttgcaaagaatgaacgacttccattactactgatgatgtgcagacaatgttcagagaccacagatttttcacatgttcagggtagccttactttagctgacgaaacattttatttgaggtatgtacagcactgttctaagttccttgggcgacaaagctaggcagttgatgatatgatacaggtaactacatacactatattggacttgctctgaagggaaggggggaggcactagagagtagaggaactgatatacagaaacatcaaacatcattcaggggaagtggacagcaatgccgatgctttaagattcgtgtagcggtgcgacttgccgcagatccatcatttgtgcggggg

SEQ ID NO: 38798 - DNA, 206 bp, Oryza sativa
  Clone ID: PAT_MRT4530_423C.1
acctgggtgatcttacaccatgcatggcataatatgtgacaatgctaagcctaaaaagtcctattggcactcaatgactgggctttgcatacaacttggcaggatttatctctgcaggtggtgaaaagggaacaagttcgggtatgcctcttagccggaatacacttcaaggacctgctggaacatctagagggcaagctgatgat

SEQ ID NO: 38799 - DNA, 944 bp, Oryza sativa
  Clone ID: PAT_MRT4530_42400C.1
ccggccgggaacgcggcttcccccaccgccatctcctccgctccctccccggcgacgagcaagcacaccgccggcgccgcggcggagatgaaccccttcgcgaagaagcccacgccgcgagaggcgatccggagcagcaaacgtgagctgacgaatgctaccagaggtattgagagagatattggaacgttgcagctagaggaaaagaggctagttgctgaaatcaaaaggactgcaaaaactggcaatgaggcagcaaccagaattctggcccgccagctgatcaggctaagacagcaaatttctaatttacaaggtagcagagctcagattaggggcattgcaacacatacacaggcaatgcatgccaacacttcagtggctgctggcatgcaaagtgcaagcaaagcaatgggagctttgaacaagcaaatggatccagccaaacagatgaaggtgatgcaagaattccaaaaacagtcagcacaaatggatatgacgaatgagatgatgtctgactccattgacaatatcttagacgatgatcaagctgaggaagaaactgaagaccttgcaaatcaggtcctggatgagattggtgttgatattgcctcacagttatcctcagctcctaaaggaaggattactggaaagaaggttcaagctgatgaaagttcagaattggacgaactcgagaagaggctggctgctctgaaaaatccatagaagagggaacttctctgtaacccaacattttacacaaagacctgctctgtacctacatttcaaattcgtgatacgaaacaaaatagtacatttgcacctgtaaatatcggatggttgatacttcaactatgtgaagatggatgtgtatcaacctgacaagcccgaaaattcagtgagtaaaaaaaaaacggcttctctaaaaaaaaaaaaaaaaaaaa

SEQ ID NO: 38800 - DNA, 2223 bp, Oryza sativa
  Clone ID: PAT_MRT4530_42401C.1
atggcggagctaatggccaccatggtggtcgggccactggtgtccatggtgaaggagaaggcctccagctatctcatggagcagtacaaggtcatggagggtatggaggagcagcacaagatcctcaaacgcaagctgccggccatcctcgacgtcatcgccgacgccgaggagcaggcggcaaaacacagagaaggggcgaaagcatggctggaggagctccggaaggtggcctaccaggccaatgatgtcttcgacgaattcaagtacgaggccctccgccgcaaagccaaggccaattggcagtataagatgctcggcatggatgtaataaagctctttcctactcacaaccgtattgtgttccgttacaggatgggcaacaagctcaggatgatcctgaatgcaattgaggtcctaattacagagatgaatgcctttaggtttaaattccgaccagagccaccaatgtcgtccatgaaatggaggaagacggattctaaaatttctgaacattctatggacattgccaacagatcaagagaggaagacagacagaagattgtcaagtcattgctttctcaagccagcaatggggatctcactgttattcccattgtaggaatgggggggatgggcaagaccaccttagcgcagctcatttacaatgaccctcaaattcagaagcattttcagttgctcctgtgggtgtgtgtctctgacaacttcgatgtggattcgctggccaaaagcatagttgaagcagctcgcaaacagaagaactgtaatgaaagggctgaatttaaagaagttgtgaatgggcagaggttcctcctcgtattggatgacgtctggaaccgtgaggctagtaagtgggaagcgctcaagtcctacgttcagcatggtggcagcggtagctcagttttgacaacaacccgtgataaaacagttgctgaaataatggctccacctaaagaagttcatcatctcaaggacttgaatgaaaactttataaaggaaattatcgagagaagtgctttcaattcagaagaagagaaaaggcaatctgagctactcgaaatggttggtgatattgccaagaaatgttctggttcccctttagctgcaacagcattgggctctacactgcgtacaaagaccaccaagaaagaatgggaggctatattaaggagaagcacaatttgtgatgaggaaaatggaattttaccaatactaaagcttagttacaattgcttgccatcatatatgcggcagtgctttgctttctgtgctatttttcccaaggatcatgtgattgatgtggaaatgttgatccaattatggatggccaattgttttatcccagagcaacaaggagagtgccctgaaatcagtggtaaaagaattttcagtgagttggtgtcaaggtcattttttcaggatgtgaaggggatcccatttgagttccatgatataaaggactctaagattactgctaagatccatgatcttatgcatgatgttgcacaatcttccatgggaaaagaatgtgctgccatagattcagaaagtattggaagtgaggacttcccttattccgctcgccatttatttttgtcaggtgatagaccagaagttattcttaattcttccctagagaaaggatatcccggtatccaaacattgatatattcctcgcaaaatgaagatttacagaatttatcaaaatacaggtcattgcgagcattagagatctggggaggtataatcctgaaaccaaaatatcatcatcacctgaggtatcttgatctctcatgcagtgaaattaaagcacttcctgaagacataagcatcctatatcatctgcaaacgctgaacctttcccactgtagcaatcttcatcgacttccaaagggaacgaagtacatgactgccctccgtcacctgtacactcacggatgtgagaggttaaaaagcatgcctccgaacctcggacacctcacttgcctacagacgcttacatgctttgtagctggtgcttgctctggctgcagtgatttgggagagctgcggcagtcggaccttggtggtcgactagagctaacacaactggaaaatgtgacaaaagctgatgcaaaagcagcaaatctcggaaagaagaaaaaactgaccgaattgagcttaggatgggctgatcaggagtacaaggaggcacagagataa

SEQ ID NO: 38801 - DNA, 566 bp, Oryza sativa
  Clone ID: PAT_MRT4530_42402C.1
atgttgggcgcgtgcggcagtggcgtggcggcgcggcggcggcgtcggggcgccgtgggccgtcccggcggcgtgcgggcgcggcggcggcggcgagggggcccggcggcgtgggggcgtggcggcgtcgaggcccggcggcgtgggggcgcggcggcggcgcgcggcggccgcggcgtggcgagctcgaggcggtggcggcggagtggcaggggcgacggcgtggcgtcgcagcggcgtggcgtagcagcccggcggcgtggcgagctcgaggcgggggtggcgttcgtggtagtggcgacggcgtcgtcggcagtggcggccgcgtcgaacgacggctctcacccaattgatgcggcggcggcgtctgcggcggaggcggcgaggaccgccaagcgacggcgagaaacgacggcggtgtcggcgcggggttgccctaggcacggtggcggcgaaggagaagccgagatcgaaaaacgtctaagtgttggtggagaagacgagggcgcaccaggaatatatatacccccggatctttagtcccggttgttgttaccaaccgggag

SEQ ID NO: 38802 - DNA, 400 bp, Oryza sativa
  Clone ID: PAT_MRT4530_42403C.1
aacccaaaaatcctggtacaatatcaactaagtttaatggctaggaagacccggtgaaacatgaaaaccggggactgccgggcgagttacaaatcatttaggaaaagaggtaaaccgatcctgattcctaaggggaacccacaaaatatcagggttggggggcccgggggcccgccccgaatggggaacagaggggtctggaaacatggccgggggccatgcaagaaacaaattggggacttttgaccacgggcattggcaaggggaagagtgcccccatgccctggaaaatccccctggaagcccaaaaatgggaccatgttccctcacttcaggacagaaaccggggaacatttccttggtttcccattttatggacatccccaggggaaaggttttt

SEQ ID NO: 38803 - DNA, 1204 bp, Oryza sativa
  Clone ID: PAT_MRT4530_42404C.1
cgtgaattgtgatctctccaccaccatcaccaccaccacgacgctgcaggcagagaggagcacgcggcccctgtgatctccgtgccaaaatcctcgatcccccgccgcggaatccagcagagggactgaattttgcaattctcagccatgggttcagttgtggatgctccagtggttgtggagggggttgctgagaacatgttgggtgataagaaagttacagttgtatttgttctaggtggtcctggaagtggaaaaggcacacagtgtgccaacattgtggaacactttggattcacccacttaagtgctggagaccttttgcgtgcagagataaaatctggttctgagaatggaactatgattgagaacatgataaaggaggggaagattgttccgtcagaggttactataaagctcttgcaagatgccatgattaaaaatgagaatgataagtttctaatcgatgggttcccaaggaatgaagagaatcgtgctgccttcgagaatgttacaaaaatttcccctgcatttgtgctattttttgactgttctgaagaagagatggaaagacgtcttttgggacgcaatcagggtagagttgatgacaacattgagaccattaggaaaagattcaaagtttttgttgaatcaagtttgcctgtaattgagcactacaatgcgaagaacaaagttaaaaagattgatgctgcaaaaccaatttctgaagtgtttgaagatgtcaaagccatttttgccccatatgctaaggttgaatagagataaaaaaaggaccacagagggcacaaatggtggcgtgctgtcagaaaaggccttgctcgagtgtgactatatatctgtgattaagaaccattgatatagaagaaaagtttttcttggctcccatgagctacctaattatcagtaggcaattcgtttcgttaccagcaataagtagatccgagtctcgctgcccccatggtgtaccggcgtgtgtcctctgtaatgctgtactgttgtataatttacctcatggatgatcaaacattatgccctcccatcagctgtgccattacaagagggtttaaaacttctgtaactgtcacattctttcataagcgattggctattcgttaaaaaaaaaaaaaaaaaaaaaaaaaaaaaaaaaaaaaaaaaaaaaaaaaaaaaaaaaaaaaaaaaaaaa

SEQ ID NO: 38804 - DNA, 1298 bp, Oryza sativa
  Clone ID: PAT_MRT4530_42405C.1
aagccttctcttttcaccattaaaggagttggttcagtttataaaacctttaacacacaagtcatcataatcataagtttctgtgacatgaaggatcagtgcccagaacctatcagttttgtcttctttgcaaaattaattagccattgagaacagatgaagtgtactgcagtctgatccatgacttacaaaaattgaatcctcgtgtattgtcaatatatgattcttgcaccttgagtaacgaatgtgcatcatcattaagaaaatactcctggcttgtagaattgtgcttttcatgactggccattcatcttactggtgaaatcgtgcttttcattcatgggttcagttgtggatgctccagtggttgtggagggggttgctgagaacatgttgggtgataagaaagttacagttgtatttgttctaggtggtcctggaagtggaaaaggcacacagtgtgccaacattgtggaacactttggattcacccacttaagtgctggagaccttttgcgtgcagagataaaatctggttctgagaatggaactatgattgagaacatgataaaggaggggaagattgttccgtcagaggttactataaagctcttgcaagatgccatgattaaaaatgagaatgataagtttctaatcgatgggttcccaaggaatgaagagaatcgtgctgccttcgagaatgttacaaaaatttcccctgcatttgtgctattttttgactgttctgaagaagagatggaaagacgtcttttgggacgcaatcagggtagagttgatgacaacattgagaccattaggaaaagattcaaagtttttgttgaatcaagtttgcctgtaattgagcactacaatgcgaagaacaaagttaaaaagattgatgctgcaaaaccaatttctgaagtgtttgaagatgtcaaagccatttttgccccatatgctaagttaggtatccagttacttgcacctgacaaaatatcatggatacgtgttatggaatggttgaatagagataaaaaaaggaccacagagggcacaaatggtggcgtgctgtcagaaaagcagcaatggttgtcgagggtaactgtcaattgcaatgagaacttcacctctaatataataggagtgaaagtttcttatcatgccttgctcgagtgtgactatatatctgtgattaagaaccattgattcctcagttatgtctgactattgatcatccttaaacatcacaaatacttagggtaaataaactttttgtgtctgaccaagaatttgcacat

SEQ ID NO: 38805 - DNA, 378 bp, Oryza sativa
  Clone ID: PAT_MRT4530_42406C.1
atggtagaactcatcagtcaaataacgaacagggattcaacattacaagggaataaagtcaacaacttacaaaccaacccggacagaaaaaagaaacaaagagaaggttacaaaggtgatatgtcccggcataaattttgcgaccctaatgctgattgtcaactccgggagcagacctgccgatctccacaaggcagcctcctctgccgctgccctagctacgtccggccacgagtgctgctgctgatagaacaccctgttgttcctttccttccagatggactaggcagcgagcacgacgacggtatcgaacccgcgcctaagctgttagggacccctttcctgatgcctgaccaccagctcaggaaagaacattga

SEQ ID NO: 38806 - DNA, 457 bp, Oryza sativa
  Clone ID: PAT_MRT4530_42407C.1
agcctccaaaatccatgttagtccactcttaataatgttgaacaggcccatgtttacatagtatccacttactttttattaccatcctacgtgtaaaaggttacatatagttccgcttcatttaaaagggttaaactggggtaaggtagcattaaaccaccactagaaacacatctagccacacggacctaaaccacacatcaccacactacaagatacaaacaaaagggctaggatgttacatttagccctgcctttgtatataatagatggattcaaattcttgctggtagtatatatcttccattgctgcctgatcagaacttgaagctcatagaccaaccaccgaacgtaccacacatagaacgactaccaagcaacagtaaaacgacgacgatacagacgtcacttcgatcgaattcaacccgtggcagtacagtagctcatcttcccaatg

SEQ ID NO: 38807 - DNA, 506 bp, Oryza sativa
  unsure (1)..(506): unsure at all n locations
  Clone ID: PAT_MRT4530_42408C.1
ttaggttgatgttcaaggtcttgaccttttcaangggaaagtcagtgtatcgggatatgannanccttctccccntctganagtngtccccatcccaatatnatgggatctctnaaaatatngggaaganttccattactctcntccacntnatttaaaatgaaatccgtgatgggcanttgaacttcaagggcaagcgggttctanaacntggttgtgggatctggtctggctgggganttttgcctgntttgaaaagtattttcatcnttccattgcttcngaatgaaatatcaatttactatatctttgctttcnnttatctttacccccnaatactgattgactgaatgcttccattcttcctcccggtgcatccncagttcnttttcnngaacccaatnccnaaaccattanatccnaaccattccccatgttcttgccaancntnaacnagncccgggacngncnaacanaacntccnaaaanccngtttccccctcccc

SEQ ID NO: 38808 - DNA, 570 bp, Oryza sativa
  Clone ID: PAT_MRT4530_42409C.1
atgacctccacagagatagctgacgggctcaggttgttgcggatccatcggacgcagcggcggacggccggaggcaagacgacggctgcaggcgcagggcggcgcgtcgacggctggggcgtgagaggaggcgacgcgtccgctattagttggacgcctcccccaatcacctcttccttccacaatcctcatcacctcgtcgacatctccaagcacatggatgccgatgccaacgccgacgacgcgacgatcctgaacccggcggcggcggcggagggcaaggagaagaagacggatcaggaggaggcggggccatcgccgaacttcggcgacatggacgacgactcgccggagcatcgcagggagcgcgaggagctgcacgcctacctcgacaaggtggagctcgagttcgaggcgttccaggaggaggtccgccgcgaggtccaggagaccggcggctacctgcagacgttcgacgaggccgcccacgccgacatggaagaattcatcgctcaggccatggaagaatggaccgggaccggcctcaaccgagtttcaacactgaactga

SEQ ID NO: 38809 - DNA, 189 bp, Oryza sativa
  Clone ID: PAT_MRT4530_4240C.1
acacacggccgctctgtcttgatttctggctttatttattcattacattatcttttcttttctctctattttcattacttcacctgctttcgacacacacaccttcgatgttgcgttcctgattctctctcctttctaactacgaaccccacaccacatgctacgtctgaccaataacgacagctcgcc

SEQ ID NO: 38810 - DNA, 799 bp, Oryza sativa
  Clone ID: PAT_MRT4530_42410C.1
tcagactggccccctggaggccaggatggtgttgctcggggtggccgatacagagccgacggagccgtatttggtcagaccgagctgatggcagtctgaccgagccaaggccggtctgaccggccactcactatcggtctgaccggccaggccgatggggccctctaacagcgcagctttcgtcaatgggtagacgcctgggcattgaggatccgaattggcatagtgatccttgtgtatacctactaccaccttggtgccagcgtcctctctgcctatgcggtgactgatgccaactaatggcttcgaggaatcctgatattcgaggaaggcccttttttaggtgccctaactatgaccgtgaggcccgcactacggcttgcgtatatatcgagtgggtcgatacagaaaatcccgttctcgacctaaccacttgtttacaagaaggatgctggtatttcgcattcgaaagtactgagcaatacttgcagagaaaagcggcttacgaacgataatgtcgtgaacaacagtgcaactagcgggtgctaactacggcactccctccatgggaagcccgtccaagatgcacaagcggtgatcgttgtcaggttcttcgttccataaagcctacgagattgggtcgaaggttctttgtttgtccaaatattcttgacgacaatttcatggaaccaccaaggagatgtcaatagagagaacggatagacaccagaagggttctaactccacctagccgtgctgtgcagcttgaactaccagagcaatacagggatactaaagc

SEQ ID NO: 38811 - DNA, 217 bp, Oryza sativa
  unsure (1)..(217): unsure at all n locations
  Clone ID: PAT_MRT4530_42411C.1
acacaggtagaacacactctcgccccacttctccncgcgcgtttgtgaccactcaagtgtgcctatagtaccactccttaccctgtgggccgtaatgtaattgtaagaccacatttgggcccacaataacgtatcacgcactggtgttgggcactgaaactattgatgtactatgacatgacgaaagtttgcttgccaaaaaaaaaaaaaaaaaaaa

SEQ ID NO: 38812 - DNA, 333 bp, Oryza sativa
  Clone ID: PAT_MRT4530_42412C.1
atggctagacgtcggggtgttgaggatctgaactggcgtagcgatccttgtgtatacctactaccaccttggtgccagcgtcctctctgcctatgcggtgatcgatgccaactaatggcttcgaggaatcctgatattcgaggaatgcgcttttttaggtgccctaactatgaccgtgaggaaccaccaaggagatgtcaatacagagaatggatagacaccagaagggttctaactccacctagccgtgttatgcagcttgaactaccagagcaatacagggttactaaagcgcggtttgagagaggagagggatcctcacgtaggggttag

SEQ ID NO: 38813 - DNA, 1107 bp, Oryza sativa
  Clone ID: PAT_MRT4530_42413C.1
aaaaaaaaaaaattatggatgcatcatcatattcagtactctcttccccacttgcttcattacaaatccgaccggctttcgtcaatggctagacgccggggtgttgaggatccaaactggcgtagcgatccttgtgtatacctactaccaccttggtgccagcgtcctctctgcctatgcggtgatcgatgccaactaatggcttcgaggaatcctgatattcgaggaaggcgcttttttaggtgccctaactatgaccgtgagacccgcactacggcttgcgcatacatcgagtgggtcgatacagaaaatcccgttctcgacctaaccacttgtttacaagaaggtcgctggtatttcgcatccgaaagtactgagcaatacttacagagaaaagcggcttatgaacgacaatgtcgtgaacaacagagcgactggcgggtgctaactacggcactccctccatgggaagcccgtccaagatgcaggtgtggtgatcgttgtcaggttcttcgttccataaatcctacaacattgggtcgaaggttctttgtttgtccaaatattcttgacgacgatttcatggaaccaccaaggagatgtcaatacagagaatggatagacaccagaagggttctaactccacctagccgtgttgtgcagcttgaactaccagagcaatacagggagatgaacgagcgggagaagagggaggaggaggagccgcgtgaggagagggagttcgccacgtgggtggcggcgacaagcgccgagagctacgcgaggttcaatctgccgccgttgacactggaggaggcggagcttgaggccgccgttcgccgcaggcgcgacgacgacgtctccgtcctcaggccggaggatgacgaggagatcaagcgccgcatcggcaacgatggcatcctctgtcacttcgattaggcaactaattaattatacgtatccgtgatcgtcatcgtcatcgattttctagatagctagccagatcgatggattgtttttcttatcctgtaactagtgtattatacttaattattatttactcctatatttatgttaaaaaaaaaaaaaaaaaaaaaaaaaaaaaaa

SEQ ID NO: 38814 - DNA, 294 bp, Oryza sativa
  Clone ID: PAT_MRT4530_42414C.1
atgacgctgaccctctcggcggctgcacgcatgacactgacgagctgcggcatgaagcattcggctagggcgcccgggccgcagccaaagcggagctccgtggcggtccaatcccgtcgggctcccaggcccagggctcacgcacttgcatgtccggtcgatctcgcctccagcggtgctggcgccgacctccgtggcggtggcgagctcagctcctgccgccgctccagcccgtcccacggatactttttaattcaaatgccacctaagcgccacgtcaaccctacagactag

SEQ ID NO: 38815 - DNA, 450 bp, Oryza sativa
  Clone ID: PAT_MRT4530_42415C.1
gtttttccccaactgttggagtgagcccttaatgcgattcttgtgctcagacattgagctctgacatccagtcaagaagtgccacctacccctggccgaccagttaaagagccgatgttcattcctattgctgtcttgacttgtctgattataccgccaaggagatgcccgtaactcgcattcacagggagggaaggctccaatcagtcactagtgacggccagccagccttcactactgttcttgactttactaagaaggaggaagaatccacctttaacaacatagctgagaaaccagcgccttgcttgttgagggcatacagaggtacagttcgcattgaccctgatctgactgacagcgacttggatttacacttgccaatgattcggatgaactttaacaggggggaagctgatcaggtgctcggacgttaacagatgctcactc

SEQ ID NO: 38816 - DNA, 468 bp, Oryza sativa
  Clone ID: PAT_MRT4530_42416C.1
tttccgatcaggtcatctgcatggctgttgaaaaattaccggaaactttgttgccttcctgataccgatacggatgcaacgcggagtaagcggaacgtaaccgtgcaagactcaggggcgtatcggatgcaacgcagaagcattcagctcgcccatttggcggcgacggtgtgctcgacggcggtggttgtcgtggcagtggtggtcgtaggcgatcccgacgataagacgtggcgcggcggtggcgtcttcccgtcactggctacgcccccttttgatcgctctctgttgggatcgggaggcggtggagacccggccgtgaactcctgtcgttggcttgatccattgagttttacatcaaggatccagaggagagttataagagggaatgagatgttggatctagaagatgaggcgaggcaacaatgtcggctggcgcctggtggagttgggcgatgcggcccggga

SEQ ID NO: 38817 - DNA, 1581 bp, Oryza sativa
  Clone ID: PAT_MRT4530_42417C.1
atggcgacggcgagggcggccgccgtggcgagggcgggcgggcggcgagagcttgcacgcggcgcggcggcggctgcggcgagggcgggcggcggcaagggcgtgcgctcgggggcggcagccgcggcgagggcgggcggcggcgagggcgtgcgcgcggcaacggcgtgcgggcgacggcggcggctgctgctgctgctcccgtggccgctggcttccacgccgaggcatcgtcgtcagcccccgcctccgcctgcccccaccatcgcttttgctgctactgctcccgtggccggcgacgaccccatcctgctcgacgtcgacgtcggcgcctacggcgccctcctccccgtcccttgttccaggtcctcccctgcacgatattgctggatgcagagggtatacatgtccctaaaaagtgaagataaaacagcaattgggtttgaaagtgggggcgtagatgcaattgccccaaaattctggagatgccactggcttgctgattgcaactgtcagtgtggtgattggactacatcagttgtgggaattgaactggtcaaatctcataccaatacaatgcaaggcatttttgcatgtggttcaatttcctcgccccatggatcatgttttagaccagcttgtcttgcagtggatgatctgaggttgttttacaaaataaattcaataacatgtggagcgtactcatggcgttggtgtgtgaaaaaactacatatgaggaccaatagaaggcaaatgggtactacagtgagaactaacgctaaatggctatttggaggagatgaccgtagcagtagtaatgcaaggctggaacgcagtgagtctgctaacgaagacatcttaatcttctacttccaattggacctacaaacccgaatacagtatgcattgaatatagagcaatttgatgtggcaaaacaattgagggaaaaactcacagagattgaaacagagataattaggcaacgtgaagctaaaagaggctcatcaaagactgaagctcaggacaaagctataaaccttttacgcgtgcgtgcggatttgcaaaaggctgttgacagtgaaaattatgctttggcagctgcactgcgtgatgaaattgctaaacttgagacagagtctctggcagtctccgctaaggcccttgcatatcaaaatgtggaatatgcatttcgactagggcagaaagtacgtcataaggtacacggatatagagctgtgatttgtggcatggatcctgtgtgctgtgaatccaagtcatggatggagacagcaaatgtggaaaacttgtccaaaggaccgaatcaacctttttatcaagtccttgttgatgtatatgctgatccagaactccttgttgcatatgttgcagaagaaaatcttgcagaagctgaaatatcagagaaaggaagatttgatcacccctatattgaatttctgttttttggcgaggacactgctggggacttcattcctatcaagcagcttcgtgagaagtatgatcagccacgttatgaagcttctggggatgaagatgacgatgatggcagcacggatagctga

SEQ ID NO: 38818 - DNA, 333 bp, Oryza sativa
  Clone ID: PAT_MRT4530_42418C.1
atggggatgaggatggggatgagaaagcgcgtagatcaaaggctttggcggcaatgggagagcaggcggtgggctgtgcgagtaagagatgctgggtgcagcaaggaagggaaaagatgcccgggagaatggggctgggggactaggaggcagaagcggagcctgtcgcggcggcgacggcaatggggaaagagagtattaaacaacaacttgtcagagattcttgtcaattcattaagggggaaaataatgtttttttatcatgatgacatcaaggttaaggttaaggttaaggtgccctcaggcctcatggacacaccagaggaccaataa

SEQ ID NO: 38819 - DNA, 235 bp, Oryza sativa
  Clone ID: PAT_MRT4530_42419C.1
ttgtggtggtgtgttcatccaggagcaaatgctggtgaatggtcatgcctggcacttcaagaactatgacaaacggccacaatttgcaaaggtaagaaactatggagtatatttcaatatattctttaattgcgatattcatatatatattctgttatgtaaatattctcgtttgaactctgaaaatgataaatattattagcaacataagactaataaattgtagtcatacttg

SEQ ID NO: 38820 - DNA, 421 bp, Oryza sativa
  Clone ID: PAT_MRT4530_4241C.1
tcgcccacgcgtccgcccacgcgtccgaccaacaaacataagaggaaaaaaaacatatacactaatagtgattgtctgattgatcatcaatggctagcatggtcgtcttcttcgcagaggcgctcatggaggccatggtggccatctccggcgcgcagatgatcgagtcgagatgaggttaagggacaggcattgtcagcgtgaggtgcaggacagaccggtggacgcgtgccggcatgtgctcgaccggcagctcaccggccgggagaggttccatgcgatggtccgtcgcccgggagcgctcggtctgcggatgcattgctgacagcacctgcatgacagtgagcccccagtgccgctgagccgtcatacgacggatggtgaggagcttcgaggagagcatgccgatgcccctggagca

SEQ ID NO: 38821 - DNA, 844 bp, Oryza sativa
  Clone ID: PAT_MRT4530_42420C.1
ttatttccgggacaaaagaggtggaaaattttcaaaatgacaagattgcccctggagccatattcccccgcgccaggagcggcagacggcgagagatcctgtgacggcggcgatggctgctgcgccgcccctagggttcttggacacgtacggctccatctcaccgtagagccctctgatccagcccatgtgcttctccgtcgccgccctgctcttcgaccagaacccatagtactggatgttgtagagcgcctgccggtgcgggaacgacatcaccactggcgcgacgtggaccatcttgccgccgtaggggtcgaggatgagcagcccagcaccgtccttgaggagggagtcggacttggccttcaagtacttgtccggcttgctagtgcccctgtccaggagcatctccaatggcttccccgtgcagtagaacgcgaagtagagcatggactggatccacatcatctcgatgcagtcgctcgccgtcaccccgagctccgggaaggtgtcggccatggcggcgacgaggccaaggcgtgtgccgactaccgaggtacagggactcgaactgcacgttctggttctgcaatacgacgcggagaagttcccgccgctgccgcctcggatggcccagaagaggccctcccccatggcggccctgttgaggagcctccccctcggcgttcaccatgttggcatcgacgacgaggtcggaggcgaggccgtgcttccacagcatcaggctgaagccgccgccgctgaggaacccgtcgacaccgaccgtcctactcgggccgtcgcgctgctcgcgcgccgttcctccgctccgctgcgtgtgtga

SEQ ID NO: 38822 - DNA, 2479 bp, Oryza sativa
  Clone ID: PAT_MRT4530_42421C.1
gttttttttttgtttttttcactttttatttttttttttatatgaaaataatgaattatttagtatttttttattcgatgaactgtgacatcttattccaaaacaggttttaattccagcttattcacacagcaaacactagaggcagtgttatatggtacaaatcaggccttgcacgtgtacgtattgaaatgtaatattccaccaaaaattgactgcaaattgcagttggctcattaaaatacataaggcattaagtagcaaactaactatattcacagtacagacctgctacatcagctattcaatttttccctcgtgtttgccttgagtttccattcagatctgctttaaaatgggcttacgattccgggggagcatcgaactttgatggggtatcaattcccatcatacatttgagtcctgatatcaagatgattagcagcactattccaacaaagcttccttctagcagagttgattttactaagcactccccgttcacattttccacggccgggtttagtagtattagtcttctctgcgaggtacctgcctaacggcaggtttgaaggtctctctgacaaactcaaaggctgagaagcaaagaatcgtatatcttcttctcgcgactcgttcaccagagccagcagctccgcaacgtacaccccagtcagggttttatggtacaacccaaggcctgcacttgtacgtattgaaacgtaatattccaccaaaacttgactgcaaattgcagctggctcattaaaatacataaggcatcaagtagcgaacttactatatgcacaatacatttcctgctacatcagctattcaatttttccctagcacttgccctgagtttccagtcagaaccgctttcaaacgggcttgcccctcccgggcagcgccccaccttattcgggtagcggcccccatcctacatgtgggtgctgtgatcaggatcgccggaggagcggttcctacaaagctgcccgccagcagagttaagctcagaaagcactccccttctgattttccacgccacggtgagggagagttggactccgctgcgcgggccgtgcctagtgttatccttgaaagcgccctcacaaaactaagcctactggattcattactctcccctcgctttattcaatgccgcagcagaggagtagaagaacaagaagagaatactacagctcaatatgtgtgcgctcgaaccaccatcacaaaagactcatgtaatcagatcagtctgcacgggttctttttagtttgtgatgccaccaatccatgaatggaatccatgttgttgtgatgtttgttcagatcttcacttacagaacaggtgtctgtgtaggtgatatgattatctccgaaaccattgttgcaattctcagcaaacccagatagcaatgacttctccaatttgtcatcatctgacatggcaatgtaggggaatgccatcgaaaactcggagcttgcaaacgagttcttcagcatgtctactaaagttgaatcagcttgcttttctttagaaatgtctgacgattgtagcttcgagccaagaaaaagaactgcaacatcaacactctttgcatgatcctcccttgaacacaccaagtttgaccaaccaccttcttcaagaacagatttcactaagctctttggggatactgtctgatagtagaccatttctttagcctcatcagaagagaatccgtagttcttgggcgcccagaggaaggcaggccccatcaccggagccgcggctgacacctgcgcaaggaggagcatcacggccaccaccgccgcccaggcagccgccatcttggcgcgaagagaagcagggaaccccggattggggatttcgaactcgtgtaggctctcccccccctcctcgtggcgagatgttgttcgtcgcgtccgcgtgccgggacgcgtgctagacgcgtggaacaaagcttccttccagcagagttgattttactaagcactccccgtcacatttaccgcggccaggtttagtagtattggtcgtctccaccggcggcgagccgaggacgacgatgcggagggcgaggttgacgcagtagagcgcgccgcttgacgagtccttcttcttctcgccctcacacatgattgcctacttaattaattactctctccttgcttgatccaatgaagaagaagagaagaagaagaagaagagtagtatagtatagctaactaagtatgcaagctagctagggttgcaaaaagttgagaggtacgtgcataatggtaggtataatgggttctctagcgaagcaaaggactaacaagcataaataatcgtatattgaggtccagacttcttcaatagagtaacaactcggacagcctcctcctcgcggatggcgcggaacgccaggatgcgcctggggctcagcagctcgaggcggcagatcttgcgcacctgccgccagtgctcgcc

SEQ ID NO: 38823 - DNA, 1053 bp, Oryza sativa
  Clone ID: PAT_MRT4530_42422C.1
atggacctgcacggcgaagagcgcgaacctgcgtcatggacctgtgtcgtcccctcgggttacactgccacatcgttgcgtggcagcttgccacgcatctacgccgcgtccgcatcgtggtcgcatgccagccacaccatcgggattggcgagaggatccccaacagttgggagatgaaaaatattgtgccggagaaaatatttacagaagtagaccctgccgccctcggggagagcgacagggtgatcggatgtaatttggttactgaatctcatccaaacacccttagaatagttgcattagaacgaaaaatatggctatttggaggagatggccgtagcagtagtaatgcaaggatggaacgcagtgagtctgctaacgaagacatcttaatcttctacttccaattggacctacaaacccggatacagattgaaacagtgataattaggcaacgtgaagctaaaagaggctcatcaaagactgaagctcaggacaaagctataaaccttttacgcgtgcgtgcggatttgcaaaaggccgttgacagtgaaaactatgctttggcagctgcactgcgtgatgaaattgctaaacttgagacagagtctctggcagtctccgctaaggcccttgcatatcaaaatgtgaaatatgcatttcgactagggcagaaagtacgccataaggtacacggatatagagctgtgatttgtggcatggatcatgtgtgctgtgaatccaagtcatggatggagacagcaaatgtggaaaacttgtccaaaggaccgaatcaacctttttatcaagtccttgttgatgtatatgctgatccagaactccttgttgcatatgttgcagaagaaaatcttgcagaggctgaaataccagagaaaggaagatttgatcacccctatattgaatttctgttttttggcgaggacactgctggggacttcattcctatcaagcagcttcgtgagaagtatgatcagccacgttatgaagcttctggggatgaagatgacgatgatggcagcacggatagctga

SEQ ID NO: 38824 - DNA, 1204 bp, Oryza sativa
  Clone ID: PAT_MRT4530_42423C.1
atgaaagaatcacaaggttttattagatgaattgtataacatcttattggctactcggagtcctgaattccagcttattcacacagcaaacactggaggcagtgttatatggtacaacccaaggcttgcacttgtacgtattgaaatgtaatattccaccaaaaattgactgcaaattgcagctggctcattaaaatacataaggcatcaagtagcgaacttactatatgcacaatacatttcctgctacatcagctattcaatttttccctagcacttgccctgagtttccattcagaactgctttaaaatgggcttatgattccgggggagcatcgaactttgatggggtatcaattcccatcatacatttgagtcctgatatcaagatgattagcagcactattccctctaaaattttactgtttttgttggaaaacattataggcttaagtctgcctaacggcaggtttgaagggctctctagcaaaccatagggctgagaagcataaagaattgtatatttagctccagacttcttcagcagagtaaccagctcagaaagtaactccccttctgattttgtgttatccttgaaaccaccatcacagaagacaaccagatcagtctgtccacttgggttctttttagtttgtgatgccaccaatccatgaatggaatccatgtcgtgatgtttcttcagatcttcacttacagaacaggtgtctgtgtaggtgatatgattatttccaagaccattgttgcaattctcagcaaatccagatagcaatgacttctccaatttgtcatcatctgacatggcaacataggggaatgccatggaaaactcggagcttgcaaaggagttcttcagcatgtctactaaagttgaatcagcttgcttttctttagaaatgtctgatgattgtagcttcgagccaagaaaaagaactgcaacatcaacactctttgcatgatcctcccttgaacacaccaagtttgaccaaccaccttcctcaagaacagatttcactaagctctttggggatactgtctgatagtagaccatttctttagtctcatcagaagagaatccgtagttattgggcgcccagaggaaggcaggccccatcaccggagccgccgctgacacctgcgcaaggaggagcatcacggccaccgccgccgcccaggcagccgccat

SEQ ID NO: 38825 - DNA, 2487 bp, Oryza sativa
  unsure (1)..(2487): unsure at all n locations
  Clone ID: PAT_MRT4530_42424C.1
atggcggccctgtcgaggagcctccccctcggcgttcaccatggtggcatcgatgacgaggtcggaggcgaggccgtgcttccgcagcatcaggccgaagccgccgccgctgaggaacctgtcgacaccgaccgtcccactcggggcgtcgcgctgcccgcgcgccgttcctccgctccgccgcccggcaacaggtggggagaagagtggcgactgacggaccactacatcgttgcatggcagctcgccgcgcatctgcgccacgtccacatcatggtcgcatgtcagccacaccgtcgggattggcaagaggatctccaagagttgggagatggagtacgttgcgacgcctgagcatactcgcgagcaccactgactgcatgagtgcccgtgcatgcaagcgaagaggacgccagacgctgaatcgcgagagaggtgtgtggtggcctgtgaccagcagggagaagggtggtggttgttgggcggcggtggtaggtagaagcccgacgacggcacctcgaagacgatgcggcggagccgcgcgttcgcctctgcggaggagaggcggagctcggtgacacctaaacacatcggcttttgaacagctccgagggcgactatgagcttgagggataggagcttggccagcgtgacgaggcagaaaccctgcgcctgcgcgtcgtgctccctgcgtccatccctcgccacgccttgccgcaccaacagcgctcaccggtgagcatcctaatccatcccatccggcctcggcctcgtcctcgaatttcgtctcctcgcccggcgtcctcctgcatccaccgcatcatcgctcgccgttggggatcccactgacttgctgattgcaactgtcagtgtggtgattggactgcatcagttgtgggaattgaactggtcaagtctcagactaatacaatgcaaggcatttttgcatgtggttcaatttcctcggcccatggatcatgctttagaccagcttgtcttgcagtggatgatctgaggctgttttacaaaataaattcagtaacctgtggagcgtactcgtggcgttggtgtgtgaaaaaactacatatgaggaccaatagaaggcaaatgggtactacggtgagaactaatgctagatggctatttggaggagatggccgtagcagtagtaatgcaaggatggaacgcagtgagtctgctaacgaagacatcttaatcttctacttccaattggacctacaaacccggatacaggtgagttgttgcttccttaccatcattttctaaagcgaataaagttaccaatccagccggcagctattcttttttcacggatcaattccctagactagtagcaatcggctaactaaatctactatcatgatcattgcatcattcttagttgctagtcactggttcatgcaactgtttgatacttacctatgcacgtccagcctaactattgaatttcttggttcttactagtatgcattgaatatagagcaatttgatgtggcaaaacaattgagggaaaaactcacagagattgaaacagtgataattaggcaacgtgaagctaaaagaggctcatcaaagactgaagctcaggacaaagctataaaccttttacgcgtgcgtgcggatttgcaaaaggccgttgacagtgaaaactatgctttggcagctgcactgcgtgatgaaattgctaaacttgagacagagtctctggcagtctccgctaaggcccttgcatatcaaaatgtgaaatatgcatttcgactagggcagaaagtacgccataaggtacacggtgagtactactgctatactacccacttcgtattattgtttacacattatttctgaagctatccagaatatggataactactacaaatttcttttcaaactttatataagaagttaatttttcataattgtcattatccttaaatggaacatttgcatgtgttgaagcacactttatatcaaatattaacttcagtgaacacactttagtttctcttcttaattttacatgataacatcacctgctgaaggatatagagctgtgatttgtggcatggatcctgtgtgctgtgaatccaagtcatggatggagacagcaaatgtggaaaacttgtccaaaggaccgaatcaacctttttatcaagtaaatgctgcttgacttattccaatttaagtagttcctcaatgcccatagttcatagaaatatcatttccttcatgtagcatcagttgtgacttgtttatcatggatggcgattatgtgtaataatacctacctgttcttgttcttaatttgcaaactcacttgtggaattgagatggtgatattcatcattgcctttttctcctcccttttggatttgttcggtataatcaggcggttcatgatgcaattttattagcctgcggattgactgtttnctctatgcaactaatgttnacttttggatgatattg

SEQ ID NO: 38826 - DNA, 130 bp, Oryza sativa
  Clone ID: PAT_MRT4530_42425C.1
ccgctgtccagcaggagatcgccctcgccggcggacgtgttcgcatcttcttgcacgactggttcccgcaggggtgcgatgcgttggtgtatctgagaggaggcagcaactcggagcatggcatgggccc

SEQ ID NO: 38827 - DNA, 879 bp, Oryza sativa
  Clone ID: PAT_MRT4530_42426C.1
ttattttattatttccgggtcaaaagaggtgatttcaaaatgacaagattgcccatggagccatattcccccgcgccaggagcggcagacggcgagagatcctgtgtcggcggcgatggctgctgcgccgcccctagggttcttggacacgtatggctccatctcactgtagagccctctcatccagcccatgtcattcttcgcctgtcgtcgtcccgcttctttgaccaaaacccttagtactgattgttgtaaaccgcctgccggtgaaaaaatgcggtcacggatggagcgacgtgacccatctcgccgcatgaggggtgaaggatgaccagcccgggcaccgtccttgaggagccagctccaggtggtctcccagacttggctgggcatgttcttgaacgtacggagtcggacttggccttcaagtacttgtctggcttgctggtgcccctgtccaggagcatctccaatggcttccctgtgccgtagaacgcgaagtagagcatggactagatccacatcatctcgatgcagtcgcttgccgtcacgccgagctccgggaaggtgtcggccatggcggcgacgaggccaaggcgtgtgccgactaccgaggtacagggactcgaactgcgcgttctggttctgcactatgacgtggagaagttcccgccgccgccacctcggatggcccagaagaggtcctccccaatggcggccctgtcgaggagcctccccctcggcgttcaccatggtggcatcgacgacgaggtcagaggcgaggccgtgcttccacagcatcaggccgaagccgccaccactgaggaacccgtcgacaccgaccgtcccactcgaggcgtcgcgctgcccgcgcgccat

SEQ ID NO: 38828 - DNA, 387 bp, Oryza sativa
  Clone ID: PAT_MRT4530_42427C.1
atggcttcgcgcgtgccaccgatcgtcatctcggccttctcgatcttgcttggggccctccagtcgctcgaatccttcctcgccgcgtcgagcgcgacctcgccgtcgctggatcgtggcgcccaactcgccgcaggtgctctcttctttaccattctgatctctgtcgagctcacttgtctccttctgttcgcatatgtcggcaagctcggcgccgctggtggagcggggcacggtggcttcttcgccgtcgccaccgcaacgctcgccgccgccgccgtgacagctctcctcgccgagccatccttcctttcttttccgctcgcgcaggcggaatcgagtaggtctataaagctattggattttgatggaaattggaaatactag

SEQ ID NO: 38829 - DNA, 1014 bp, Oryza sativa
  Clone ID: PAT_MRT4530_42428C.1
cgctaaggcccttgcatatcaaaatgtggaatatgcatttcgactagggcagaaagtacgtcataaggtacacgagctgtgatttgtggcatggatcctgtgtgctgtgaatccaagtcatggatggagacagcaaatgtggaaaacttgtccaaaggaccgaatcaacctttttatcaagtccttgttgatgtatatgctgatccagaactccttgttgcatatgttgcagaagaaaatcttgcagaagctgaaatatcagagaaagtgagtttgagttcttcatttgcttggtggttttcatttttggtcaaattgaactaatgctgtccccgtttataaatagggaagatttgatcacccctatattgaatttctgttttttggcgaggacactgctggggacttcattcctatcaagcagcttcgtgagaagtatgatcagccacgttatgaagcttctggggatgaagatgacgatgatggcagcacggatagctgaaaggtaggcagcaagagttgttttgatgccatttccgatgccttaccaccgactgaattccgaaatgatgaaggagcttgttactatctgatgtaaccacagcgggctaatgtcagtgaagactggtgactgggctaacccggaacctgaacaatccacagcaatctgcaatgaggcaatctgcatttgatatactgatatctgaccttgcaagattcacgattgagggtgacacccatatatagtggccaatccatgaagccctttacgtatacggttctaaagaagatccttatggatttgcaatctgtacttcccctagttcttctgtaactgtgttccctctgatgggaattttgtagataagctgcattcgtcaaacctgcaactctgcagctggagaggaagcaaagggttgacgtacatctattggaaaattggaatttacttgcgtggaaaactggaaaccaaagaattctctacgctcagggaaaataagaagggaagacccc

SEQ ID NO: 38830 - DNA, 1410 bp, Oryza sativa
  Clone ID: PAT_MRT4530_42429C.1
gcccgcggcggcggcggcttcaccctcgccggccgacttcatgtccggggccttctccggcttcctcccccccggctaccccctccccctcaaccgccctcctaagcgccacgccgccggagacgaggacgacgacgacgaggaggacacggcgtcctccatcaccaccaccggaggtgaagctctcgcctcctcctccagtcccaccaccaccaccaccacagcccgacgaccaccgacgacgacatcgagatgtggggcgccggcggcaccaccgggccgccgccgccggcgatctacccacgtacgcctcacgtgcgccctccacgtccaccacgtgctccaccgtgccggagtcggggtcgtagaagccgccgccgtcgaccacccgcacctcgccgccgtcgaccaccgccacctccttctccttcccctccgtcgccgtcaccgtgagcagcagcacggccccgtcgtcgtcgtcgacgtactccacgcaccgcaccgcctcgcggacgccgccgccgccgtggaccgccgccggcaccatcctgtcctccatcagcgggaacacctcgccggcgatctccaggcactcgcgcgcgtcctcctccggtccggccggcaacctcgccagcagcagctccaccgtctccttggccttctccaccatcgccgggtacaccatcgactcgtatcccccctcgccgcagtccaccagccgctcctccgcctcctccggcgccggcctcgccgccgccaccgccgccgctagttgaagcgttgcctcctcgtcctccgccaccactcgcaccaacgccaccctaaatccccctttcttcatccgcgccagcaccaccccaaatccctcttcttcttctcctcgtcccccatcgtcgcctccctcaccgtcagcaaccccatcgacctctgtcccttggtcgccatcgcctcaccgacactcccctcgctccgcgcccaaccgtccctccgccacgtcagccaaaaccacctccaaaaccaccgaatcctccctctccatttcatccacaatggcaccgacagtctccccctcgtcggccactccacctggttgaatgcccactggagctactacgcccccgtcctctcgtgcgttgacctcctccacagaagtctccgaggcctgccgtccggccagagggcggcaaggggccgcctgcaaaatagccagccccgactggcttttttgtattcgggccccttgccgccccaccagagggcggcaagggttttcctgcaaaaaaaccctccctccgtcaccgcccgttcctcccccgccgccggcggccgccgctccaggcgtagctccaccggtcaccgccgcaggtaccctcacctgaagatccctcaaccgaagcgccgcttccgaca

SEQ ID NO: 38831 - DNA, 195 bp, Oryza sativa
  Clone ID: PAT_MRT4530_4242C.1
aagaaattgatataggaccaggtgatagaccaaggccaacatttatcagtaagaatttatctccagagttcagaactaaattgatagagcttttgaaagaatatagaaattgcttcgcttgggagtattatgagatgccaggactcagccggaatgccaccacgacataccggaaagaggccgtgataggaccct

SEQ ID NO: 38832 - DNA, 500 bp, Oryza sativa
  Clone ID: PAT_MRT4530_42430C.1
gctgaaaggtaggcagcaagagttgttttgatgccatttccgatgccttaccaccgactgagttccgaaatggtggaggagcttgacagcttgttactatctgatgtaactacagcgggctaatgtcagtgaagactggtgactgggctaacctggaacctgaacaatccacagcaatctgcaatgaggcaatctgcatttgatatattgatatctgaccttgcagattcacgattgaggataacacccatatagtggccaatccatgaagccctttacatatacggttctaaagaagatccttgtggatttgcagtctgtacttccccaagttcttctgtaactgtgttccctctgatgggaattttgtagataagctgcattcatcaaacctgcaactctgcagctgcagagaaagcaaagggttgacgtacatctattggaaagttggaatatacttacgtggaaaactgcaaaccacagaaaaaaaaaaaaaaaaa

SEQ ID NO: 38833 - DNA, 684 bp, Oryza sativa
  Clone ID: PAT_MRT4530_42431C.1
atgcagtcgctcgcggtcacaccgagctccaggaaggtgtcggccatcgcggcgacgaggccatggcgtgtgccgactaccgaggtacagggactcgaactacgcgttctggttctgcactacgacgcggagaagttcctgccgccgccgcctcggatggcccagaagaggtcctcccccatggcggccctatcgaggagcctccccctcggcgttcaccatggtggcacgacgacgaggtcggaggtgaggccatgcttccgcagcatcaggctgaagccgccgccgctgaggaacccgtcgacaccgaccgtcccactcgggccgtcgcgctgcccgcgcgtcgttcctccgctccgccgcgtggcagtcagcaacaggtggggagaagagtggcgactgacggctgcgtcatggacctacacggcaaagagcgcgaagaagcgaagtaggaagggctcccgacacgtcgtcccctcgggttacaccaccacatcgttgcgtggcagctcgccgcgcatctgcgccgcgtccgcatcatggttgcatatcagccacaccgtcgggattggcgggaggatctccaagagttgggagatggaggagaatggtggtggttgttgggcggcggcggtagatagaagcccgacgacggcgcttggcgatgggtggggagaaggctag

SEQ ID NO: 38834 - DNA, 503 bp, Oryza sativa
  Clone ID: PAT_MRT4530_42432C.1
ccgggctgaggaatcggcacgaggctctctctctctctcccagctggttcgcgcggccaccaaacacatcgcctcgactccgccgcacccccacctccagcgatctccgccgccaccgtcctgcccggtaagctctaccgcccccttcttcttcctcctcgccgatcgttctatccgatcccttccccgccccccgaatcttcatcagcgcccccagatccgcacgcctccagtgcgccaccccaagcccgcctcccgcccgcgccatcaccggtgctacggccacccccgcttccaccacggccggacagacggccggccggcagcgcccttatgtcccgccggcgtctcctcctcctcctcgtgctccaccctaatttgctactactactaggcgaccacctttcccaaaccctagcctcgccaactggctcgtcagaaaccaaaccctccctccaaccctaaccccgaatccttactcggacgggtgggagcttcatgga

SEQ ID NO: 38835 - DNA, 187 bp, Oryza sativa
  unsure (1)..(187): unsure at all n locations
  Clone ID: PAT_MRT4530_42433C.1
aagccacggcccggctttgacgcgttgcttagtgtaacgttagtgttcgtccctgttttatggtttgtcntcgtttgttctgttgntantcacgatcgcgcccacagcccactagctgggcatgacacagtttttgttaataataatataatataaagatatgggctaaaaaaaaaaaaaaaaaaaa

SEQ ID NO: 38836 - DNA, 2142 bp, Oryza sativa
  Clone ID: PAT_MRT4530_42434C.1
atgggggacatcgccggcgaagagcatcgagtccagatagcagccagagccagctccgaccggcaagacaaggtcgcggcgccggaaaaatgggtgaattgcttcgttcgcgtggtgacactgatggagaggacgagcaatgcactcggcacgctggctttcacttgggctaccgttgtcctgctaggtggctaccctgtggtgctcgactcgcatggcgatttttggttcgcgacagccatcgtattcctagaagccgcaaggatgttcggtcgcaacaatagatttgattaccaattgttcttccggacaagaggtgctttcagtttcagatcacttggcgggaacggactgatcgcgatcgtatacttttctgctgctaaggtggccattgttgttcgggaggtgcaggacggggcatttatgttgattataatcatgattcctgcagctatcgtgcgcgaagagctcgcgaggatgcgccttacgcgacatgactacatcggtgttggtgagaagacaaatcttggccaatctcttaccatcctctacagcatggtgcttggccaaggcatactttacatcgttgccggcacgctggaggtcttctcgttcatcccactgagatccctcgtttgccgtgctggatttacaggtcagtggggagttgaatctatcaatctgtactacgaatatgccttcgacaaatacatggaaggaggtgtgtttgctccaaagaggatcaacctcagcaactttgcgatagattctataaactctgacttgtccaagaatcaactgtacgggatccagatgatgcacacttttctgcaaagagatccgacaagagcacaactcctggagaaactcaccacttcaatgcagacgaaggccaggttgatcaacatgttggactggactaatggaaaccaacatacaactattagattatatgctgcgaaggtcatggccgagttcgcaaagagcctccgaattgtaactgtccctgaggcaatgcagcttgtatcaacgcttctggataccgagggaagaccaaaaagaggacacccacttctaaatgcagatgatgatcaagatccttttgttgatccaacagaagaaagactagatgcagctgacaaagtaactgacctgatccccaaaatcataggattcacaagcttcagaagtgcaatggtgaattccgtagcacaacagaagaggctcacaagcattgaaggggaaattggcatagcattgcggtacaagatatcaaaacatcccttcctgttgggaaaccttgcggagatcttgggagacaacactagcatgcaagaattaaggaagctcgtcgcaggaatcctcagaaaccttgccattgaccgagacacaaggcaggagattgggcaaatgcaggtgctcattaccaggctgatgaaggcgtccctcaattctgatggaccatctagtacagatggtgattgcttgcttccgaaggttgctgggcaagcattggcaatgctggcatcagaaaatgtgcataactgcttggttatgttgaaggaaccagaattcattaataaactaaaaaatatgatcctaatccatgatgggaaatgtatatatgtggctgcgagcctgttgcgtaatctgtacctgcatgctcaagctcaacccgacctcacagaatcaaaccaaaatgacctatctgatgcctttcaaaaggtcttggaaacaataacggatgttgaaggggcagaattagaaatcctcattggtcttagttcacagatatgcaaagtcaaacctgaagaatttgtgcaagagctagagcacggacagattaagcgaagattcgtgaagaagctagtggatgcactgaatgcgaatatgaaaccaagtgttgattaccctgggatccggaggatgatacttgagcaaaccatatatatgatggagagcagttcttgctatgccaattgtttcaatgaatttcagatgatgaatgcactgctgatggtagaagagacgccctcaagggttgagaactacatgattttcttgggtgatacaggcttcatggaatgcaacacacctctctctgctctcgtggacagagcaaaacaattgattggacattag

SEQ ID NO: 38837 - DNA, 451 bp, Oryza sativa
  unsure (1)..(451): unsure at all n locations
  Clone ID: PAT_MRT4530_42435C.1
aaagcatggaactggtccagaaggaagtactacattacaatgtttagtggaaaaatatgttcatactgatcatgtaaatagtgatacatcaaataattcttcaccaacagaaggtaatggatcagctgctcaacttgatattatcctgtgaatcataatgacttctttcattggaggcgacaaaaggtaaagtagtgagccaggctaaacaaactacttacaagttacaacatacaaactattctgtcatatcttgaaaacaaagaaagtagacaaatattcaaacctccacatccaaactcatgaagtacaaattctttgggccctcactattatganttctaccttggacctntatcattaatcatattctaacctaggacatagatttgccaaattgcaattccgacttattttatgtctgctgtatcggggctagtatgatgctcta

SEQ ID NO: 38838 - DNA, 360 bp, Oryza sativa
  Clone ID: PAT_MRT4530_42436C.1
atggggttctacccggccgcgacgacgacactgtccacggctgcgcagtgcgttcttgtcgtcggaggcattcttctcgctcgagccacagtccgccaggagcacggtcagaggccgctgcggttgccatcgggaagcggtcgtcgccagctccggttgtcgtctaacgtgcccgccgggaatcagctccggcgacggcagttacgtcgtgaagatcgtgcccgccattacgtctggggtcacggcgattctgcccacttgctcggcggcggcgccattgcaattccagacgtcttcctcgtcggcggccttgatgaaagatgcatcaaaccggcacagtgccatccatcggctagctaa

SEQ ID NO: 38839 - DNA, 217 bp, Oryza sativa
  unsure (1)..(217): unsure at all n locations
  Clone ID: PAT_MRT4530_42437C.1
ntatgatacattaaccacgaagtactggctagggtgtcacacaagtacaattacttgagtagcctggagcgctaactgacagaatgctggtcacttgagctactggaaaatcagtaaagctgtgatacgcagctactgatgaatgcaatctaaaatgtagcagctgaggtgaacatattatgaatggatgtgcatgattccttaattcggagaaaat

SEQ ID NO: 38840 - DNA, 1488 bp, Oryza sativa
  unsure (1)..(1488): unsure at all n locations
  Clone ID: PAT_MRT4530_42438C.1
ctaaaactgcgccgatcagaatagctttcattgtagggcggacttcttgaaccaccccaatttccatcagatctcctgttttcactaaactcatccttatcatcctntcccctcggtggccgatctgcacttctttctcctgtgtatctccgttccacataaacatgcttaataaagttcctcaatttatccgcattactgctgtcagggaaagaattgcggtgagcatcccattccttgaagaatatttctctagcacgctcatttcctccttcttgaagggcactaacttcctgtgcagtaaatttagccatagaaactgacttcgctcgatgcgtgaactctcggtgtgctccactgcaattggtacaaatgaaggtccagaaatttgtacagacatattgtggtcccaaagtgttgcagttgatgcacctcttgttggcgggcagcttgagcagcccgcgtatgatcaactagtcctctcgtcctccttgagcctgctcgccatcgccgcccggatccccggccgccgctgccgccgccacaaaccctgccgacgcgcctcctcctccgatggcggcgctcgcgcgagatctcgcagcggaagacgaggtggcggcgagcggcgacgcgaaggcttcgcctctttcgttcgctggctgcttcgctgcgcgtaaggcgaaggttaggcagccggtcaaccgagagagcggtgaccggcggcagccggtgggttggtggggcctgggagaatacaagaaatgggaggtgaagtctcagatatcttctgagaagaagaagtcatatgagagctccaaggctgaggatcataagggaaagggttatgagaagtccaacacggagaagaaggggaaaggcaaggagaacaagagttctgagaaggggaaggggaagacaattgacgcttgcgagcatggcgacggacatggaggtggacgagatgcgccggtgccggcgatcgtcgggaggaagaggtgcgcggcggaggaccggaggatggagtcggatttgcggcaggaggcggagctccgtgcgaaggcgctcaaggacaacacgtggggggagatggtggcctgcgacgacccctggctgaaggagatcttgcggaggaggtgcgtgaacgcaatgcggacgagggccctccacgcccagatcaccaggctcatcgacgacatggatcgccgccatcgcaagttcttcctcacggggaacgaacaggcctttgtggcgagtcttcggaatgtccgatggcccctaaagttccgacccagcctcaccgagaagtacgacggcggcgtcaacccctccgagtccctccagatctgcacgacgatcatagaggcggcggggggtgatgaccagatcatggggagcttcttccccatgaccctcaggggccaagcgcggggttggctcatgaacctgctgcctgcctcggtctactcttgggaggactcttgcagttga

SEQ ID NO: 38841 - DNA, 549 bp, Oryza sativa
  Clone ID: PAT_MRT4530_42439C.1
atggccgtcatgagaccaggcaaccgcacacggccctcctgcggaggcggccttggccaaggcgggtgcggcattgcctacggtgcgaaggccggcgtggcggagccaacggaggccggcgccggtgaccggaggcggcgaagccacgcgcgaccggcggcgcacgcggccggcggaggcggcgaagccggccgcgcggggccgctgacgcgacgaagccgcatacggccggcggaagcgcaaagtggccgcggctcgagccgctcgtggccggtggaggcggcggatgcgcacgcggcatcgctatacgttagccggcggaggagtccgagccgtgcgtcaggtgcggagctgcgcgtggccgcggaggcgacggaccgcacgcggtcgcgacgtcgactcggcggggtcgcgggcagccagtggagggtgtcggagactcggagccgcacgcgaccggcggagtcgcgcgtggcctcggaggtgatggagcctcgcgacgctccacgcattgccggaggaggcggcggagccgcggctcggcactga

SEQ ID NO: 38842 - DNA, 469 bp, Oryza sativa
  unsure (1)..(469): unsure at all n locations
  Clone ID: PAT_MRT4530_4243C.1
ctgtctctttagcctgggaaagaagagaagctgaatgccgcatgttttcctnagtcatgtggtctctctggatatggttgtaattactaaatgcatgatttgctgaaacacttcacaagtaagcatgtctggtttgctgtatccctttatttgtaccttctagcttgtcctgacttacatgccgaattgtcagtgcaaatagtagagcagtttccatcatattcatgatccaaatcgtttcatatggatcaatgttatttcatatggagtacttgttttcaatgttagcatgccagggtgaactggcatattctgaaacaaccatgtaatagtttttactgttctcaacattgtgtagaacctacaatgttcatttgtatgatatattttcttcttgataaaaaaaaaaaaaaaaaaaaaaaaaaaaaaaaaaaaaaaaaaaaaaaaaaaaaaaaactcgagggggggc

SEQ ID NO: 38843 - DNA, 294 bp, Oryza sativa
  Clone ID: PAT_MRT4530_42440C.1
cgccaccacgacacacaaacgggcggggccgacgacggaaacgcccgtgacagacactaccgcgccggcgctgcgaaaaggcgacataacgcggaaaaagcagacaccgggccggcgcaaaacacggaaaaaagcgccacagcccgcgcggggaaaaaaaccacggatccgggagcgaaaaaacgcgggggcggatacggccaagccacaacgaaggccaacgcaaccgcgcagggaggcccacagtcacgccagaaccgcaaagacgcgacaagaacacggaccgcgcgataa

SEQ ID NO: 38844 - DNA, 495 bp, Oryza sativa
  Clone ID: PAT_MRT4530_42441C.1
ggtaaacaacaaaacttcacattggtgctattatcactttaccgatttgaaacatgttgttcatcagtttacaaatgtatcccttctatgcatgttaattcaaaaaaacttaaggggggttacatcagtattcagtagtagtttttttgccgcggcttaatatttctttgcctgtagtaagggtagttaactaaactaaacaaggctgttctcatgacaaaagaaattctagtaactgcctcctgaaattgacaagggccaggacgagctgtataaacacaagaggaaagttaatgaaggaaactgaagctccagtgcacatcatcctcctgtgaactgttagattttcggaaatgtcatcgctttgcccccagtatgtcctatgttgtataaactgctggatttgaggttagctccctgttggtcagaaacaaaacccaataaaccacaactggctgactactggaaccatctacctaatctgaactcgaacgg

SEQ ID NO: 38845 - DNA, 513 bp, Oryza sativa
  unsure (1)..(513): unsure at all n locations
  Clone ID: PAT_MRT4530_42442C.1
aaaaactaagaaaaccccccaagggggggggaaataaaccgggcttggccaaattaaagcccgcggggatttcggggccggctaaatataaggggacgggccccatttgggaagggggggaaaaacccctacgggcctaatggggcccccggccccccacaatataaatgggggaccaaacaaattttaaccaaaactctgggtttaaaataataaaaggaaagcgggggggctggggaacgggagcggggggagggacaagagcatttcgggggcaccataggggggcttccggggcttggccttggaagggggaagcggcacgtccaaaaaggccggaatccgtttaagctccaaatcctgggggaactggatccttggcctttcaatttcctcggggggccttggttaagggaattccaggggctggaacatttgggaaaaggtttggacggccctggttggttcccggaaccctcggggggggggggctccctttttnctggggggggg

SEQ ID NO: 38846 - DNA, 513 bp, Oryza sativa
  Clone ID: PAT_MRT4530_42443C.1
atgggtgaggattccgtggctcgacaccgcccccactcctgctctccggaaacctcaccgccgccgccgccgcgatcgcctgctgatgacgacgatctcctctccgagatcctcctccgcctcccaccgcagccgtcgtccctcctccgcgcctccctcgtctgcaagcgctggcgccgcctcgtcgccggcccggtcttcctccgccgcttccgcgcccaccaccaccggagccccccgctgctcggcttcttcatcgacgactacggcgacgccctgttcactcccacgcttgatccacccaaccgcatcaccgccgagcgcctctctctcaggcagggccccggcgagcggttgtccttcctcggctgccgccacgccctcgccctcctcctcaaccggccgcggctcgaggccctcgtgtgggaccccgtcaccggccgccgccgcgccgtggcgttcccaccggaattcgccatcaaccaaggtgatttcgtccgcggcggccgatga

SEQ ID NO: 38847 - DNA, 690 bp, Oryza sativa
  Clone ID: PAT_MRT4530_42444C.1
atggagaggagcggagaaggcgacgcgggcagaggagacggacggcgactgaggagcggacaaggcggcgacgcgagcgatacggacagcgacgaagagcagatgtggcatggacatggtgcatggggagaggaacatagggacagtaaggatggcaaggggtggatcggatatcaaggaggcatgaacgtctatgaacaaaggcggtggctggcaacacgtcaagatggcgaactgcggcatgcttcacgttgtcaattgactgagcacatggcagaggtggggagagaggtgttgaaggagatggccgaagggaaaaggaaaggagggccaacctcccgtggaggcaatggcagtgacacgccacccgagtgcgaccgctctccagagaccacatctagtgagggcaagctcagggtggccggatccagcgagctttcatccatatctgaagtgaagggcagctcaccatcctcactgcctccgtggcccctctcttcggtggagaggggagcttgctgtcctcgctcccatcatgacccctctcgtcaacggatgggaggagagggtgcacagggaggagaggaggcgggaacaagtggcggtggtgatctgaagaaggggatcggtggagaaggctgggccaagccagatgtaaacgatattgaagatcaagagccaaaatgctag

SEQ ID NO: 38848 - DNA, 437 bp, Oryza sativa
  Clone ID: PAT_MRT4530_42445C.1
aacttgaccagcgctcaagtttaaaagcggacaagactaatcaggtggcgtattatttgaacagcactctgatgtgtgccaaagactgaaacggtattctcaaagcacaagtgacagagactgatgcccgatacatcttacacaccggcgaacggatgcaccacatgaactagaatatagcatcaagaacctatctggttaagcggcactgcttcacaggttgacccctcaaaaactacaagctcactcggcataaagtaaggatctagatagcctgataagggtcgaccatgatgaacaccagggtggctgtattacgaacgctgacatgcaccgacagttgactgcaaacagtggcgaggctgcacaacttgatgggcacttagtacggatgtcggaggctccatgccctcagaatcgcgatgtggagaaccaca

SEQ ID NO: 38849 - DNA, 255 bp, Oryza sativa
  Clone ID: PAT_MRT4530_42446C.1
atggtgaagatgatagtatggcaagcttcaaaagatagagccgaggagcgatcccagtcggggcctccgctatggaggttgaagctaccatggccaaaccaacaaatcaaagctgccctttgcagatccgacagcgacactgaagaaaaagaatgccgctcttgtggagtggttgctgcgagaaagttgaacaaccaacacaacctctttgcaagagaaactgttgaacttcgagctgtatacgcagaaaagtag

SEQ ID NO: 38850 - DNA, 1509 bp, Oryza sativa
  Clone ID: PAT_MRT4530_42447C.1
cgggctgcctacttctccccatctctctcgctccgcttctgtgtttccggcggaggcacggccacccccacccttctcccccacctcgcctcgcctcgcctcctcctcgggctcgccgccggcgagcagggcaccgtggggggacacggcgtcgacgggcctcctctcctccctgaccccgccctctagccttctcccccttgcgtgcggccttctcgcacgcgcgcgcgggtaccacgagcatcccggtgatcgaaaaatcgaaatcgaagccaccgccgcgtccgtttcttcactctccgtctttccaagcagcatgacgagaggcgagaaggggatgcagcccaagatcagtgcgttcttcaagcgtcaggcccccgagcccgagacgagcagtggcggtgacacgcatagggaaggaacctgcgggacggaggtgaagaggcccaagagctgtgcggatggcaaggtcctcaacaagaagaggaactacgcgcagttccacctggagcttgggcagcccgattttctcctccacatgtgctcggtttgtggcatgatgtatgcccgcgggaacgacgacgatgagaaggctcacaaggcataccacaagagttacttcgagggcgtcccgttcaagggttggcgcaatgaaaccgtggtcgcgaggtctgaaggtggggatcggataattcttgtgaccgatgaaaattcatgtgctcggaacagcaaggtccaggaggtgatcaaagtggtacagaaggagctggggtttggtgaaggtcagctccttcacaagctttgtaaggtatatttgttcatatctagtcagaggatagtgggatgccttgttgtggaaccaatcaaaacagcacataaagtgattccaggctccacagaggaaaacggcagtgatctgcctgttgataaaattgaaccagtcaaaacaaaccatacattagagttcgggaaaatcagttttaagagggaagtcctgaaacggcatgatcattcagacaagaacaaagaagagtaccgagatcctggtgctataatatgtgaaaaggaagatgttcctgcacattgtggatttcgagcaatttgggttgtaccgtcacgcagaagaaagcgaatagggtcacaactgatggatgctgctagaaaaagcttccttgaaggcgagactttgtgcatctcacagtgcgctttctcaccgcctacttcctccgggaaggcgctggcacgcagctattgcaagaccagcgcattcttagtctacaaggagcaagatgcataggagatgctgcagaagatgttacatatctgaaacttctcttcccattgtaaaaattgttttgctggggatatatgtgaaacataaacaggcatgttctgtttttagtgtaagtctaagcaccagaagcagtgcgtttttgcaggatctctatgtattgacacttggatttcctgatcagcagcattttctgaatatcatttcatattaaaaaa

SEQ ID NO: 38851 - DNA, 897 bp, Oryza sativa
  Clone ID: PAT_MRT4530_42448C.1
atgacgagaggcgagaaggggatgcagcccaagatcagtgcgttcttcaagcgtcaggcccccgagcccgagacgagcaggttcttcatcttggtcccctcttcaaatctgttagctgtagcgatccgtggcggtgacacgcatagggaaggaacctgcgggacggaggtgaagaggcccaagagctgtgcggatggcaaggtcctcaacaagaagaggaactacgcgcagttccacctggagcttgggcagcccgattttctcctccacatgtgctcggtttgtggcatgatgtatgcccgcgggaacgacgacgatgagaaggctcacaaggcataccacaagagttacttcgagggtgtcccgttcaagggttggcgcaatgaaaccgtggtcgcgaggtctgaaggtggggatcggataattcttgtgactgatgaaaattcatgtgctcggaacagcaaggtccaggaggtgatcaaagtggtacagaaggagctggggtttggtgaaggtcagctccttcacaagctttgtaaggtatatttgttcatatctagtcagaggatagtgggatgccttgttgtggaaccaatcaaaacagcacataaagtgattccaggctccacagaggaaaacggcagtgatctgcctgttgataaaattgaaccagtcaaaacaaaccatacattagcgttcgggaaaatcagttttaagagggaagtcctgaaacggcatgatcattcagacaagaacaaagaagagtaccgagatcctggtgctataatatgtgaaaaggaagatgttcctgcacattgtggatttcgagcaatttgggttgtaccgtcacgcagaagaaagcgaatagggtcacaactgatggatgctgctaggtaa

SEQ ID NO: 38852 - DNA, 344 bp, Oryza sativa
  Clone ID: PAT_MRT4530_42449C.1
ggaattcggcacgaggtggctgtttccttccattgttagtgtggggggatagttcctttttctaactgttctgtttcagaaggaaagcttcattttcttttcaaataccccatgtcctatgatgggtttttcatagctataatcgtttgtgtataatctttgccaacctcttcaatcacaatatgcagacagaatttctggtgttctgcatattgcttgcgattgtttccgcgggatatcaggactacgctaatatttaactttagaagttaattattttagtaaaactcacttagctgtcatctcctttgaacttccacttcaattcagattttagagcccat

SEQ ID NO: 38853 - DNA, 525 bp, Oryza sativa
  Clone ID: PAT_MRT4530_4244C.1
atcgacatggcggtgatcaggggtgtcgtggtggtggtgctcgcgctggtggtggtggcggcggcggcggcggacggtgcaggggagtgcggggcgacgccgccggacaagatggcgctgaagctggcgccgtgcgcgtcggcggccaaggaccccaagtcgacgccgtcgagcgggtgctgcacggcggtgcacaccatcgggaagcagagccccaagtgcctctgcgccgtcatgctgtccagcacgaccaggaacgccgggatcaagcccgaggtcgccatcaccatccccaagcgctgcaacatcgccgaccgccccgtcggctacaagtgcggaggtaagctgagatcgggagcagcaaagaaaacggtgttagtcattaacgcatgcctactaggtacgttcacacgtgtgatccttgttatgagccaacgatcgctccaattgacaacgtcggatgtgcgccacatgcacaatgagccaatgattttacccgaatcacaatattgaacatacacaaca

SEQ ID NO: 38854 - DNA, 272 bp, Oryza sativa
  Clone ID: PAT_MRT4530_42450C.1
atggatgacctcacccgagttccccatcagaagcaaaccctcacctacttctccccatctctctcgctccgcttctgtgtttccggcggaggcacggccacccccacccttctcccccacctcgcctcgcctcgcctcctcctcgggctcgccgccggcgagcagggcaccgtggggggacacggcgtcgacgggcctcatctcctccctgaccccgccactctagccttctcccccttggcgtgcggccttactcgcacggcggcgcgcgg

SEQ ID NO: 38855 - DNA, 437 bp, Oryza sativa
  Clone ID: PAT_MRT4530_42451C.1
ggggaaaacccccaatgggccggccccaacaaacccaagcggggggggaaaggggagacccccccggcacctttaccggggttttcccgccccaattttaccccccccggggccccccccaactttggacccggggcttaacgaacgaaccccaaatggggtggagagaaagaccccccctacccctgtcccgaaaagggggaaccggggggaaaacccccccccccatgggatcccccccccccgggggccggcaccccccagggcccccctttttggggggggggggggggacccccccagcccccccctttttggggggaagggggaccccaaggatggcccgggcccctaagggggaaagctttgatgggcaaaaagcccccccgggtcaccccccggctcagcttaagccccggggggggccccggggcccc

SEQ ID NO: 38856 - DNA, 744 bp, Oryza sativa
  Clone ID: PAT_MRT4530_42452C.1
atggtgtttgcgacggcgaacgcggctcgacggggcagaattgcgtcggccgagtggtggtgcctggcggcgaacttgatgccgaggcgagcgcgccgggaaggagcaggaggaagacggcgacgagacggctgcagctccgaggttgacgaggccgacactgaggcgcacgtggccatagacacagtgcaacagcgggaaggaaggggctcgggatgggattttataggcgaggaggcgcttgactggcgctcggctagcgagcggcaatggcggttcgtgggtaacctgaaatcgagcgacggcgtggatgcgtttggatggcgaggtcggtggatcgggcggcatgaattgaatcgtgagtgcgggaggggcagctcggctagttcaaggtggggcgcgacgagctggcggctggcatcagcggcgtcagggcactctgcctccaagagcaaggagacaaaggtgggagagagaaaccaatgtccaggagggaaaaagaaatggaggacggtggaaaggggagcttgctccttccgttttggggaggtgcggcaggcgaggcgcgtgggagcggtatggggcacgcgacgcaggcggcgcaggcgcgacatggcagcttccaatagtaccacgtgtccacgtctgatacccatgagtatcagatctgatacccagttactaggtttgaatattgggttgaataccgaggtaccgagtatgatacctatgaatagcagatga

SEQ ID NO: 38857 - DNA, 180 bp, Oryza sativa
  Clone ID: PAT_MRT4530_42453C.1
aaaattaaatagcatgtagccggactaatagccacccaaacaaggttagtgacacacataattgatcaagcggggacgaaaagctagagtcgagtgtaacccacatgaccacagtgtaagcatgtatcacacaacagcaacgacggagtatgtgacgaagctgatgactgatgatacgta

SEQ ID NO: 38858 - DNA, 212 bp, Oryza sativa
  unsure (1)..(212): unsure at all n locations
  Clone ID: PAT_MRT4530_42454C.1
cttgggatcgcacgcggcgcggaagaggtagggtggttgctagtgaggagggaggtggttggaggaggatgagcgaggggaggccggcgccgaggagggagagnnnatggggcttgncggagggggacaagcgggagnnnaagggcgaccgctgnancgancgcgncgaggacgnngtnnaggcttgcttngaggggaatnncnnnaagaca

SEQ ID NO: 38859 - DNA, 1614 bp, Oryza sativa
  Clone ID: PAT_MRT4530_42455C.1
atggcggccgcctcgtccgcacccttctttgggctcggcgacacgcagatgccgccgccgcagaatcccaccaatccagcccttcaccaccaccccaaccccttccccgctcccgtcgacgccgccgcgcccgcgccgaaaaagaagaggaaccagcctggaaacccaagcaagtatccagatgcgaaggtgatagcgctgtcgccgcggacgctgatggcgaccaacaggttcgtgtgcgaggtgtgcaacaaggggttccagcgggagcagaacctgcagctgcaccggggagggcacaacctgccgtggaagctgaagcagaagaaccccaaggaggctcgccggcgcgtgtacctgtgcccgaagccgtcgtgcgtccaccacgacccgtcgcgggccctcggcgacctcaccgggatcaagaagcactactgccgcaagcacggcgagaagaagtggcgctgcgacaagtgctccaagcgctacgccgtgcagtccgactggaaggcccactccaagacctgcggcacccgcgagtaccgctgcgactgcggcaccctcttctccaggagggacagcttcatcacccaccgcgccttctgcgacgcgctggcgcaggagaacgcgcgcatgccgcccatcggcgccggcgtatacggcggcgccggcaacatgacacttgggctcaccggcatggccgccccgcaacttcccgccggcttccctgatcaggccggccagccgtcggcgtcggccggcgatgtcctccgcctcggcggcggcagcaatggcgcctctcagtttgatcacctcatggcctcgtcgtcgggctcctccatgttccgctcgcagggatcgtcgtcctcctcgttctacctcgccaatggcgccgcccatcatgctcccgctcaggacttcggcccggaggacggccagtctcaggccggccagggctcgctgctccacggcaagccggcggcgttccatgacctgatgcagctccccgtgcagcaccagcaaagcggcaatggtaacctcctcaaccttggcttcttctccggcagcaatggcggcgtcgaccagttcaacggcggcgctggaaacggcgggcagggcagcatcgttacttctagcggcctcgccggcaaccacggcggcggcggcggcggcttcccttctctgtacaactcgtccgaaccggccggtacactgccgcagatgtcggcgacggcgctcttgcagaaggctgcccagatgggtgcaacgacgagcagctacaacgccggcggcgccggtggcgcgagctcgctgctccgtggagctagctcccacgggatcagcgtcggtgaagggccggccaacgagaggtcgtcgtaccagaatctcatcatgggctccatggcgagcggcggcggtggcgcgggtttcgccggtagcttctccggcgcgtctggattcggtggcgccgtcgacgacggcaagctgagcacgagggacttcctcggcgtcggcgtcgtccagggcatcagcggctcggcggcaatggggccgccgcgccatggcgcggccggcctccacgtcggctcactggacccggcaaacatgaactga

SEQ ID NO: 38860 - DNA, 1198 bp, Oryza sativa
  Clone ID: PAT_MRT4530_42456C.1
gtgggcccggcgaccccacccgtcaggccctcctcctaccttcggcttcccaggccgaagccgccatggccggcggttgccgcccacgtcctgccaaatccggcgccctcccgctcgcgccctcgcgcccaaaccgagtaaaatcggttccccaccacctcctccacctcttcccccacttttccccaattttcggcgccgtttcatgccccatcttcccacgatgcctccccactttgccggccgttcccgcctctcccggccacgatctccatccccgagcccaatataaagcaccctcaccacatcctccccggagcccacgcgccgccgctccccgccgaactccagccacgctgcgccaccgctgccgttcaccccggactgggccgtcaccctccccgacaccgcagccgccgtgcgcgccccgtccaccgctccatttcccctctccaccttcgaagcgccgcagccacgcgcaccacctctctccgccgccgccaccggctccagccgccgcttctcgccgcttcagccaccgccgtgccgtgccgtcgccaccgtcggcatcgccgcgccgagctccaccccgtcctacacctcttttccccaatctcgcaccgaaattccacctccactgtccacccgagccgcctcaactataccgcctccagccgccacctctcgccgctctagccgtcgccgcgcagcgtaaccccacgggagccgcttttccaaagtcaaggtcttgtcggccctcggccgtggcttcgttgtggtcgggcgtcgtcggaacgccgttcccgccgcctcccgcgccagccaccgccatcctttccgccgccggtcgcctccctatggttgtctcgccgccgcagccctcggtaagctctccctccgcctcctcctttttcccctcctccgccgctccgcgtgcccgctgccgcgacgcgctgccgtcgccgacggtcgtctggccgcgcgccgccgcgcgccgtcgttcgaccgggtcggctttgtgccgtgcccgtgtcctggctgtgccgcctcgtggccgcccgatcggctttgggccgatccgggctgtcggttcccgtggaccggcggtagaccgcctcggtggtcccggtccacggtggaccgacgcccttgtgtcgctgaccggtggcgcccgcatgtcggcgccggccgcccctta

SEQ ID NO: 38861 - DNA, 461 bp, Oryza sativa
  unsure (1)..(461): unsure at all n locations
  Clone ID: PAT_MRT4530_42457C.1
cccacccgttgggtctgatcccagaagcccagtggcaggcgcttagcattttgcatacgattcgtcagatcgagatctactttangagggaagtggatgaagtgaaagagttgatcgagactgggagggagtatgtgactggcctgaggatggaactcaagaggacggagtcgagagatgatgtcgaccgcatacaagaatctggctgcttatatcactaactgtacgctccagacagcacatatgatgcttgtgcttgtaagcgctatggctgttggctacatggatacgatcttgcgatgctgcacagcactgtgcacggatgctcatcgaggacaaccctaatgaggcccacgcgaggaaggctcgacaggagcagcaacgatgctatgtcgagaatgatagctcagagctgaactattactacagaaatccatttgttgaatgtggcgccacatatg

SEQ ID NO: 38862 - DNA, 1952 bp, Oryza sativa
  Clone ID: PAT_MRT4530_42458C.1
atggcggggtacgagagggagaagaagcggctgctcgacctggccgctgactccggcttcgagcgcgacctcgccgccgactgcctcgacaggatcgtccgcctctacggagagggcggacaaggttttattaccgtggagaactgtggagacgatttccttggcgcattggctgatgcaacaaacaataatgatgattgggatgatctcaatgctatagagaatgaagcttgtggcaatttgaatggcatgatgaagcacggtgtaattgatgataaagaagttgaggtgagaactcctttgttcagacaggcagaatcctctgctcgacagactcgcatcaatctggactccttcgggttctcctcagatgatgactttgaaacgttggagtcccattgtgatcgttcagtcagtacccagaagaaggtgaacagaggaaacaatagatgtgagtcatccacttcaacttcaaacagagaaactctaagttatcagcagctgtatagcctagatgacatcaattttgcaaacgttgtcatctttggcaacaaaagctttaggcccctgcagtatgaggcctgtagggctgcagtaagcaacatggacacctttgtgcttatgccaacaggtggtgggaagagcttgtgttatcagctacctgcaacactgcacccaggtgttacggttgttgtatgccctctactgtcacttattgaggatcaaattgtggcattaaacttcaagtttgctataccagcagcatttttgaactctcagcagacaccttcacagtcatctgcagtaatccaagagcttagaagtggtaaaccgtcattcaaactcctctacgtcactcctgaaagaatggctggaaacagctcatttattgggatcctcataggtttacaccagaggggtttactggcgagatttgtgattgatgaagcccattgtgtaagtcaatggggacatgacttccgcccagattaccgaggcctgggatgcctcaaacagaacttccctcgagtaccaattatggctttaacagctacagcgactgcatctgtctgcaaggacatactaagtaccttgaggatccctaatgcaacggtactcaagaggagctttgacagaacaaacctgaattatgaggtgattggcaagacaaaaactccacagaagcagctgggtgatctcctaaaagagcgtttcatgaacatgtctggtatcgtgtactgtctgtccaaaaatgaatgtgctgacactgccaagttcttgagggagaagtacaagataaaatgcgcacattaccacgctggcttggctgctcgtcaacgatccaatgtacaaggaaaatggcacagcggagaggtcaaagtcatttgtgcgaccatagcatttggcatgggaatagacaaacctgatgtgcgctttgttatccacaacaccatgtcaaaatcgatagaaagctactatcaggagtcagggagagcaggaagagacaatcttccggcacattgcattgtgttatatcagaaaaaggacctcggtcgaattgtatgcatgctgaggaattcagggaacttcaagagtgagagcttcaaggttgcaatggagcaagcaaagaaaatgcaaacatattgcgagctgaagacagaatgccggaggcaaactcttcttggccacttcggtgagcagtatgacaggcaaaggtgcaaacatggttgtagcccttgcgacaactgcataaagattccctcttgagagaacctcttccaaacctactgctgtgtgctgacatctatggtcttggtagaaggtcacttcctgagagccattcttacttatgatttggccttagcaccggaagtactgcctgaatgaaagcaaatgctgtccttgttgtaagatgcttgacatttttatcctgcagacattgcgcacgagag

SEQ ID NO: 38863 - DNA, 832 bp, Oryza sativa
  Clone ID: PAT_MRT4530_42459C.1
atggcggcggctgggatgggaggcgacgggaacaacgttccgacgacgcccggccacaacggagccgcggccgagggccggcaagaccttgactttggaaaagcggctcccgtggggttctggacggagtggagtggcagccagggtgcggtggagcgcggcgacgctgcgcgacgacggctagagcggcgagaggcggcggctggaggcggtatagttgaggtggctcgggtggacagcggaggtggaattttggtgggagatttggggaaaagaggtgtaggacggggtggagctcggcgcggcgatgccgacggtggcgacggcacggcacggcggtggctgaagctgcgagaagaggcggctggagccggcggcggcggcggaaaggggtggtgcgcgtggctgcggcgcttcgaaggtggagaggggaaatggagcggtggacggggtgcgcacggcggctgcgatgccggggagggcgacggcgcagtgcggggtgaacgagagcggcggcgcggcgcggctggagttcgccgaggagcggcggagctggggcgcgcgcggggagagcgggaaaaggcgccgcgggctcggggaggagggggaaacgggagaggaagccccggggatgctctttataggggaggggaggcgggatcgagcccgagaggggtggaaattggccggcgacgtgggaggagagagaggtgcgggaggcggcgacgtggcgatgaccgcgtccacgcacgcgcaggagagggagtcccgcgggagaggcggcgacgtgggaggatttggcggccatggcggcggttggggatggagctag

SEQ ID NO: 38864 - DNA, 1359 bp, Oryza sativa
  Clone ID: PAT_MRT4530_4245C.1
atgacgttgggatggttggtggtggcggtgttcaactgctgcgtcgccctgtccatggccgagatctgctcggcgtacccgacttccggcgggctatactactggagcgccaagctggccggcaaacaatgggcttccttggcttcctgggtcactggctggttcaacgttgtgggacagtgggcagctattgcaagcgtagatttctcgttggcgcagctgctacaagtgatcatcttgcttagcacaggaggaggcaatggcggcggttacatggcttccaagtacaccgtgctggcgatttatgccttcatcctaatcttgcatggcatcatcaacagcctccctatcgagtggctatctctgtttggccatgtcggagccatctggaatgctgcaggtatctttgtgctgacgatcttgattccagcagtagcaaaggacaggccaaatattgagttcgtgtttacccatctcaacacggaaaacggcatggggatccatgacaaggcttacatcctagccgtgggcttgctgatgagccagtactctgttatcggctacgatacatctgctcacatggttgaggagacaaagaatgcagaccggagcggcccaattgggatcatcacctcggttcttttcgcgacggtgtttggttggatttacctgttggctctgacatctgtcgtgacggacatcccgtacctgctcagccccagcaacgacgccggcggctacgccatcgcgcaggctctgtacaccgccttccaccggagatacggcagcggagttggagggatcgtctgcttgggagccgtcgccgtcgccgtcttcctctgcggcatcgcgtgcgtcaccagcaattcgaggatggcgtacgccttctccagagacggggcgatgccgttgtcgcgcgtgtggtaccgggtgaacaagcacgaggtgcccctcaacgtcgtctggctcggcgtcgccgtggcgttcgtcatggctctcacgtcgctggggagccaggtggcgttccaggcgatgggttcgatcgcgacgctggggatgtacatcgcgtacgcgctgcccgtgttcttccgcgtgacgacggctcggagatcgttcgtgccagggccgttccacctcgggcgatacggggtcgtcgtcggctgggcgggtgtggtgtgggtggccaccgtcacggtgctcttctcgctgccggtggcgtacccggtggccaacaaggagacattcaactacactccggtggccgtcggcggcgtgttattgctcagtgttggtgcgtgggtgctacgtgcccgcttctggttccaagggcccatcacgaatgttgacacgcattgttga

SEQ ID NO: 38865 - DNA, 1307 bp, Oryza sativa
  Clone ID: PAT_MRT4530_42460C.1
atgtgggccccatcggtcagcgacacaagggcgtcggtccaccgtggaccgggaccaccgaggtggtccaccgccggtccacgggaaccgacggcccggatcggcccaaagccgatcgggcggccacgaggcggcgcagccgggacacgggcacgacacaaagccgacccgatcgaacgacggcgcgtggcggcgtgcggccagacgaccgccggcgacggcagcgcgtcgcgacagcgggcacgcggagcggcggaggaggggaaaaaggaggaggcggagggagagctcaccgagggctgcggcggcgagacaaccacagggaggcgaccggcggcggaaaggatggcggcggccggcgcgggaggcgacgggaacggcgttccgacgacgcccgaccacaacgaagccgcggccgagggccggcaagaccttgattttggaaaagcggctcccgtgaggttctggacggagtggagcggcagccagggtgcggtggagcgcggcgacgctgcgcggcgacggctagagcggcgagaggtggcggctggaggtggtatagttgaggcggctcgggtggacagtggaggtggaatttcggtgcgagattggggaaaagagatgtagaacggggtggagctcaggccggcgatgccgacggtggcgacggcacggcacggcggtggttgaagcggcgagaagcggcggctggagccggcggcagcggcggagaaaggtggtgcgcgtggctgtggcgcttcgaaggtggagaggggaaatggagcggtggacggggtgcgcacggcggctgcggtgccggggagggcgacggcgcagtgcggggtgaacgggagcggtggcgcggtgcggctggagttcgccggggagcggcggcgcgtggactccagggaggatgtggtttcgtgcacggggaagctcggggaggaggaggaaacggaagaggagagcacgagggtgctttatataaggctcggggatggagatcgtggctgggagaggcgggaacagccggcgaagtgtggcgccgacgtggggtggtggaggagttaaccggcgccgattttcacggggagagtgggggaaaaggtggaggaggtggtagggaaccgattttactcggtttgggagcgagggtgccagcgggaaggcgccggattcgacgggacgtgggcggcaaccgtcggccatggcggcttcggcctgggaagccggaggtaggaggagggcctgacaggtggggtcgccgggcccacctgtcggggagggagagagggaggagaacctag

SEQ ID NO: 38866 - DNA, 220 bp, Oryza sativa
  Clone ID: PAT_MRT4530_42461C.1
gaaaaggatagttttttaaataaagggtttttattttaagggttggcacacaaagggttgcaacaccttataacgagagaacatgtaaccagggttggatcaacaccacccacaggaaaaaagtggaaaggtgacaggggccatgttgcacatggagggcatcggcaatgccaggttaatgatttgcggctgcccacgaacccttgggcgaacgcatggg

SEQ ID NO: 38867 - DNA, 328 bp, Oryza sativa
  Clone ID: PAT_MRT4530_42462C.1
gtttgtcgttgtgatggatagacatggtgctgctagtttttcttcggtaattggagcagttttctgtggacaagatgatgctttgtcacaatttttgagcacttgcagttgctatgtattctgatgaaaaaaaaaaaaaaaaaaaaaaaaaaaaaaaaaaaaaaaaaaaaaaaaaaaaaaaaaaaaaaaaccaaaaaaaaaaaaaaaaaaaaaaaaagggcggccgttttaaaaaaacaaaacttaacgaacccgtgcatgcaaaagaaaaagcttttttaaagggaaaccaaaattaaattacctgcccgccgtttaaaaaaataaa

SEQ ID NO: 38868 - DNA, 144 bp, Oryza sativa
  Clone ID: PAT_MRT4530_42463C.1
atggcagcggaggagaggtttgtggcaggagtgggcgagggggcgacggtggcgaggctaacccggtcggcgaggggcacaagtggcaacagcagaaggccacaggacatggctggtagcagtaggaggacttgcgacacgtag

SEQ ID NO: 38869 - DNA, 536 bp, Oryza sativa
  Clone ID: PAT_MRT4530_42464C.1
cggccgcgtgggcggccgcgtgggcgggggtggaggcggcaaggtggggctgctggcgttggatgttgcactcgcgttcccgcaggccacgacgtcccagttcccgcccgccgtcggcctttgttgattcgtagttatcttcagtcttgggcagcttaatctggctccaagttggcagcggggggtgggtgttctgaaaactgctctcttacttaagtttgctgaagggatactccttacatcgaagttcattagctacacttctttggttagaaattgctctgttgctgttcaatatgtaccagcaaaataaatatgagaaatcactctagtgcttctaatagggagtcatctttcagcttctattaaacacggaacatttaagaattaccttccatcgtcgtataaatgtagtaaacgcagatgtgtcatgcccaacagggaattgagtagcgtcaagcgggagattgagtatccacaccaattattaggtgtatatatgagtcttgtttgtattttcagtttttttatatagg

SEQ ID NO: 38870 - DNA, 992 bp, Oryza sativa
  Clone ID: PAT_MRT4530_42465C.1
gccataacttagccgccaaagtcctgacactcggggaaggttacgtgaccacagtaaaataaccaagtaccgggccgctttagtgtcctggtaaattggaaatgacgctaccacatctctagaattccccttaaccgaggatcccacttggacgggccaagctcctggttgcccaccgccagcccgccggtaatctcccaagcgctccccacaataagcgcgatactaagtttaagttgtttgccagttaaaaacgctcgttagttggacccttgggcccggcgccgcgccggtccgccctcaccggccgagcacccgaccctgcctcgacccttctgcccggccgatgcgctcctggccttaacctggcccgggctcgtgcctccggcgccgttacttgtgagagaaattagagtgctcaaagcaagccatcagctctggatacacttagcatgggataacatcataggattccggctcctattgtgttggccttcgggatcggagtaatgattaatagggacagtcgggggcattcgtatttcatagtcagaggtgaaattcttggatttatgaaagacgaacaactgcgaaagcatttgccaaggatgttttcattaatcaagaacgaaagttgggggctcgaagacgatcagataccgtcctagtctcaaccataaacgatgccatgaagtggttccaggtcaagtacgagggtgtcatcctcaacaaggcccaagccaacacctcctaagcgtcactagtgcctagttctctttagaacttgagttatttggatgttggatttgtatgattcttaaaactaaagatgttttgttattttgtcacccctgagttggatcagttttggtggtatgtactttcatcttaatgctcagatctatttactctcttagcagagatagatatatgatttgacatatgctacgaactgctgtcaatgttgataaaatgaaaagagaatggtttag

SEQ ID NO: 38871 - DNA, 375 bp, Oryza sativa
  Clone ID: PAT_MRT4530_42466C.1
atggagggggcggtcgccaccctgcctcgggcccgacccccctcagggggagggccatgtggctaccgggggcagcctcccgggggcagcctcctctctatggccctgatacccctggacccatatcaccgacaaatcctattcagggaaaaatatgatctacactatatatatacaagacccccgtattcagggaagggcatcgaattacaagccatagccaaagctacattgagaagcaatccagaggaagtcatagccgttccaacgattcccatactctacaaatcccgtctgcgggttcttcttcctctacgtcgagcagcaatggaggagaagacgccaacagcaacggtcttcctctacgtcgactag

SEQ ID NO: 38872 - DNA, 2216 bp, Oryza sativa
  Clone ID: PAT_MRT4530_42467C.1
ccggccggtccgtccctacccggccgggccttccccgccgccgcccgagcaacactaaaccccccatctccgccgctcccgcctccccctcgccgccgccgcctcccagatctcgccatggcgtcggagaagaagcaggcgaacccgatgcgggagatcaaggtgcagaagcttgtcctcaacatctccgtcggcgagagcggagatcgcctcacccgcgcctcgaaggtgctggagcagctgagtgggcagtcaccggtgttctccaaggcgaggtacactgtgaggtcgttcggcatccggcgtaatgagaagatcgcgtgctacgtgacagtgcgtggtgagaaggcaatgcagctcctggagagtggcctgaaggtgaaggagtacgagctgctgaggaggaacttcagtgagactggatgctttggttttggtatccaggagcacattgatcttggcatcaagtatgacccatccactggtatttacggtatggacttctacgtcgttcttgagcgtgctgggtaccgtgttgcgcggcgccgtaggtgcaagtcccgtgttggtatccagcacagggtcaccaaggaggatgccatgaagtggttccaggtcaagtacgagggtgtcatcctcaacaaggcccaagccaacacttcctaagcgtcactagtgcctagttctctttagaacttgagttatttggatgttggatttgtatgcttcttaaaactaaagatgttttgttattttgtcaactttgagttggatcagttttggtggtatgtactttcatcttaatgctcagatctatttactctcttagcagagatagatatatgatttgacatatgctacaaattaatgtcaaaggtgataaaatgaaaagagaatggtttagtacatcttaagacctgatttgataggttttaggtccagtcactgcttgttatgagcgcagacaagtttttatttcacctaatgcaatgccggagtatattattttgccaaaaaaataacttctagtaagttgtgccggcgccgccacgccaccttcgctcctccctcctcgccgccgacgaactcccggccatctccgccatggcgtcggagaagaagcagtcgaacccgatgcgggagatcaaggtgcagaagctcgtcctcaacatctccgtcggcgagagcggcgaccgcctcacccgcgcctccaaggtgctggagcagctcagcgggcagaccccggtgttctccaaggcgaggtaccccgtgcggtcgttcggccgcccgggccgccgccgaagccaccacacctaaacccttcttccctctcctcctccgccgccgccgccctcccctctcgccatggcgtcggagaagaagcagtcgaacccgatgcgggagatcaaggtgcagaagctcgtgctcaacatctccgtcggcgagagcggcgacaggctcacccgcgcctccaaggtgttggagcagctgagtgggcagagcccagttttctccaaggcgaggtacaccgtgaggtcattcggtatccgtcgtaacgagaagatcgcgtgctacgtcaccgtcaggggcgagaaggccatgcagcttttggagagtggcctcaaggtcaaggagtacgagctgctgaggaggaacttcagcgagaccggatgcttcgggttcggtatccaggagcacattgatcttggcatcaagtacgacccgtcaactggtatttatggcatggacttctatgttgttcttgagcgtgctggataccgtgttgctcgccggcgcaggtgcaagtcccgtgttggaatccagcacagggtgaccaaggaagatgccatgaagtggttccaggtcaagtatgagggtgtcatcctcaacaaggcccaagcaaacacgtcgtaattggcaagggtttaaccagttatcctgtagaattaagtgagggttcatttgaatcatggaactgtctttcttgaaagccaaatgcactgtcaattttgcctctgttggagttgacctgcgtctatatttccattaaatgcttaatgatatccttgttttaaatcttaatattaaggcagacttggaatcaatccacccgctttgttacctgtatttctgccttatcctgtgtcaggcaaaagctaagtagcaacagtcaaattgttcattttagtgatgttttaaaaaaaaaaaaaaaaaaa

SEQ ID NO: 38873 - DNA, 550 bp, Oryza sativa
  Clone ID: PAT_MRT4530_42468C.1
gcacgaggcctcgtgccgaattcggcgcgaggggaaagcctccgagctcgaggcgacatctcacctcctcggccgccggccatggcgacaatctccgcgactctctccatctccttcctcccttcatcaattcgcttcgccgtcgccaccacctccacctccactacctcctcctcctcctcctggcgtatcaagcgacccgcgcggttcagatgctgcgcggagccctcttcaccggagcaggagaacccctcgactccggccccgccaccagtgaagcctcctgcgtcgccgtcgtccctgtggggcatttccacgagcacctggtctgcgggtgtcgccgggctggggtttctggagaccgcctacctcagttatatcaagctcacgggctccgaggcgttctgcccggttagcggcgggggctgcggcgacgtgctccaaagcgactactctgtcgtcttcgggattcctcttccactacttggtctggtggcatatggttaggttttaacgctctctcttcaagaaatggcaacaaggtcctccc

SEQ ID NO: 38874 - DNA, 415 bp, Oryza sativa
  Clone ID: PAT_MRT4530_42469C.1
taacttgacatgcgtattcatatttatgactaattatttaaatttcacttggcgcagggatattattggctctaaattagtggcatggaatcatctattcccacgcatcgctaatatagttttgtcacatgagcaagatgagtttaaatggaatctaacaccagctggaagattcttggttaaatctcattatcttgctttggctcatacgggagctcccaatattaacaaaactatttggaagttaaaaatgcctcttaaagtaaagatctttttgtggtatctacgtcgaggagtggtgttaacaaaagttaacctggctaagcggaaatggaaagagagtaagatctgttgtttttgccacaaagaagaaacgataaaacacttattttttgaatgtcgcctagcacggtcg

SEQ ID NO: 38875 - DNA, 354 bp, Oryza sativa
  Clone ID: PAT_MRT4530_4246C.1
cgaattcctgtatcaaaaccaagaaccacccgggggccaatttgcgaaaaaccagcactggctttcttaagtcccacggcaaacccattccatctttacaaggaaagcccactggtccctaaaacagcagtccctagcgtgcaaccccaccctagccccggactttatatctgtgggccctaagaaggccaaatggatggggaggtggggccaccaccaattcaaattccatttttttttacagggaccggaaaaacaaaacccaggggctggcctaacccttgataggaagccatatgcccctacccatactaaaaaaggtaagggaaaacctacttcctcctagaagggggg

SEQ ID NO: 38876 - DNA, 168 bp, Oryza sativa
  Clone ID: PAT_MRT4530_42470C.1
atggcagtggcaatcgaagctcatcaacttaggaccagcgtggtgatgatgagctcaagggagaacgccaaatccaataggaggaagaaggctatattgtttgttctttcacgtataactgaaacattcaagcgcctgatgcctagtcttgtaatcaaaataacttag

SEQ ID NO: 38877 - DNA, 300 bp, Oryza sativa
  Clone ID: PAT_MRT4530_42471C.1
acgtggtggagccgtcgtctgacggcgacgagtaccgccgccggtacgtcgccggccgcccctcaccggcgatgggcaactcctcctcctcctcaccaccggctaggcctttcgctaggcctcgacgcgtcatgcaatcacacccagctagctagctagcctcggatttgcaggaagaagacgaagcttgcagagtttgcagtggcagtggcagctagatgtgatcactactactagctgtttgtatcttagctttcgttctagctagcagtaagagtttagaatactgcgataataatc

SEQ ID NO: 38878 - DNA, 522 bp, Oryza sativa
  Clone ID: PAT_MRT4530_42472C.1
tagtggatccccgggctgcagggtatagattgaactgagtcgtaagtatggcgttgatagctattttggcaacaaataagctcaactatagtgatcctttctgttgaaaaggaacttgttttttttgcgaattttttgaggtaaggcaagtgggcaatgaatggttcaaatattcagtggttgtcctggtcaaacagcaagcatagtcctttgtgacagtggtttgttgtggcagagatttgcacttgtccttttgaatgctggagctgcagtctgcaccttcttaaggtgatagctctatgccctggtttcttgagatgtaagaaaatttgttctatagccgtcagttattattgcactgaattgcatttattggagacccacctgattaaagactgtgatgagcaacacacatctttttttcggtcttgtatgattggtcagatgctaattgaagctttgttttctttcatgagacataattgaagatttgttgtgctgctgcatgtctacaaaacatag

SEQ ID NO: 38879 - DNA, 585 bp, Oryza sativa
  Clone ID: PAT_MRT4530_42473C.1
ggagagaaccagtatagagtttttttttcgtcatttttactttttttttttttttgtggttttttttttttcagagttttttttttttttcataaatcaacatttcttaatgatgttccacatctcaaaatcacatagaaaacgatcttacattaactgataacatccatgagcagtcaacactaagttccactaaccaaaagccataaatttcaaaaggggaataaatccaattgttgaattgtgcaccttttattttgcattttgcaacattgaaaaaacaagatagaaagcacccatataacttctatttttttttcttctggctagggggtctagatgatctggccgttgttgatctggggtggcttctcttcatcctgtgctctgcccacgtgtgtaaatgttgtcgctctgggctggggtagggtatttctattagcttcaatgaagactgaatccggtaaagggcctagctggttaagggaggattgagttgatgttgcctgttctaataaagtagtcaacactgaagtgctatgttggccctctggtactaattcttctcattcatgtaaacatctt

SEQ ID NO: 38880 - DNA, 502 bp, Oryza sativa
  unsure (1)..(502): unsure at all n locations
  Clone ID: PAT_MRT4530_42474C.1
agagcncaaaaagaaggcggccgacangggcaccccgggcaaggggagccccgcggcggacgaggccacgggcaccancggcaagcgccgcgccagcancaagggggagaacgnngagganaaccgccgagccccccggggggggggcgncngcaccccnggcgccccccaggacancagcggcgggaaccgcnncgacgagacccngaaccagaacaccaaggagggcaagcccgncgncgangnccccaaggaggccggngcccnccccggcagcaagggggacaagggcaccancgagggcgccggcgccgacaaggagaccaccacccagggccacgaggaccgggggaagcagngcgccaagnacaacgaggccggggcccgcngcggcaagnggngggccgnccccaagaacggacccggccaggccngccagcgnggcagggancngaacgcccagggccccggcggcnacgccangagggngccaggagaacgg

SEQ ID NO: 38881 - DNA, 481 bp, Oryza sativa
  Clone ID: PAT_MRT4530_42475C.1
ccatgctgtgcttttcatcggacccaactttggtgctttcaagcagaatgagctgttgacaactggtccttctgatttgttgcccgcgccgttgccatgggtagcttcacagtgtttatgtttatatgccccagaggtttggtatcaaacttgttatgacatatagttaatgtgtctttattggtcgctaggttacatagtctctggctttattaatctgtagaaaatatcacccagtaggcagctaatccatatagccaatgtattttggcttgtaattttgaatattcaatcctcaatattttccttctattatgttggcatgatctcggccggcaatgctggcaggcaaaaagagaaatgaaaatgttctaggtgtaggtagtcactattacaaaattaagacacattgtttttgtaaaatcactcgtgtgaacactgaacacaaacgccattccattaaaaaaaaaaaaaaaaaaaa

SEQ ID NO: 38882 - DNA, 1086 bp, Oryza sativa
  Clone ID: PAT_MRT4530_42476C.1
atgcctaggcggcggcgggacgacgacgacgacgacggcggcgaggcctaccggcgacatcaccacgacaagaggccgcggccgccggcgccgccgcagcagaagcatctctacctggtgctcgacgactgggacagaggctacagcatccacaagctcgacgtcgacctcgacgacgccggggttatccacggcggcggcggcggtccagccgtccggttcgcggcgccgaggtcgtcgtgcgacgcgcggttcttccccatgtgcggcgacagtgtcgtcatggtgtccgacgcggcgccgacgctggtgtacgacacgggcgcggccgcgctgacggtcgagtcgccgctccccggcctcctcgccggcgggatggccatcgccatgcccggcggcgagaggctgtacgcgctcacgtctctcggcgagcgcttccctcgcgccttcgaggtgctgtcgacgggcggcggctggtcgtggaagaacgcgcccgtggcgccgccgccgccgccggtcgaggaggccgtcgccgcctacgcggtgcaccccgacggccacaccgtcttcgtctccacctccggcgacggcggcggcggcacgtacacggtggacaccaagcgcggcgagtggaggcggcacggtggctggctcctgccgttccatggccagggcttcttcgacgccgagctcgacgcctgggtcggcctcccgcgccacggggacaccatctgcgcctgccaggtcccgtcccgcggcggcgcgcggccgccggagtgggacaccatggacgatgacgacgtggtgccgtcgtggaagaagagccgccgccgccccggcggccgtcgacgcgccacgctcacctacatgggcgacagcaagttctgcgtcgtcgactgcgtggaatgcgacggcgacgacggcggcggcgtggtcacgccgccgcaatgtgaggtccatgtcgccgtgtttgggctcaagtacaaccggcggggagaactgaaggcgacggctcgccgcgccgccgggtcgttccgagtgcccaagcatttctcatggttctctcctgtggccttctggatgtag

SEQ ID NO: 38883 - DNA, 2397 bp, Oryza sativa
  Clone ID: PAT_MRT4530_42477C.1
atgtcgtcacgccgtgtccgcgtcaccggccttgggcgacccgacgccggcgtctcgcgcacaaagaagcagcagcagaatcagggtcttcctcggcaacatcaacagcaacaggaagctggtggtggtggacgagctggtagggagcacgctcaccacctgttcgacgaattgcttcgccgagacaccacctccatcttcgacctgaacagcgccctctccgccgtcgcccgtgaaagccccgccgtcgctctctccctcttcaaccgcatgccccgagccgacttatgcacgtacagcatcgtcattggctgctgcagccgcgccggccacttggacctcgctttcgccgccctcggccgtgtcattaggactggatggacggcgcaagcaatcaccttcagtcctctgctcaagggcctctgccatgacaagaggaccagcgatgcaatggacattgcgctgcgacgaatgcctgccctgggttgcacgccgaatgcattctcctacaacatccttctcaagggcctctgcgatgaaaacaggagtcaacaagctctccacctactccatacgatgatggctgatgatactagaggaggatgcccacccgacgtggtttcatacaccacagtcatcaacggcttgcttagagagggtcagctggacaaagcttattgcctgtttgatgaaatgttggatcaggggatgtcgcctaattgcatcacgtataattgtcttttgcatggatattgctcatcaggaaagcccaaagaggccattgggattttcagaaagatgtgcagagatggtgttgaaccggatgtcgtcacttataacacgctcatggtctatctctgcaagaatggaagatccatggaagctagaaaagtttttgattctatggtcaagaagggccacaagcctgacagttctatatacggtactctgcttcatgggtatgctactgaaggatatcttgttcagatgcaccaactcttggatgtgatggtacgaaacggtacgcaacctgatcactacatctttaacatattaataggcgcatacgctaaacatggaatggtagatgaggccatgcttgcatttagcaaaatgaggcagcaaggattgcaccctaatatagtcacctatggaacagtaatggacgcgctttgcagggtaggcaaagtggatgatgctatgtcccaattcgacaggctcatctctgaaggactaactcctaatggtgttgtttttagaaccttaattcatggcctctgtgcctgtgataaatgggacaaggctgaggagttggctgttgaaatgatcggtcgaggcatctgtcccaacaccattttcttcaacacattgttgaaccacctatgcaaagaaggaatggttacaagagccaaaaacatctttgatttgatggtacgcgtagatgtgcagtgtgatgtcattacatacaccacactcatagatggatattgcttagatggtaaggtggatgaagcaacaaagttacttgaaggtatggtgttagatggggtgaaacctaatgaagttacctataataccattattaatggttactgtaagaacggtaggatagaggatgcatgttctcttttcagacagatggcaagcaagggtgttaatcctggcattgttatctatagcacaatcctccacgggctgtttcagactagaagaattgcagccgcaaaagaactctatctctggatgattaaatgtgggattaagcttcctattggaacgtacaacataatccttcaaggactttgccaaaacaattgcactgatgatgccctccgaatgtttcacaacctatgcttgattgatttccaccttcagaataggacttttaacattatgattgatgcgttacttaaaggtggcaggcatgatgaagctaaggatctgtttgcttctctcttggctagaggtttagtgccgaatgttgtgacctactggttaatgatgaaaagtttgatagaacaagggttgctagaagagttggatgatttatttctttctttggagaagaatggttgtacagctgactcccgaatgctaaatgctttagttggaaagttaccacagaaaggggaggtacgcaaggctggggtttatctctccaaaattgatgaaaataacttctcccttgaagcttccacggctgagtcgctggtttttctggtttcaagtggcaaatacgaccaacatataaattctatccctgaaaagtatcgtcctactgcgaaatccagggctgtttttagtcaaaaaaaaaatccagggctgtttgatgctgccggtagctatggagttgtaactagactttattcttcttcttatatcgaattagttgtgtaa

SEQ ID NO: 38884 - DNA, 2397 bp, Oryza sativa
  Clone ID: PAT_MRT4530_42478C.1
atgtcccgccgcgtcctcagcgccccggacggcaccaaggtctcccgcttcaacctcatgaagctgcaaggtcgacaagaagcggctgctgctggcactgatagccaccacgcccaccacgcgttcgatgaattgcttcaccgacccaccaccagcagcatcgtcgacctgaatcgcgccctctccgacgccgcgcgtcacagcccagccgtcgccatctccctcttccgccgcatggtgatggtggcccgacccaaggtgcctcctaacttaatcacctacagcgtcgtcattgactgctgcagccgcgtcggccacttggacctcgctttcgccgccctcggccgtgtcattaggtctggatggacggcggaagcaatcaccttcagtcctctgctcaaggctctctgcgacaaaaagaggaccagcgaagcaatggacattgcgctgcgacgaatgcctgttctgggttgcacacccaatgtcttctcctacaccatccttctcaagggcctctgtgatgaaaaccggagtcaacaagctctccacctgctccacaccatgatggtggctgatgataccagaggaggatacccacccgacgtggtttcatacaacacagtcatcaacggcttgcttagagagggtcgtcagctggacacagcttatcacctatttgatcaaatgctggatcaggggttgtcgcctgatgttgtgacttacaactcgattatctctgccctttccaaggctcgagcaatggacaaggccgctgtggtccttgttaggatggttaagaatggtgctatgcctaatcgcatcacgcacaatagtcttttgcatggatattgctcatcaggaaagcccaatgacgctattggggttttcaaaaggatgtgcagggatggtgttgaaccagatgtattcacttataacacgttgatgggctatctctgcaagaatggaagatccatggaagctagaaagatctttgactctatggtcaagaggggccacaagcctaacagtgctacctacggtactctgcttcatgggtatgctactgaaggatctcttgttaagatgcatcatctattggatatgatggtacgaaacggtattcaacctgatcactacatctttaacatattaataggcacatacactaaacatggaaaagtagatgatgccatgcttttatttagcaaaatgaggaggcaaggattgaatcctgatacagtcacctacggaatagtaatggacgcgctctgcatggtaggtaaagtggatgatgctatggcccaatttggcaggctcatctctgaaggactaactcctgatgctgttgtttttagaaacttaattcatggcctttgtgcccgtgataaatgggacaaggctgaggagttagctgttgaaatgatcggtcgaggcatctgtcccaacaacattttcttcaacacattgttgaaccacctatgcaaagaaggaatggttgcaagagccaaaaacatatttgacttgatggtacgtgtagatgtgcagcgtgatgtcattacatacaacacactcatagatggatattgcttacatggtaaggtggatgaagcagcaaagttacttgaaggtatggtgttagatggggtgaaacctaacgaagttacctataataccatgattaatggttactgtaagaacggtaggatagaggatgcattttctcttttcagacagatggcaagcaagggtgttaatcctggcattgttacctatagcacaatcctccaggggttgtttcaggctagaagaactgcagccgcaaaagaactctatctttggatgattaaaagtgggataaagtttgatatcggcacatacaacataatacttctaggactttgccaaaacaattgcactgatgatgctctccgaatttttcagaacctatatttgattgatttccacctagagaataggacttttaacattatgattgatgcgttacttaaaggtggcaggcatgatgaagctaaggatctgtttgcttctctcttggctagaggtttagtgccgaatgttgtgacctactggttaatgatgaaaagtttgatagaacaagggttgctagaagagttggatgatttatttctttctttggagaagaatggttgtacagctaactcccgaatgctaaatgctttagttggaaagttactacagaaaggggaggtacgcaaggctggggtttatctctccaaaattgatgaaaataacttctcccttgaagcttccacggctgagtcgctggttttgctggtttcaagtggcaaatacgatcaacatataaatgctatccctgaaaagtatcgtcctgttgtgaaaacaagggctgtttga

SEQ ID NO: 38885 - DNA, 250 bp, Oryza sativa
  Clone ID: PAT_MRT4530_42479C.1
attcgtgtggccttgcaaataaatccgtaccccagaaaaataactcggacgcccgagcggacacctatgcggacgcatgcataggacccacggacgaacacacggacggccctctggacgacccccttgtgggccgcctcgttggccccctcgtcggacgcctccaagtacccctgggctaactcctgcctgtacccgcaaatataccacctctacctatagggggtccaaatatccctttaatgaatcc

SEQ ID NO: 38886 - DNA, 1551 bp, Oryza sativa
  Clone ID: PAT_MRT4530_4247C.1
atggccgccggcgatcaggccgccgacgacccggacagcctccggcttctccagctcggctacaagcaggagctcaagcgtggcctctcgaccctgtcgaatttcgccttctcgttcgccaacatctcggtgctgacgggcgtcacggcgacctacaacacggggctgcgctacggcgggccggtgtcgatgacgctggggtggctggtggtggcgctgttcaacggctgcgtcgccctgtccatggccgagatttgctcggcgtacccgacctccggtggcctctactactggagcgccaagctggccggcaaggaatgggcgtccctggcttcttgggtcactggctggttcaatatcgttggacagtgggcagctattgcgagcgtagacttctcgctggcgcagctgctacaggtgatcatcttgcttagcacgggaggagccaatggcggcggctacatggcttcaaagtatgtcgtgttggtgatttgcgccgtcatcctaatccttcatggcgtcatcaacagcctccctatccagtggctatctctgtttggccaaatcggggccatctggaatgctgcaggtgtctttgttctggtgatcctgatcccggcagtagcaaaggacaggccaagtgttgagttcgtgtttacccatctcaacacggacaacggcatggggatccatagcaaggcttacatcctagccgtgggattgctgatgagccagtactccgtgctcggctacgatacatccgctcacatggttgaggagacaaagaatgcagatcggagcgggccaattgggatcatcacgtcggttgtttgcgcgacggtgttcgggtggatctacctgttggctctgacgactgccgtgacggacatcccgtacctgctcagccccggcaacgacgccggcggctacgccatcgcgcaagctctgtacaccgccttccaccggaggttcggcagcggcgctggcgggatcgcctgcctgggagctgtcgccgtcgccatcttcctctgcggcatcgcgtgcgtcaccagcaactcaaggatggcgtatgctttctccagggatggcgcgatgccgttgtcgcgcgtgtggtacagggtgaacaagcacgaggtgcctctcaacgtcgtctggctcgccgtcgccgtggccttcttcatggctctcacgtcgctggggagccaggtggcgttccaggcgttgggctcgatcgcgacgctggggatgtacatcgcgtacgcgctgcctgtgtttttccgcgtgacgacggcgcggagatcgttcgtgccagggccgttcaacctcggaaagtacggggttctcgtcggctgggtgggtgtggtgtgggtggccaccgtcacggtgctcttctcgctgccggtggcgtacccggtcgccaataaggagacgttcaactacactccggtggccgtcggcggcgtgttgctgctcagcgtcggcgcgtgggtgctccatgctcggttctggttccaagggcccattaccaacactagtgacggcccgatttga

SEQ ID NO: 38887 - DNA, 619 bp, Oryza sativa
  Clone ID: PAT_MRT4530_42480C.1
atggcgtcagccgagaggaagggtggcgccgacaagagggccccacccatcggtgactcatgggaggcaggcgcacggtggaccaagtccacgcgcgcaccgggacggcaccgtggacccggaccacggtggtccacaggcggctacacacggtggcagaggggcggcgacggctcacggccgggcgcggccaccggcgacatgacacggcacggcggcgagcatgggaggtggccgccgaagaggagaaaggggagatggaggggagtgctcaccatgcgccggggcggcgaggggcaacgggcagtggaggcgctccctcgggaagggcggtggcggaggtccgatggcgacccgcgagcacgaagcggcggacggcagccgggattccctggggaagaagatagaagggttagggaggaacataggcgaccggagcggtgagaataccacgccggagaggagaggaatggtggagctcaccggcgaccgagagataccgagcttcggcgggatttcggcggcttggagtggcagccgaggaagaggagcggttgccggggtggagctcggcatggcgatgccgacggcggcggcggcgcagcgcagcggccgctag

SEQ ID NO: 38888 - DNA, 502 bp, Oryza sativa
  Clone ID: PAT_MRT4530_42481C.1
ccggccgggtccgagcctactcgttaccaaatatatattcgcctaataaaaaattctaatcctctgactacgaggatttatctgaaaaaaggcagatggggtcactaacctctatgtctcctttcgtaaacatctgatcctgcctgtcgaggataacatctcatactaccggatccagggcatgagtcgcaacaaccacgactaacgctagacgaaggtgcccgcacacaacaagagcctccgcgaatacggcaatctagaaattcaagaccatgaccgtgacccgcatcctcttacccaacaccgaaaggtgggaacgaccatcaacttctcgcagatactagggtgtgtacgtgggacaggatcaaggcgcaactgcacgcgcaaaccatgctactaaacatcaagagcaccaacgctgtaatcttatatgcacgtagtggacatcgattgagtgtacgacctcaacaacgtcaacatagagtacaagatgcatatggac

SEQ ID NO: 38889 - DNA, 748 bp, Oryza sativa
  Clone ID: PAT_MRT4530_42482C.1
ctccccgaagcgccccatgcccggaaccccctcctccccgtgaaacctatgcgccgccgctcgccggcgatctccagccacacgccacggccgctcccgccaccgccgcactgcgtcgccaccaccgcccaccttgccgcacgatgccgcgccccggcctccccttcgagccctcaatccattgccggaaccccctccccccaacatcaccctaccggccgccccgttcatcgccttcagccggccaccacctccgccctagcggccgctgcgctgcgccgccgccgccgtcggcatcgccatgccgagctccaccccggcaaccgctcctcttccttcaaccaccaccgaaaaactagccccaccgcacacccgaggccgccgtcgcttttgctgcctccggcccgtcccaatgcacctcggctgccactccaagccgccgaaatcccgccgaagctcggtatctctcggtcgccgggaatcccggctgccgtccgccgcttcgtgctcgcgggtcgccatcggacctccgccaccgcccttcccgagggagcgcctccactgcccgttgcccctcgccgccccggcgcatggtgagcactcccctccatctcccctttctcctcttcggcggccacctcccatgctcgccgccgtgccgtgtcatgtcgccggtggccgcgcccggccaccaccgtggtccgggtccacggtgccgtcccggtgcgcgcgtggacttggtccaccg

SEQ ID NO: 38890 - DNA, 486 bp, Oryza sativa
  Clone ID: PAT_MRT4530_42483C.1
atggatgtctcgcacagcggtccgtctgcagatgatcccatcctgactcctgagaaggggtgctttactgattcttccggcctttttgttcaggctgcactgcactacgggctttattcagttgcggatcacacgcgagttaggggtaaatatgggccgcgaagcatgcgaaaggcccaattcacccacgacgcccaccagccagtccttccagccagttgggccgccgtcctgcgcgtcacccgcgaactctccgccgccggtagtgctttccgtgtcatctcgccccctttattacttggagcactcattgccgacctaattacgcacacatccaccacctccaccacgccggcgattagccggcatcctcctgttgatgcacgatttgcgcagcctccccgagagatcggccgtgccatgtgtgaggaagtccacgagactccgtggtggtttctgacggcacccaccccacccacgttctga

SEQ ID NO: 38891 - DNA, 285 bp, Oryza sativa
  Clone ID: PAT_MRT4530_42484C.1
atggatcgtgtcgtcgcctcaggcttgccgatgggctgcgccacgcacgcatggaccctgatcgatcgccgatcgatggatcgcaacgtggccgtggacatcaatcgcgatcgagcgacggcgcccgtggacgtcgatcgaatcgctgccgtcgacgccgagttgtcgaaggatctcgccgtcagctccgacttgctgatggactacaccgtggatgccgagtcgccgattggtctcgccatcgccgctgccaccgaatcatccgtagatcgcgttctcacctag

SEQ ID NO: 38892 - DNA, 709 bp, Oryza sativa
  Clone ID: PAT_MRT4530_42485C.1
gaggattatttgttattttccagttgctatgatatgtaaattaaaaaaacaaaactcggccggcgggggaaagaccgccccctcatcttttcaagctaagaagaaaccacagacaaagctagtcaagaaaggccacgaaccctgggcccttgacaaagaatcaatttaagcagcacctctttgtttacagttgtttttcctttttttttcctttttaccttacaaaagttaaggttccagccaggcagttattaatatgaggtggtgtaaagattcagcagtttcaatgatgatgaaatcagtggttccattccggattacttcagggtcaaatattgtttagatgggactcaatgttgagaatttagagctgtatgattgtatgattgtttagtaaaatcaaatattactataaatactaaaaagttgagaatttagagctgtatgattgttgaagtatgatgtctcaatcttttaggcccagaaatagtagtttgttgatttatgctgcttggatttcagaacctgatacgttaaaactgaagggatgaaagggcaaacagagcttgtcaaagttttgtgttaagaaaaaggtgacacggctccttttgatgatggtaccatggtggaataacttacaataaggccctaagtgcttagacagatacaccatagctgctgatttgtacatgaattttgtttcgaaaaa

SEQ ID NO: 38893 - DNA, 301 bp, Oryza sativa
  unsure (1)..(301): unsure at all n locations
  Clone ID: PAT_MRT4530_42486C.1
gcgtattgaatacctttgtttctttatttgttttttttgttctgtccccttatcgttcttgcatacaaatgaataaatggctcggctacatagaataacctaccanaacataaaaaaacagtataacatgtataaataataaaatcttatttaanatgggtcatgtaaagaacatacttcaaatcacgatcaattcccttttcaaatcctaattcaacaaccctgactcttccttcattccacaaatcgcccacaaaaaataagaatcctacaacaaaatgtgtattctctaaccaacttc

SEQ ID NO: 38894 - DNA, 488 bp, Oryza sativa
  unsure (1)..(488): unsure at all n locations
  Clone ID: PAT_MRT4530_42487C.1
cccacgcgtnnngnnacnnntncnnnggcggacgccggtgcacgcggcggacagctccggactcgcccagcaacaagaggaggcggtggcgacggcagctgggaaggtgcagctgggagtgttcacggaggtcccggccatctcgtcccaacgccgcgagaagctcgccgtgatggtacgcgtgaaggcgccggcgtacaccaagcagacgagggcgccactggacctcgtcatggtgctggacatcggtggcaggatgagggagctggagcagctgaagcagggcgccaagttcatcatccacaacctcacgcagcaggaccgcctctccatcgtcaccttcggcccgagggcagaccggctctccgagctcactcccatgacggaacaagacaagaggtcgtccaacgacgcggttcaagccttggaggctagcggtggtgtcaaaataggcgcaggcttgaatgtggcataccaggtgctggatc

SEQ ID NO: 38895 - DNA, 488 bp, Oryza sativa
  Clone ID: PAT_MRT4530_42488C.1
gagtaaaaaaaggttggtaagggggcatttctattgttttatggtttttaatcttttgggggaaaaaaaaaaaaaagagggggcacccgttggttaaggggggaaaaaaacccaaggggggggggttgaaaaaaaaaaaaaaaacccatttggggagggggcaaaaaaaccggaaaacttggaggggggtttttaaaaagaaaaacggaaaaaaaaaattcccccgggccttaaaaaccgggggaaacccctttttttttttttcgggggggggggacccgcaaaaaaaccaattttttttaaggaaacaacccatgccctgttttattttgaaaaccctagggggggggcaaaactttgtttttaaagaaaaaaactcgcctcttcccttgcaaattaaaaaaaaaagggaaccttttgttgaggagaaaaacccgaccccccccggaagaaaaaatccgaaaaaggggaacccctgggggggtttc

SEQ ID NO: 38896 - DNA, 693 bp, Oryza sativa
  Clone ID: PAT_MRT4530_42489C.1
atgagcggcgggaggaagcgggagtggatacggaggaaggtggcggcggcggcggcggggagcgggtcgccgcggtggtcgcggcgtgtccgggcggtgtccacggcagtgctgcaccggaggcggcggcttgggctcgggctcgggcttgggcttgggcttgggcttggggtccgagtgtacgagaatgtggtgttctacgtgctgtgggtggtggagtcggtcgtcgtcctcgccaacctctgcttcttcttcctgcgcttcggcggcgtccagcacggcaggcgacggcggaccacggcagcggcgggcggcgcggagatggacagcgcatggccagcggcgggcgacggcgcgcgaggcgtgtggggtggcggcggccatctctctcttgcgcgccactcgcctagccgtccgccgcccttctccccggtggtgaggcctacgccgttcgccgcgctctcagcctccacgtgcccgatggcgatggcctgcttcgccgcctccaccgccgtgtccccgccctcgccgtttggagatgaaaaggcccatgatcttgataccgacctactactacatccacggcagcaagctactccagccagcaacactagcaggctgcaacagccattgacttcgagttgctacggacaaacgagcgagccagacatcacctcggcaccaaactgttag

SEQ ID NO: 38897 - DNA, 3066 bp, Oryza sativa
  Clone ID: PAT_MRT4530_4248C.1
gtgcccgtattttttgctcttgtctcgttggctcaaacgatacaggcgcgcagcatctcctcacgtgccctcgcccggcctcggcaatcgtgtcagcctacttttcgagagcttaacaagggagagctccttaattgccacgtcccgcccgctcactgcctaagcttccaagttccaacggggacatctcttctcttgcaccttcctgatttcatggatcggacaagccagtgggtctcgtcgccggacatccccgccgatcttctcatccggatcgccgacgacgtcttccctctccataaggcggtgatggtgcccaagtgcggctacatccgcaaggccgtagcggcggcgcgcggtggcgcaacggccaccgtcgacctcgacctgtccgcgctgcccggcgccgccgacgccttcgacaaggtggcgcgctactgctacggcgccaacttcgagctatccgtgcgcaacgcggccgcgctcctctgcgccgccgccttcctcgacatgcacccaacggacggcggcctggcgcgccgcgtcgaggagttcctggccaaggtaggcctccgcacgctgcccggcgccgtcgccgttctgcgctcctgcgaggggctcctcccggccgccgaggagatcggcgtcgtgcagcgatcagctgatgctatcgcgctcaggatctgcaacgaggtgctgttcccgacgaggtcgccgcccgagtggtggacggcggagctcgccgccctctcgccggcgtcgttccacaaggtcatcacggcaaggggtcgtcgtcggtcgagggggaagaagggctcgtggttgcggacgttgagccggctgaacccgttcaaggccggcatctggggcaaggacacgtcgggcatcgtcgacgggaagacggacgccatgaattccgtcaagtccaagaggaggaggttctccattagctaggctagcttagtgttgagatgatccatgtcatctcgtgctagctacatatatgcgttgtcaatgactgtatattgattgattggttattcgcaagaaacatgactgttcttgtgtagtctactgtaaattgtaagtttgtgtccgcaaaaacgaactaatgtttggattggattggtcaaaacgcaaaacaacgcatcatcactgccttcgtggagcgcgactctgcggcgtcatcgggcggcggcgcgaacggccggaaccggagggcgtccctgagcggagccggggcgctgcagggcggcggtggcgcgatgcagacggtggcgaagaccgtggacgaggtcgcggcggagatcgcgacggaggagtcgctgccgatctccaagttcgtggggctcgccggcgcggtgccgaaggaggcgcgcgcgacgcacgactgcctgtaccgcgccgtcgacatctacctgaaggcgcacccggcgctggaggagatggagagggagaaggtgtgcagcgtgatggacccgctgaagctgtcgtaccagggtcgcctccacgcgtcacagaacaatcggctcccgctgcaggccgtgctgagcgcgctctactacgaccggctcaagctccgcagcggagacgagggcggcggcgggtgggacgcgtatgggaatggcgtgatgaggtcgtcggcggcggggtcggcgaggaagcaggcgaaggaggaggcgtcgctggcgagggagaacgaggcgctgcggtcggagctggcgcggatgcgggcgtacgtgtcggggatgcagcagcagagcaaggggtcgtcgtcgtcgagggggaagaagggctcgtggttgcggacgttgagccggctgaacccgttcaaggccggcatctggggcaaggacacgtcgggcatcgtcgacgggaagacggacgccatgaattccgtcaagtccaagaggaggaggtggggccctttggcggcgaacctcgccggcgttgggacgcaccagccttcgccggagaacaccatacactgggacccacgtgtcggtctcatactcaccataagagcggtgaagtcggctgtggcgttgaccaccgacgttgaaaatggaagcgcacatgaatgcccgtgcgatgggcatgtgccccatcccgccgagctggagcgccgcgacgcctcgcctccacctccaccacctgctcaccacctgctcctcctcctcgccctcgcctccgacatggaagacgcccaccaccaccactggacaatggtggagcgccgcggaactcagctctgggcctccggccgccccttcatcatccacggcttcaacacctactggctcatgtcattcgctgctgaccaagccacgcgcctgcgggtcaccgccgccatcgccgaggccggcctcaacgtctgctgcacctgggccttcagtgacggcggttaccgcgcgctgcagacggcacccttccactacgacgaggatgtcttccgggtgagctaccatggtgcctccttggcgtgtgcgcgggcagcacgccaggccttagactttgtggtcagcgaggcaagaaggcataacatgaggttgatactgtcactttgtaacaactgggaagattatggagggaaggcacagtatgtgagatggggaaaagaggctggtctagatcttacttctgaagatgacttcttctctgacccaacaattaagagctactacaaagcttttgttgaggctgttgtgacaagaataaacacggttacgaatgaaacctacaaagatgatcctactattcttgcctgggagctaattaatgagccacgctgcccttcagatccatctggagatactttgcaggcatggatggaagagatggcatcttatgtgaagagtatagaccctgtgcatctcttggagattggtatagaaggcttttatggcccatccattccagaacttttgcctgttaacccagatgagtattcagggcatgctggaatagacttcatcaggaaccatcaagcacctggaattgacctggcgtctattcatgtttattctgacatttggtaattcccaaaaaacatgcctgttcttgtgt

SEQ ID NO: 38898 - DNA, 184 bp, Oryza sativa
  Clone ID: PAT_MRT4530_42490C.1
ctaccgatgcccctgcccgcaccgcagccagacagccaggagcgcgcgcccttcctcctacctccacccctgctaccatccacccggggatcccggcaagaggtcggaggcggccgaggaatgcacggccattggggcgagggcgagggggaccccgcacggctccgcgacgaggatcctttaa

SEQ ID NO: 38899 - DNA, 873 bp, Oryza sativa
  Clone ID: PAT_MRT4530_42491C.1
gctgcaggaattcggcacgagggagaagagagaaatctaagagagagatggatcatcaccagcaccacgagcagcagcagcagcggatggtggagatgcggatggggatggcgatgggcgaggcgtacgtcgggggaggagaggtggtggcgcgggaggcggcggcgcaggcgctgggggcggtggtgcagctgcacttcgacaagacgctggagaagaagcgggcggcggacgcgcagaagcaggagctgtggcgcctcttcctcgccttcttcctcttcctcgccatcctcctctccgccgtcgcccagtccccgccgtcccgcctccagtgccgccacctctgggcccccgccggcctcctctccctcgcccacctcgccttctacgccgccgtcgcacaccacctccgatgcctcaacggattcaggtaccagcggcgttgccacaagctgaccctggcgctggcggcggacaggctgcggatgctcaagtccggcggcgacgtggtggcggccgccgacgtggaggtgccgtaccaggagccgcccgagagctacctggccaagttcaagcgcagctgggccatccacttcgccttcctcatcaccaccttcgccttctccgtcgccgccgccgtcgccatcctctgcttctagctctcagatctgctctcaactggactactcctccaatccaatcttactagtaggagatattgattgatcatcagatcagatgatggaagagtcgttggttgtttatctctactgtaatccctccctctctttctctttcttgtcgtattcattgtgatttattagtagaatgttctatgttaattgcccttcagcgagaggccctcactgcatt

SEQ ID NO: 38900 - DNA, 1446 bp, Oryza sativa
  Clone ID: PAT_MRT4530_42492C.1
gcacgaggccggcccggccgccagtggctcaaccccgccgtcactatcttcatccgccgtcccgacgccgcgagcccaaacccctaaccccggagagcctcctcgccgcagatggcagtccccggccgccgcgacgacctcgtcggcgacgacctcgtcgacgacgacgggatcggcgaggagtacatggccccctccgacgacgaggaggcgcaactgcctgacgaactcttccgcctcgccgacgccgcccagtccggcaacgtcgctgccctccgcgccgcgctcgataattattctggcaacattgatgatccaatagaagatggtgatactctgcttcacatagcatgcttatatggccatctaccttgtgttcagctactgttggaacgtcaagctagcttggaatgcaaagatgaagaaggagcaattcctcttcatgatgcttgtgctggaggctttagtgatatagtccagtacattttgaattttgctgcgaacattgatggctgcgtaacaagaatgctcaacactgttgattctgaaggcgacactccactccatcatgctgccagaggggaacatctgggtattgtggatctcttgcttaaagctggggcatgtgccaagaaggagaatacttatggccaggtccctgctgagatggctgatgaaggcactgaagtccggaaactgaaggtagtcactgtaccatcctcaaatcctcatccatgccatcaattgccgatccgccactctcccaaccacgacgatggcggcggtgcagcgccttccccttcctcccgccgcccctcctcagccgtgccgcggacgatggaagacgaacgagacgaacgggtcgtttccatggacggaacgtacgacgccgacgagaagcccgtgcttcttttctctcgcggcgacggcgttgtccgtgtccacgatctcccgtcgctgaagaagagaggggatattctctgctacgacgaggtcaagacgatatccatcaggtcgcgcggcgtcgtcttcaccggagatgcgtccggcgaggtacctagtactggagttatgtttgcaaagctcaatgctgatacttctgagattaagcttactgagaaacaggatgatgatactgaagacgacaagaagaaagtcaatgggtcgatgaaaatcccgcgagtatggctgtctttgtctgattgctgggagaaaatgaaggtctctatctttgagtttatgattgatacaagtggaaagaaagaggcaatctatactgtgtacagctatatcgctattgggattatcctgagccttaactgtttctggaaagtatggcgtgaagctagtaattcggatgaaaaaccatctgggtttaaagctttctttattaccatcgtttgcatggttggcaaaaaactctatgactctctgaagaccaccaag

SEQ ID NO: 38901 - DNA, 492 bp, Oryza sativa
  Clone ID: PAT_MRT4530_42493C.1
atggctttcgtgctcgctttggtgaagccatatgcttcatggtggacatcccctttagcaattagcaaagccgcggaggagttggccggcggtagaggtgggggcgccgtcggagaggcgcggcggagggggcccgacgggaagtggatggccacggggccggggcagggccggacgtcagagggttgcgggggctgggtccgccgccccaagctctgtccttccccgccaccctcgtcctccccgcacgcatgccatcgagagggagggggccgagctccgtccgccccccaccgccgtcctgctgccctcgtcctcctcgcgcgcacgccaccgagagagagggggaagccacgccgagctccgtccgccccaagcttcgtctgcccgcacgccgccaagagtgagggggaagccgtgccaagcggccgcctcctcatccgctgccgccgccgccaccgctccgtgtcccccgctgccgccgatccatga

SEQ ID NO: 38902 - DNA, 481 bp, Oryza sativa
  Clone ID: PAT_MRT4530_42494C.1
ccgtggttcctgtttttttttttctgttgtcttttttcttcttttttttttttggaaaccccccccccaaccgccacttctcagggggaaatgcggggacccggggtgggacaacaaaattggcccccctgggggggaaatgggcattccccccacccgggccggggggtccccccgggttttccgccccggccccggggggggcccccctttcccctttaggggggccaattaaacttgggcgtagaccagggcccccgcctgcccccgggggaaagaggtcccccctcacaatcccccccaaatgactctccggaatcttataggggaaacccggggggccccaccggggggccccccccccctttttgggggggggccgcccgccccttttcctggggggaaccctgtcccccccccctttttatgaatgccccccccccccggggggggggggtttctttctttggcccccgggggg

SEQ ID NO: 38903 - DNA, 597 bp, Oryza sativa
  Clone ID: PAT_MRT4530_42495C.1
ttccccacacgcctcacccacctctggagatccgatcatccatgcatggctgcttctcccctgcgcctcctcgccatcggcgccgctgctgtacctttcatgcgtggtagccgccacccgcgaggacgacgagccgacgccgtgtctaggccgccgagatcatcgtccttcctctgccaaagcagttcgccgagcgagccgccgggatcgccggccggtggcggcggcggcggcggcggcggaggaggaggaggaggaggagggaagaagagcgcgtggtgggccgccgccatggccgagagggtgttcggcgacgcggcgaaggccgggagggcggtgcgggagagcctgagccccaagcagaagggggactggaaggacgtcacgctcatgagcttctccttcgccgtctacgtctacatctctcagaagatcgtgtgcacatattgcgcctggatctccatgatcaatcactagctagacccagtatatctttccagtagttgcatatactcctatatatgaacatatatactgtaagtttctgtagtggcaataaaactgacgcttgtttggtgttaaaaaaaaaaaaacaaa

SEQ ID NO: 38904 - DNA, 395 bp, Oryza sativa
  Clone ID: PAT_MRT4530_42496C.1
cccacacgtgcgagcgaaagcgctactataactctcaatggaattgaccacgcttcgtgggcatggatgatgaccaccatactgagcctacgctggacctacaacaccaacatcatcctcatcgtcaagctgagatccttcgtggcgcagccataccagagacgagctccatctcgtgagccacataaggttgtataacaaccacatccatgacaccgatgtctccctgaacggcctcggaaagggaaaggaaggttcaggagcgcacgtccttgtcgtcaacgagcctaacaacattcactacatagaggttccatgacaccctgagacagctcacctcagactacatggacagcttcaccactctaacaccaatcgtacccgactgcggctag

SEQ ID NO: 38905 - DNA, 331 bp, Oryza sativa
  Clone ID: PAT_MRT4530_42497C.1
acaagtcgctgtcttccaccttgatgagcgcgtctgcgtgtgtactcgtttctggcagtccgatattatatcatgcatctgcctattttttttcagtctctcgctgagtagttaatatagagtttgaattacctctgggaggtatttccgtatttggtgtaataaaattcaagattgataatctgaggaattttcatgaaaaaattaaactactacggatgatgcgcttatcggacgcttgttgttcggtgatagtactacttaaaaaagatcctcggatagtcagactttgcagtatacaattatgccaatgagaaaaaaaaaaaaaaaa

SEQ ID NO: 38906 - DNA, 317 bp, Oryza sativa
  unsure (1)..(317): unsure at all n locations
  Clone ID: PAT_MRT4530_42498C.1
ctggggggccgggttttttttttaaatttttttttttttggtttttttttttttttttnaaccccataaaaaacactccccttttccacttaaaaaataacctctcacacatgattacctggaaaccaccactggacagcatgatctaagatcaaaaaaggggcgcggggggatttttccccttatcccctctcccttaaacacaaaaaattacacaccccctgaccctgacaccgactgtataaaccctggaactgagtgctggaagtagtagttgaaaaaaaaggctatatatcgttgggtcgtctacctaaact

SEQ ID NO: 38907 - DNA, 1395 bp, Oryza sativa
  Clone ID: PAT_MRT4530_42499C.1
atgaaggaggtcgacctgtccgtcgactgcgcgctcggcgaggccgctgtcaccgtccgcgcgcggtggtggctgcactgcatcacccgcagccgcgactgcgacgtccgcatcgtcgtgcccatgggcgaccagggttcaattctaggagccgaggttaccgttggaagaagatcatataatactcaagtaattgaagtagaagatcacactacagagaatgctccaaaagctgatagtggcggactcttgaaaccccaattattttatttgacaatatcacagattgagggtggggcggatatttctgccacaatcagatggtctcagaagctacactatgacaatggacgattctcagtggacataccgttccgttttccatattatgttaacccattgccaaaagtattcatgaaaagggagaaaattcagttgactgtgaatagtggtttcagtaaagaggttttactgcagggaacaagccacccattgaaggaaaaaggttattctggtgacttatctggtggtgtgcttgttcaaccatcgacattgcgtgattatgatgatagagataggttctgcatatttcttttacctggaggtggcaacagaaaggtcttcagaaaagcagttgtgtttgtcattgatacaagtggaagcatgcaaggacatccgcttgagaatgtgaagaatgcgatgtctactgctctgtcagaactcacagaaggagattacttcaacattataacatttaatgatgagctgcactcattctcatcgtgtttggagaaagtaaatgagaaatcaatagcaagtgcacttgactggataaacttaaactttgttgctggtggtggtacagatattatgcatcctttgaatgaggcaatggcatcattgtcaagtgctcatgatgtgcttccacaaatctttcttatgactgatggatcagttgatgatgaacataatatatgccaaactgtgaaaacggagctcatcagcagaggatctaaatctcctcggatttctacttttggactaggtttgtattgcaaccactatttcttgcgcatgctggcatcaataggcagggggcattattatgctgcatttgagacaggatcaattgagagtcaggtacttaggtggttcaggaaagcatcgagtacaatagttgcaaacatctccattgatgctacagcacatcttgatgaatttgaaatcgattctgaatacattccagacatttcagcaaaaagtcctttatgtatatctgggaaataccaaggcaagttcccagatatggttacagctaaaggttacttggctgacatgagagagatctcgattgaacttaaggtgcagcatataaaggatataccccttgacaaa

SEQ ID NO: 38908 - DNA, 1057 bp, Oryza sativa
  Clone ID: PAT_MRT4530_4249C.1
atgccgggaccgggggcgcacctgctgtacgcgctgtcgggcggggcggcgctgtcgcggctggccggggcggcgcggttcgggccgcaccactgcgccgtctacgccgccaacgccttcctcggcccggacctcggctccttcgccgagtggctcgcctcgttcctcccctcctcgtcctcggccgccgccgccgtgggggacctcgccatgggcgtcgtccaccacccgttctactacccgctcctcctcggcttcccgctcgcctgcctctacgcctggctctcccggcggctgctcctcgccggcgtcctcgacgagccctctcgggtggcactaagcaggagacaatgcttctaccttatcacggcaggctcgctctcccatttctttttggatcacttgtttgaggagaatgggcactctacgatgtatacttggattctgagcactggttggtgggtaggccgtgctcctatcaattcggatgcagtggttattgtaggccttctttgtatttgcctcgtgctggggtttgtgtacattaacagagtgaagcatgaaaaatcagccactcaaaaatcaaaccaatctttcttcctcatcgtggtgatagctatcttgtactgtatgtggtgtgccactcagatatacctgcgaaatccacctcaaccagccataggtgaagaggctgatcttggagtgataatatttgttgccatttacctttttctcccccatggcttgtgtgccctgtcaatgaaccagaatgattatgctgaactggaagggatccaacttcgataatgtgccatatggtggtgtacttttatcctaatctacaaagaacatcattttttgaagtctgctcgctcctccatgttgtaatcatatttattttctaataataattggctaattgccagggatttatgttttctctagtgcaaaaatacttctagcgaagacttaggagttaggattatggagttcaggatgatactggcactgtattatcagttgtgatagcaataaacttctattggcagtggtgttc

SEQ ID NO: 38909 - DNA, 207 bp, Oryza sativa
  Clone ID: PAT_MRT4530_424C.1
atgggctcggtggtcgccagatctggccgccctgagctcgggggcagccggatccggccgccacaagctcgggtacggcggacctgcgcggggagtagctgcgacggtgggcctcccaccgcaagctggtgggtttttgagctggcacgacgaggtgcaagtaaagctatcatgggctatgtcaaattgatgtgtgataactggtga

SEQ ID NO: 38910 - DNA, 444 bp, Oryza sativa
  Clone ID: PAT_MRT4530_42500C.1
atggcctcgccatgccgtccactgcccccgctgttttcacgagtagatgatttcgcagtgcctcttcgtcgtcgtcctcgagctccctctatggcgtcggcgcaacggctgaggggaaacgcaggaatcgaccgtagctcctcagccaggccaggctcatgcatacgcggggacaagcgggtgcagtcgcgggatgaggggcttgagcctgggcagatccaggaggaagaagagggcaagaggaaggagggcttaacgaggatacccggatctgatcacttggagggcaatgtcgccaccgccagcatcatcttcctcctcttttcctcgctcttggtgctgtcttcttcgttggctcccaactccctccttcaggacctgcgatttgccagatccggtgggcagggcgtccggaagcaacagatccagagccacaaactctga

SEQ ID NO: 38911 - DNA, 2649 bp, Oryza sativa
  Clone ID: PAT_MRT4530_42501C.1
atggaggggttcgctagggcggtggaggacgggctgaagctgtcgaagaggctggtgctgccgggggggctgccgccgccgaggccactggcggggatggaccgcggcgttggggttgggggtgggggtgggggtgatgcctccgtggcggcgctgctgctgccgtcggcgccgatggcgtacgcggtggtgaccgacccgggggcggtcgacacccccgacgtgcccagctaccagccatacgtgtacggccgcctcgacccccccgcgctgatcccgctccagatgaaggaggtcgacctgtccgtcgactgcgcgctcggcgaggccgctgtcaccgtccgcgcgcggtggtggctgcactgcatcacccgcagccgcgactgcgacgtccgcatcgtcgtgcccatgggcgaccagggttcaattctaggagccgaggttaccgttggaagaagatcatataatactcaagtaattgaagtagaagatcacactacagagaatgctccaaaagctgatagtggcggactcttgaaaccccaattattttatttgacaatatcacagattgagggtggggcggatatttctgccacaatcagatggtctcagaagctacactatgacaatggacgattctcagtggacataccgttccgttttccatattatgttaacccattgccaaaagtattcatgaaaagggagaaaattcagttgactgtgaatagtggtttcagtaaagaggttttactgcagggaacaagccacccattgaaggaaaaaggtaggcagggtgagaagttgtctttccggcatgaagcaactgttgagaattggtcaagcaaagatttcaatttttcatacagtgtttattctggtgacttatctggtggtgtgcttgttcaaccatcgacattgcgtgattatgatgatagagataggttctgcatatttcttttacctggaggtggcaacagaaaggtcttcagaaaagcagttgtgtttgtcattgatacaagtggaagcatgcaaggacatccgcttgagaatgtgaagaatgcgatgtctactgctctgtcagaactcacagaaggagattacttcaacattataacatttaatgatgagctgcactcattctcatcgtgtttggagaaagtaaatgagaaatcaatagcaagtgcacttgactggataaacttaaactttgttgctggtggtggtacagatattatgcatcctttgaatgaggcaatggcatcattgtcaagtgctcatgatgtgcttccacaaatctttcttatgactgatggatcagttgatgatgaacataatatatgccaaactgtgaaaacggagctcatcagcagaggatctaaatctcctcggatttctacttttggactaggtttgtattgcaaccactatttcttgcgcatgctggcatcaataggcagggggcattatgatgctgcatttgagacaggatcaattgagagtcaggtacttaggtggttcaggaaagcatcgagtacaatagttgcaaacatctccattgatgctacagcacatcttgatgaatttgaaatcgattctgaatacattccagacatttcagcaaaaagtcctttatgtatatctgggaaataccaaggcaagttcccagatatggttacagctaaaggttacttggctgacatgagagagatctcgattgaacttaaggtgcagcatataaaggatataccccttgacaaagttttggcggcacagcagattggccttctcacagcgaaggcatggctttcttctgacaagcaactggagagaaaggtggtgaaactaagcattcaaaatagcattccttcagagtacacgagcatggtcctacttcaaacattggagaaggtagatgcagcacaaaaggtaagtcccactaagcagaaactgaaaggtcacaagggccccgacgaacctcgacggatcccgctccaatgcctcaagctcgggttcggcgaccgggccgccaccagggagaacctcgtcacgggtttcggcgacgtgaagccgctggagacgttcgagatcctcaacaaggccgccggctgctgcagccgcctcgccgactgcctctgctgcatgtgctgcatcaaggcctgcaacaagatgaacgaccagtgcgccatcgtgatgacgcaggtctgcgcggcgttcgcctgcctcggctgctacgagtgctgcgccgagctgtgttcagggtccgactcgtagccgtctggttttgtgtttgtaatttggggagagaggagagtattcgagtgtacatagatagagtttgcgaagaagaaaaaaaagcccgtgcatctccatactgtacagcttgatcaaggatggtcacttggtcaggtgatcaggtcggtcgttggttgtacaatttacccatgaaaaagccatcaggtttcaggtttggacctctccaaagtccaaacgttctggtgctggtttagagacatttgtgggttatttggttttgaggaatcaagccatttatgggatgatgggggcgataagatagatcaagctgttctgttcctgttactcggacaaaaccaatcgatagaatcgagtggtccattgactcgc

SEQ ID NO: 38912 - DNA, 417 bp, Oryza sativa
  Clone ID: PAT_MRT4530_42502C.1
atgggcgcaacagcaaatccgcacactggcgccgccttcagcgtcaggagtggaggggattccatcggaggacgaggcctcttcttgctgcagttctccactccatggcaagtcattatctcagagactcggagttctggtttcaagatcgattgggatgagaagagcaaaacaggcaccattttgacatcagcccttcttttttgcaaacagtccccttctttgaatgattggagaagtgcaaaccagtatgcttctgatgctgaggctttaggtgtctacgtttttcctttcaaaatacatactctgtttcatagtaggaagatggccctaatacatactctgtttcatagtaggaaggtggttctgtttggagaactagccaagagttattttgagagttactttttagcataa

SEQ ID NO: 38913 - DNA, 1506 bp, Oryza sativa
  Clone ID: PAT_MRT4530_42503C.1
gccaccagccgcccccacccgacaagcgccccaccccggcccccccccccacccaaaccgccccccccccaccactctccgaccccctgatacctcggcatcgcctccccactctccacctacccacgccgacaccgcgccccctaaccggcacaccctgcaaggcccacctccccgcgcctccccgcccagctccgcgacccccgccgccacccccacgtcaccgcacgcgacggcgccggcccgccggagcccgccggcgcgggcaaagggcgaccccccgcgccccctccggccccccccccccgcagccgacccgcccccacgcgcaccgcccccgggccggcccacgcacacgccaaacgggcccccccctcatactccatacactcctccctcatcctcctccttttcccccgccattggcgacagcagtggctccgcctcgcctctcggccggcggccgcgacaccgacctcccgcgctgccgcgacgactccgtctccctggcgtaccgcgcggtggagctccgccgaccgccgcccttctccgctggcgccgggaacctgagccgcccacgcgactcctccccgcgcacgaccaccaccgcctcctcgtcgtcgtcgtcgtcctcggactccgccctggcccggaagaactcgtcggcgaggtcatcgaggctgatctccggcggcaaccccgctccgccccggccgccgccccctcctcgaccgccggagcagcccgccgcttcccccggcggccgcggcccgcccgcgcgtggtggcggagccggcgtcctccgccgccgccgcgaaggcgtccctcctcctccccgccgaccggtacgcccccaccgccgccgccgccatcgccgccgcctcgccgtcctcgtcctcttcaataaccatgcaccaccgagcctcccttcatccctcgcttctccctcactgtcataccccccccctccgccgcctcattgtgcgccttcctccgccgttggtgccgccgccgaccaccttgagtggtcgaccacctcctcctcctccacctcccccctcgcctcgatccccgcggccaccgcgcctctcctcccgctgccgccggcgggcgccgcggccctcgcccccgccggaatccgccggctcgcggcgagcattccgagctccgggtcgcccgaaacctcgccggatccggcgccaccaccagccgaggtcaacagtcatcctgacacctgggccccacctgccagcgaccccacacctcccccccaacatcgcatcggcacctgccgccgttgcgctgttctcatcagccgcctcgtcgaaagcaacaacaaaagcctccctctccagctccaggtccacctctccgcactccacattctgcagcctcagggagacctcctgcttcaccctgccgccgacgacgctcaccgcgctgtccctggcgagcgcattgtcgcgcgacatgagccaccggccgatctgcatgtccgacagcagc

SEQ ID NO: 38914 - DNA, 1947 bp, Oryza sativa
  Clone ID: PAT_MRT4530_42504C.1
ctacattattgatgatctactgcacaggataaggccaccgtcgccaattctttccttttgcctccatcgctccaagagaagatcgtggctcctccgcaaatgcatgtagtcatcgatgtgaaatgacgatctttgagtgttatcggggcagctgcttcggcgagacgcagcctcctcgaaccttgtcagaagtgtatccttggagccagctgcgctatcatgatctccaggactccaactcccgcggctgctcatagtgcgactgctggtgctgcatgcggtacttgctccctgtgtctttggtttgcatggagaggtttgaaggtcgttgcttgtttcccattgcagccagggaaggacaaccccgtctgcctcgacgggtgaagcaacttttggaagcgttattggagtttcgatcttggtgttttgtaccacatctcttctgcttgaacttgtatcacttctttctccatcaaaagatgaaaaatcagtatcttcaacatttgacaggaaatcttcgaagtattgctcagcctcttcagtaagacgtcttgacaccctggctctatcattgcttcttcttctatatcgtggttgcctttccgaattcatattcttcttaggagtaggtagcaattccttgactatttttgtgagttcatgcccacgttgttcttccgctgccaattgagctaacaattcctgtttccgcatctctgactcttccaacttgctagtgtaactcctgcggagctcattaataacctgagttggttgtgcatcagcgcttgttgctttttctgaaggttcagattttgtcacgaccttttcaagctgagtcctgatttcatcaacagcttgccggacttctttacgcatcacgtcatacagtgcattttcatcctcattattactcaggcggtccttttcaagggtataaactgcccgaatccccttctgatttctgctatgaaaagagtcccgaaattcatcatcagttattgaagaatggctcaaattacggtttggggcatataaggcagcaagggaggtgatggcccagggatgcaagtgagtaatgcagtcactcccagtcccagatatcattaagcaccaagcaacaggttgcactgtggcacaaacagctacattatgcactatggtttgcatcacatggaacatgtcacaattatattgtttagccgtcttatggaatgatgagttctgcaggctattattgctggatttggtatttattcccctagaaccataccggtgagaaatgtccatatcattcttaaaaacaaaggtactagtgggattcacagaccaatccgaatcacaccatcggtgccgatccatcgaagcgcgccggtcgacggatgcataccgctgccgccccgcggcagcagccccgccattggcgacagcagtggctccgcctcgcctctcggccggcggccgcgacaccgacctcccgcgctgccgcgacgactccgtctccctggcgtaccgcgcggtggagctccgccgaccgccgcccttctccgctggcgccgggaacctgagccgcccacgcgactcctccccgcgcacgaccaccaccgcctcctcgtcgtcgtcgtcgtcctcggactccgccctggcccggaagaactcgtcggcgaggtcatcgaggctgatctccggcggcaaccccgctccgccccggccgccgcccctgaccttgttgacgaacctcgaggagggcgtggccgcgtcctccggggagggcgatggcggcgggaacctactcaggctcctcgaccgccggagcagcccgccgcttcccccggcggccgcggcccgcccgcgcgtggtggcggagccggcgtcctccgccgccgccgcgaaggcgtccctcctcctccccgccgaccggtacgcccccaccgccgccgccgccat

SEQ ID NO: 38915 - DNA, 555 bp, Oryza sativa
  Clone ID: PAT_MRT4530_42505C.1
atgtcgaggcggagggcggaggtggcggcgcggtgtgatggatccggcggccggcggcctgcgcgaccggcgaggcggcatggaggcggagggcggagacgacaccggcgatgtggaggcggagggtggaggtggcggtgcagcccgatggatctggcagccggcggcccacgcgaccggcgaggcggcgtggaggcagagggcggaggtggcggcgcggcgcggcgcgatagatctagcggccggcggcccgcgcgaccggcaaggcagcgtgaaggcggacacggcgccggcgatgtggagggcggagggcggaggtggtggcgcggcgtgatgaatccggtggcccgccgcgaccggcgaggcggcgtggaggcggagggcggagacggcgccgacgatgtggaggcggcggcgtggcgcggcgcgatggaggcggcaacggcagcgcggcacgatggaggcagaggaggcgtgctcacgcgggatggaagggagggcggtgcgatagggatggggatggaagggagggcgacgcgatggctggatggatag

SEQ ID NO: 38916 - DNA, 1448 bp, Oryza sativa
  Clone ID: PAT_MRT4530_42506C.1
atggcgagcgtagcagcgttgcgtctcgtcgtcctcctcgccgccgccgtgccgctgctgccgccgccggcggcatcgctggccgtgacgtcgacgtacgtgcggccgacggcgagggcgacgctgtccgtgctccacgacggcgatggccgaacgccgcagcaggtgcatatatcagctgtaggctctgacaagatgagggtgacgtggatcaccgacgacgacgcgccggccaccgtggagtacggcacggtctccggcgagtacccattctcggcggccggaaacaccaccacctactcctacgtcctctaccactccggcaacatccacgacgtcgtcatcggcccactcaaacccagcaccacctacttctaccgctgcagcaacgacacgtcgcgcgagctctccttccgtacgccgccggcgagcctcccgttcaagttcgtcgtcgtcggcgacctcggccagacggggtggacggcgtcgacgctgcggcacgtcgccgccgacgtctacgacatgctgctcctccccggcgacctgtcgtacgccgacttctaccagccgcggtgggacacgttcggccgcctcgtcgagccgctggcgagcgcgcggccatggatggtgacggagggcaaccacgaggtggagaggatcccggtcatccacccgcggccgttcacggcgtacgacgcgcggtggcgcatgccgcacgacgccggcgcgtcgccgtcggggtccaacctctactactccttcgacgtcgccggcggcgccgtgcacgtcgtcatgctggggtcctacgccggctacgccgccggctcggcgcagcaccggtggctgcggcgcgacctcgcgggggtcgaccgcgccaagacggcgttcgtggtggcgctggtgcacgcgccgtggtacaacagcaacagggcgcaccgcggcgagggcgacgccatgcgcgccgccatggaggagctcctctacggcgcccgcgtcgacgcggtgttcgccggccacgtccacgcgtacgagaggttcgcgcgggtgtacggcggcggcgaggacgcgtgcgggccggtgcacgtgaccgtcggcgacggcggcaaccgggaggggctcgccacgaggtacgtcgacccgcagccggcggcgtcggcgttcagggaggcgagcttcgggcacggcaggctggaggtggtgaacgccacgcacgcgctgtggacgtggcggcggaacgacgacgacgaggcggtggtcgccgacgaggtgtggatcaccagcctcgcatccaacccggcttgcaacaagaagtattccatcagcttgtattgatgtgtgagaaactaggatgacgataggtagtgtgattctcttgatgattatactacttgataaatctctctcacataaattatatagtatatggttaatttgtaagttatgatatg

SEQ ID NO: 38917 - DNA, 480 bp, Oryza sativa
  Clone ID: PAT_MRT4530_42507C.1
atgcagctcctggagattagcaagtttggttggggattttctagctgcaacgacagcaagttccatgaccatgcatgcactgggctatgccttgtcgatggtgatgaaaggggagggctgccgccgacgccgccgcctctaccctcctcgtcatcaccaccggtagccgctgccgccacctcccttcgcctcctcctccaccggatctgggaggatggaggggagacgccgtcgcccatgcaccctccgcctcccaccggtagctacaacatccgcgccgccaccgccattgccctccgctctggcgcctccaccggatcttggaggagggaggggagacgccgctgtccatacaccctccgcctcccgctagtaaccgccacctccgcgccgccaccgccctccgcgccgtcaccgccacagctcccgggagaggagagcacaaagatgggcgtcatcggctccacgtacggcttatga

SEQ ID NO: 38918 - DNA, 695 bp, Oryza sativa
  Clone ID: PAT_MRT4530_42508C.1
tcatccaaaaaaatcaagaccgataaatccggtctcggttttttcggtctcggtctcgatcagaccgaattcggaggagccgagccagagggcggagacgacgctggcgacgtcgaggcggagggcggagacgacaccggcgatgtggaggaggagggcgaagtggcggtgcggcccgatggatccggcagtcggcggtccacgcgaccggcgaggcggcgtggaggcggagggcagagacgtcgccggcgatgtggaggcggagggcggaggtggcagcgtggcgcgatggatctggcggccagcggcccgcgcgatcggcgaggcagcgtgaaggcgaacacggcgccgacgatgtggagggcggagggcggaggtggtggcgcggcgtgatgaatccggtggcccggcgcgaccgacgaggcggcgtggaggcggagggcggagtcggcgccgacgatgtggaggcggcggcgcggcgcgacgcgatggaggcagaggaggtgtgctcacacgggatggaagggagggcggcgcgatggggatggggatggaagggagggcggcgcgatggctggatggatggggatgcagcctgtgggttgtctctagggtttagtggtgtactgggcctcctggacctattgggccacaatttgattttctcggttaattcgattaaccgagcccaataa

SEQ ID NO: 38919 - DNA, 1422 bp, Oryza sativa
  Clone ID: PAT_MRT4530_42509C.1
cgacgcctttgcccttcctagcgtgcgctgcctcgccctttcgcccttcccaacccgcgccgccgtcacttctctgcttccattccccgtgcgcccttctccccttccatcccctttcgcattcccagcgcacgccacccatccctttgcgccgcttctccccttccatcccctcctggacaaccggtctccccggccgacccaactccatcacgcccacccttgccaccggtgcccgcacctcccctccatctccagctgccttgcgcctctccctcctcctcgggcacctccctccccccccttccggtgcttccctccccctccttcggcgcctctctctccctccccaccggtggcccctctctccctccccgtctctccagctcgaccgattcctctccctctcccgttcactccccacactccctctccctccccactcctcaccctccctctccaactctcccactcctctccacactctctcccatccacactccctccaaacttgccataaccccctcccccccccccgcccaataggcccaatacaccactaaaccctaaagacaacccgtaggctgcatccccatccatccagccatcgcgccaccctcccttccatccccatccccatcgcgccgccctcccttccatcccgcgtgagcacgcctcctccgcctccatcgcgtcgcgctgccgtcgccgcctccattgcaccgcgtcgcgccgcgccgccgcctccacatcgtcggcgccgtctgcgccctccgcctccacgccgcctcgccggtcgcgccgggccaccggattcatcacgccgcaccaccacctccgcccttcgccctccacatcgtcggcgccatgtcagccttcacgctgtctcgccggtcgcgcgggccgccggcagccagatccatcgcgccgcgccgcgccgccacctccgccctccgcctccacatcaccggcgacgtctccgccctccgcctccacgccagtcgcgtgggccgccggccgccggatccatcgggccgcaccgccacctccgccctccgcctccacatcgccggtgtcgtctccacccttcgcctccacgccgcctcgccggtcacgcgggccgccggatccatcagaccatcacgctatgccaccgcctccgccctccgcctcgacatcgccagcgtcgtctccgccctccggctcggctcctccaaattcagtctgaccgagaccgaaaaaaccgagaccaccttccacataaccctcccctaaccatccacaccacgctaaggtttcacccccacccctcaaaaggcagtgggcggtcccctcttgcgtcgcggtgaatccggcagctggacaaccgaacacctcggccgacccaactccatcacgcccaccctcgccaccggtgcctag

SEQ ID NO: 38920 - DNA, 408 bp, Oryza sativa
  Clone ID: PAT_MRT4530_4250C.1
atggagatcgaaggtgacgaaggagatgatgggggagagaaacagtgcagaactgcagatgacatccgtattgctgactgtactgtagcagcaggaggagatgggtgccagccttggagaatcctgcaggtgaaagaggctgatgagcaggtgaaagtgaaacgtgaggcaggtgccattgccaatggcagtgcacgccacacacaagcatcagcatcagcaaattcagcagcaacaaccaaccagcaacgcacgcagcaaacatccacagcagctggctcctccttcccccactccaacagtttggcagcagcagcagcggcagctcgtttcctcgtcgcgtgcatgcacaattgcatagagtatgcagctgcagccgcagagattgatgtgatggaaaaggactga

SEQ ID NO: 38921 - DNA, 180 bp, Oryza sativa
  Clone ID: PAT_MRT4530_42510C.1
atggccgccgccgctctgatttgcagacagagacagccaccgctggttgagcttcctctttgccctcacgccgccgcgcgctgcttcttcgtggccagcctctgctctgcccccgcctgccgcatcaacggagtcgcaaaatgcgaggaacaaacaatggggaccatcaactggctatga

SEQ ID NO: 38922 - DNA, 331 bp, Oryza sativa
  unsure (1)..(331): unsure at all n locations
  Clone ID: PAT_MRT4530_42511C.1
cccacgcgtncggcctcgcctcgccggctgctcagtgctcaatcaagaagaagaagaagaagctctctttcgatgatctccctgagttagttaacgcttactctgctctctatatatctgtgtgatccagccagccaccttcatctttgcttggttggttgagatttgagatgttgaggtccatgtttgagattgaattgaggacaggtttctgaaccggcagggaggctgaggagctaattaatttccgtctgtctgtcggtgcagccagttcccataccacctgctgcattaactccggactccataaacataatatatttgcttcttc

SEQ ID NO: 38923 - DNA, 282 bp, Oryza sativa
  Clone ID: PAT_MRT4530_42512C.1
atgacaataaagaagggaggcagtgggcgagccgtagaggagtacaatggcaaagctgctgatggtttggcaggacttttagaaataatccagatcagccgatcccacgtcctggtttttgtctttgccttccacgcaaacagggagtacaattgtacagtattcagaatttcaggtttgtcttggcacatgcacgtacggcccgtgcaagagtcctattgtactctagtactgttagtacgtacgctagtacgcgccgatctttctgcgttttctgcgttc

SEQ ID NO: 38924 - DNA, 254 bp, Oryza sativa
  Clone ID: PAT_MRT4530_42513C.1
gtagaaacattattttaaaaaatattttgaggaacatgcacatagtgacatacatgtcccttccttttttctttaagcatgcaaatttaagcatgcagagtgcactgcttagcacacactgcatgtgttgctagctatctagctacggaatagtccctctcttctcatcatgattgacacttgattacttttcagcctgctttcccctcggtggcctagttgtcctagatgccatgcatgcatgcaagccaggc

SEQ ID NO: 38925 - DNA, 250 bp, Oryza sativa
  Clone ID: PAT_MRT4530_42514C.1
atggaatacatgattggaaagagggacaatttcttcgagcaacggttcactcctggtctaccaagggactccagcatgtatctctatgatacaaaatcgtcgaggtacaagataggagagagtgccgacatctccggcaatcctccagtacaccccatggagagaatcctgggaatcaagcataaccgccataggggaggcctgaggaagcgacatgtggaagctgtggcagtgatcagtcacactcttg

SEQ ID NO: 38926 - DNA, 239 bp, Oryza sativa
  Clone ID: PAT_MRT4530_42515C.1
agatactacaagctaaccatttttagtgcttcactggatctgactggcaaattcgtatgaaagagtttcaatcactgatctataacgagcacacacacctgatgactatcatttgacaaacttattcagcatgactactatacaatacaatcagtgacgcgagctgtgactgcacaggacgaaatcggcagcaaatcacccaggggctaatatactactgaaaaaaggagagctacatt

SEQ ID NO: 38927 - DNA, 238 bp, Oryza sativa
  Clone ID: PAT_MRT4530_42516C.1
gtataccgtacagcctccgcccttttttttttttttttttttaacacaccttattttcttggggggcggatatattaggcgggaaccttttcacccacggttacatccaacagtcacacctgatatggttgtttctgggctatgatattagaccaaagcgaattaaacttggtaagcatgttcaaacacacactaggctgatcataacgtgtatagagtagacactgctgacataact

SEQ ID NO: 38928 - DNA, 740 bp, Oryza sativa
  unsure (1)..(740): unsure at all n locations
  Clone ID: PAT_MRT4530_42517C.1
atggactccccagcaacccccgtgggcttatctccgccacttctcagtctggtgctccgcaatgaaccatgctatacaaaaggaaaagaaggtttattgcgtcagcgggctagggtttcggtggaccgggcgcacgggcggcggttcacgcgaacggatcggcgagatcgatccaatccaaaacggacggccgagatcgaacggtccacgaccggctcacggcggacgaccccgatgacgtcagcgacaacttcagcgatgacgggcgaacgacggctctacgacccgaacggagggcaccaacgggtatagggcgacaaggcaaacttcccggtgaccaaaccggcggcggaagacaaccgacggcgcctgcactaggaaaaaacggcggcgaagatcgggtcgacggcggcgacggtgctcccgcggtcttcggcggcggtgaaccaacagacgatgaccgcgacgacttggcgatcccgacggtggcctttccgagtgacgacgacgacctaagcgacggcggcgcaccgctggaccaacggtggcatggcggcgccnaagctcacggggctagggcgctacacatggcgagagaccaaggccagggatgcggccggtagaggagacaccgggggtccttttaaaggggctaacaggcggcggctaaggcccatggcggccggccgcgagaaggaaacttcgggttccgggagagagagaggaatcccattcgatct

SEQ ID NO: 38929 - DNA, 364 bp, Oryza sativa
  Clone ID: PAT_MRT4530_42518C.1
cttagggaaaccaaagaacaagcacctttgcatgtcccagtcactggtggagaaaggggctttactcccggttcataaccccctaaaaaaaacacaggctgtcggccgctgctgcgccggccgccggccgccgcccgccgcgaggccccgcggtccgccgccgcgccgcccaccgcagcgccaccgactgctgcaaggccaccgcccgggcctccaccccaccgcgccgccgcgaggccgccggccgcccgatgggatgatggggagggaaggagaggagttagaggagaagttagagaggaggaagaggaagggatgatgggggagggaaggagaggaggaggaggaagaggaagagatggga

SEQ ID NO: 38930 - DNA, 2358 bp, Oryza sativa
  Clone ID: PAT_MRT4530_42519C.1
cttttttttttttttgggttaaaaagggttcatataccgtcatttcttcccatcatctatttttctagcattagaattagcgactattttcatagcatcaagcagcacaatatatgtctgatacagcacaagcattcatcaataataatacgcagttacacatacgtacatagacatacaccgtgcttaactgcttatttaagcaggggccaagcgaaggcaccccttcacatgatcacatatatacttactcgtgacaggaaaaaatgcagaagcccccaagttgccacctgtggccacttggcccaaattacgtgctgctacttagcttagcttaacctacttgaatccgacgagctgctgctgctgctgctgctgttcatcatagctcgaggaagacgaactcctcgatcgccgggatgtggccgatgtgctcgagggtctccttgtcgggctcctcgtcgacgccgatggccatgatggcctgcttgccgcggaaggtccggccgacgctcatgaagctgatgttgacgttcgtctggccgaggatgttgccgaccttgccgatcatgccgggctggtcgatctgccggcacaggatcaggttgccctccaggctgacgtccacctcgtagggcccgacgacggtgaggtgcggcacgccgtacttgaccctcccctcgaggacgatgtcgccgccgtcgctgatggcgccggcgaacttggactggacgtgtgagagcctcacctggatggactccagcggcgcctccgcggcggggctctcgtgggagacccgctcctcggtgatgcgcaggccgcgctgcttcgccgtgtagtcggcgttcaccaggttgacgaacgtgctcgacacgggctccacgatgcccttggtcaccatggcgcggaggagcctcgtgtcgaggtcgtccgggccacgggccgtggtgtacaccaccttgacgcccttgatgccgccgctctcgcctgcgacgagctgcaccgccagcttgcccagcttctctgccagtgaaacatacggggcaagctctgacatgacctcagctgggaccatgggagcattcacggctgttgctgcgagctcacctctcagtgcaccgacgacagcttcggctatctcgatagcgacgccctcctgggcctccactgtacttgctccaagatggggtgtaacagtaacattctcatggaggactagcttgctgtccttggctgggggctcctcagtgaagacatcaagggctgcctgagcaactttgccagagtcaagggctctgacaagagcatcttcgtcgatcactccacccctggccacattgatgatccgaactccattcttcatcttagcaaaggattcgtcgttgaagaccttggatgttgctggggtgagaggcatgtgaagggagatgaagtcggctctgccaatggcctcatcgaaagagaccagttcagctccaatggcacgagccctatcggcaggggcgtacggatcatgagcaatcacatgcataccgagccctttcgcccgcctggctacctctgaaccaaccttgccaaagcccatgaccgcaagtgtcttcccgaccagagaaactccaacgtacttggttctttgccatttcccttgtgcagtgaaaacagtgagagtgcggctgtagacggccttgagggcggcgtcggcctgggagacgttgcgcgccatggaggcgaggagcgcgatgccgtgctcggcggcggcgacggtgttggcggtgggggcgttgacgacgaggcagccggcctcggtggcggcctggaggtcgacgttgtcgatcccgacgccggcgcggcccaccacgcgcagccgcccgcgcccggcctccagcacctccctcgtcaccttggtgccgctgcgcacgatgagcgcgtcgaactgcgccaccttggcgaggagctccgcgggggacatcccgtacgcgcactccacgtccgcgaacccgcgcagcaccgccagcccggcctcgctcagcttctccgccaccagcaccgccggcttcggccacagcgccccgtccgtccccgcgcccagcgtcaccctccccgccgccggctccgacgccgccaccgccgccgcggacgccgacgacgagatcaccgcggatcggacgcttcggcgccgcgggagcgtcacccgcgcccccgcggcggggctcgcgcgcgccgcggcggcggcggcgtgaggccttgagagggcggcgcgtgaggcggcggcggcggttgccattttctccgatcgatggggagcgagagagtgatggtgtgttttttttctttttttttttttttcggacgcgtggg

SEQ ID NO: 38931 - DNA, 537 bp, Oryza sativa
  Clone ID: PAT_MRT4530_4251C.1
atggcttctcgccgcctcccgttcgcggcggtcaccgccgtgatcctcctcctccacggcgccgccgacgccaagtcgtcgtcgtcgtcggggaagacgaagagcctcgcgtcggggttcctggacgcgcacaacgcggcgcggcgccaggtcggggtgccgccgctgcggtgggacgagaggctggcgtcgtacgcggcgcggtacgcggcggcgcggagcggcgccggcggcggctgcgcgctggtgcactcgcacgggccgtacggggagaacctgttccacggcagcggcgtcgggtgggcgcccgcggacgtggtggcggcgtgggtgtcgcgggagcgcgcgctgtacgacgcggcgtccaactcgtgccgcggcggcgacgccgcggcgtgcgggcactacacgcaggtggtgtggcggcgcaccacggcggtgggctgcgcgctcgccacctgcgccggtggccgcggcacgtacggcgtctgcagctacaacccgccgggcaactacgtcggcgtgaggccgtactag

SEQ ID NO: 38932 - DNA, 856 bp, Oryza sativa
  Clone ID: PAT_MRT4530_42520C.1
ggccgcttttttttttttttttttgactggggaactggtcggataacaataccattggataaagtctagtgtcaaagatgtatggtacatagcacgtaacatggaaattcaaccagatttgccaaaaataacagcagaacattggatcatgcgtgtccctataaaactggactcaaaagggagaaatttcagtttataaggaacaatgtaattttatcacttctactgcccagaggcagggcctacaagaacaccctgcgcagatccttccttcatgctgccttcttcctgggtgtcactatctgctttccggattctgatcttgtacttgagctcaaactccgtgatttccttcttcttcttctccagtgcctcgttcatgcgagcaacaacttcctcgaggccctccttgttgcgttgcactgcaggcaagacctccttgatagtccgttcaaccagcactcccccaatcattctgtagcagcgcctcgaggggtcaagtggctcgattgcaccgatcacgagggagtgctcactgacttccatttccagctctgtgatcttggagtagagttgattcatttcagagcgcatgttggcatacatgtttgcaaccatttgctcgttgatgacttctttgtcagcaccacttggttgaccagccattttgcttggaacccacgcgtccgcccacgcgtcccaaaagaggcccttgctgtctcagcggatacgcctcttccggctgccgccacggcgggcgaactccggtggacggtggtcggcagctgcgcggcggcgcgggcggtggtcggcatcggtcactgcccctccgccatgaatcggacggacgcgtggg

SEQ ID NO: 38933 - DNA, 447 bp, Oryza sativa
  Clone ID: PAT_MRT4530_42521C.1
cggacgcgtgggcggcaccaaggtgacgagggaggtgctggaggccgggcgcgggcggctgcgcgtggtgggccgcgccggcgtcgggatcgacaacgtcgacctccaggccgccaccgaggccggctgcctcgtcgtcaacgcccccacctccaacaccgtcgccgccgccgagcacggcatcgcgctcctcgcctccatggcgcgcaacgtctcccaggccgacgccgccctcaaggccgggaaatggcaaagaaccaagtacgttggagtttctctggtcgggaagacacttgcggtaatgggctttggcaaggttggttcagaggtagccaggcgggcgaaagggctcggtatgcatgtgattgctcatgatccgtacgcccctgccgatagggctcgtgccattggagctgaactggtctctttcgatgaggccattggcag

SEQ ID NO: 38934 - DNA, 326 bp, Oryza sativa
  unsure (1)..(326): unsure at all n locations
  Clone ID: PAT_MRT4530_42522C.1
aaaaaaaggtgaaggaaaaacacaccatcactctctcgctccccatcgatcggagaaaatggcaaccgccgccgccgcctcacgcgccgccctctcaaggcctcacgccgccgccgccgcggcgcgcgcgagccccgccgcgggggcgcgggtgacgctcccgcggcgccgaagcgtccgatccgcggggatctcgtcgtcggttttttttgcggcggnggcggcgncggagccggcggcggggagggggacgctgggcgcggcgacggacggggcgcngnggccgaagccggcggngcnggnggcggagaagcngagcgaggccg

SEQ ID NO: 38935 - DNA, 389 bp, Oryza sativa
  unsure (1)..(389): unsure at all n locations
  Clone ID: PAT_MRT4530_42523C.1
atcactctctcgctccccatcgatcggagaaaatggcaaccgccgccgccgcctcacgcgccgccctctcaaggcctcangncgccgccgccgcggcgcgcgagcccngccgcgggggcgcgggtgacgctcccgcggcgncgaagcgtccgatccgcggtgatctcgtcgtcggngtccgcggcggcggtggcggcgtcggagccggcggcgnggagggtgacgctgggcgcggggacggacggggcgctgtggccgaagccggcggtgctggtggcggagaagctgagcgaggccgtgctggcggtnctgcgcgggttcgggacgtggagtncgcgtacgggatntcccccgcggagttcctcgccaaggttgcgnagttcgacgtg

SEQ ID NO: 38936 - DNA, 493 bp, Oryza sativa
  Clone ID: PAT_MRT4530_42524C.1
ggcagcccttgatgtcttcactgaggagcccccagccaaggacagcaagctagtcctccatgagaatgttactgttacaccccatcttggagcaagtacagtggaggcccaggtctgcatcttacctacaagcattttgtcctgcattgatgcagaccattagctgttgttcccaactgatgtactaacttcaatgaactcaccaaatctcaggagggcgtcgctatcgagatagccgaagctgtcgtcggtgcactgagaggtgagctcgcagcaacagccgtgaatgctcccatggtcccagctgaggtacgaacaaatttccctatgttggtttgttggtcaattaatgtcacaattcagcaatgcaagtttcttggaccagctcgttcgatctcatcatatggatgtttcaatttttcacaactatggcaggtcatgtcagagcttgccccgtatgtttcactggcagagaagctgggcaagctggcgg

SEQ ID NO: 38937 - DNA, 1197 bp, Oryza sativa
  Clone ID: PAT_MRT4530_42525C.1
atgggctctgctccgttcggtgacgccgtcgccggcggtgggctctatgagtaccaggggtatcacggtggcttcgccggcggccatggtctcggccaaccggccggccgagcgcccgcgttggacgacggtgaaactgaggggatggacgcatccgccgccgccgcagtcgccgccatggagatggcaaagaggaattgtggaggcggccgggaggagaaggcggcgatggcgctcaagagccacagcgaggcggagcggcggcggcgggagaggatcaacgcccacctcgccacgctccgcaccatggtgccctgcaccgacaagatggacaaggccgcgctgctggctgaggtggtgggccacgtcaagaagctgaagagcgccgcggcgcgcgtcggccggcgcgccaccgtcccgtccggcgccgacgaggtcgccgtcgacgaagcgtccgccaccggaggcggaggagaaggccccctcctcctcagggcgacgctgagctgcgacgaccgcgccgacctcttcgtggacgtcaagcgcgcgctgcagccgctcgggctggaggtggtcggctccgaggtcaccacgctgggcggccgcgtccgcctcgccttcctggtctcgtgcgggtctcgcggcggcgccgccgccgccgccatggcctcggtgcgccacgcgctccagtccgtgctcgacaaggccagctccggcttcgacttcgcgcccagggcggcgtcgctgctgggcagcaaacgccggaaggtctccacgttcgagtcatcgagctcctcgtcttgacaagtttcagagaaaattacgccaaagtcaaaaagatctgatcggttgcagtgatttttgcttctgataaattaatcgatcatggttgtaaaagaaagatacaaagctgaagtgagtttcttctttaatttctttctttctttctttttggcaagattaattactgaagtggcttctcaacattggttagcacttagcattttgctgctgcttatcttttcgaagagcgttgtgctccatgcatgattaattaccttgcatttgacatatatatatttgacattttcacatttcactgcaacttcagtttaactagtaactaggagctttgctccttcatgcatgatgcatgacatcaaaaaaaaaaaaaaaaaaaaaaaacccacgcgtccg

SEQ ID NO: 38938 - DNA, 1025 bp, Oryza sativa
  Clone ID: PAT_MRT4530_42526C.1
tcgcccacgcgtacgcccacgcgtctcctccccggccggtaggcagcaacaagctgtaagcacaagtatcgaaatggttagcggtgatgtaggagtagtagtgtactacctgctgctagtattagtggtggtgcaggggtgcaaaggcagcagcgcggtgcagggtgaaggtcggtggtacaacgagagcgaggccatcggtggtgcggcggcgtgggggaacgcgaaggcgacgtggtacgggcagccgaacggcgccggggcggcggacaacggcggggcgtgcgggttcaagaaggtgaaccagtacccgttcatggggatgacgtcgtgcgggaaccagccgctgtacaagggcggcaagggctgcggctcctgctaccgcgtcaggtgcaatcgaaaccccgcctgctccggcaacgcccagaccgtcgccatcaccgacatgaactacttccccctctcccagtaccacttcgacctcagcggcatcgccttcggccgcctcgccaagcccggccgcgccgacgacctccgccgcgcggggatcatcgacgtgcagttcgcgcgcgtgccgtgcgagttcccgggcctcaaggtgggattccacgtggaggaagggtccagccccgtgtacctggcggtgctggtggagtacgagaacggcgacggagacgtggcgcaggtggacctcaaggaggccggcgccggaggaggaaggtggacgccgatgcgggagtcgtgggggtcggtgtggaggctggactccaaccaccgcctgcgggcgccattctccatccgcatccggagcgactccggcaagacgttggtggcacccgacgtcatccccctcaactggacgcccaacaccttctaccgttccttcgtccagtactcctcctagctagctactcctatacccattaattcttccctaattattccttcttgttattatattctacccttatatatatatatatatatgttattaattccgatataatcataaaaaaaaaaatact

SEQ ID NO: 38939 - DNA, 1855 bp, Oryza sativa
  Clone ID: PAT_MRT4530_42527C.1
tctcgagtagtccagccatggccggtgcaatgagataggtcgtcggtcttcgttggcaagttgggcgcgacgactctgcatttgtcgagatcgttctcgataatggggtgtactcgaccataacctattcgagtgctcaattgttccttagtagatacatgccggatgtatctacgaaattaggctcccgattaaaaaatctactgtcagatcttttacattcatctcaagagttggaagctctaagtggaataccttcaaatgatgaattggatttaattataaagcacctgcctttagatagagctcctgggccagatggttttaatggaatgtttctcaataaatgttggaatatcatcaaacaagatttctatgagttggctcaccaattctttctaaacaatattcctttggataatctgaaccattctttcattaccctcatcccaaagaaaccttcccctgaaactacaaatgacttcagaccaattaccttacaaagttttgctctaaaatttctcacaaagatcatggacaatagattgcaaccagtaatccagaaacttatccacaaaaatcaatatggttttattaaaagcagaaccatacaagattgtctagcatggagttttaaatacctacatcaatgccagcaaactaagagagaaataatcattttgaagattgactttgaaaaagctttcgacctagttgaacatgaagcaatccttcaaatcttgcatgccaaggggtttaaccaatcttggattaacttggtcaacaatgtcttaaaatctgcttccacatctgttatgctaaacgaagtacctggaaaaaccttcaaatgcaagagaggagtcagacatggcgacccactttccccactgctgtttgtgctaactgcacagatgttgcaatcaattgtaaacaaagcacaaactttaggcctcctcatagccccaatcccaattggagataatcaattcccaatcttgcaatatgctgatgatactctgataatcatgaaagcggaccaaaaggaggtttttactcttaaagccatgctcaacacttatgctctctgcaccgggctgaaaatcaatttccataaatcttgcatgatctttttagcaggaacttttggttgctcaataggcaaaaggccgtttacctatcttggactacctatgggagagtgactttgctcccctaatcgacagagtagagagaaggcttccctccacaacaatttttctaaatcatggacaaagactctcaatgataaactcagttctatcatctctgccaacttactatatgtgcacattaaagcttccaaaaaaggttattcaacacattgaccatgctcgaagacattgcttatggaggaaaaactctaaaatggagactaagacacactctttggcagcttgggatatagtctgccaaccaaagaaaaaaagggggactggggataataaatctagaatttcagaacattgccttgctcatcaaacatctggataaattctataacaaaaaagatttaccttgggtacatctcatttggaacaaacattatcttgagtcagacaaaccccctcatgctcacaaagaaaaatgatccttctggtggaaagacactttcagattagtacccttgtttagagctttttctcaggttaatatgggtcaaggtgacactgctctattgtggaaagacaaatggactgacaattccccatcttgttctcatatgcaaaaaaactaggatacctcaattcagaatttcactatggcatctgatttggatatgcactttcatcttcctctctcaaaccaagctatgcac

SEQ ID NO: 38940 - DNA, 506 bp, Oryza sativa
  Clone ID: PAT_MRT4530_42528C.1
aactggtacgcctgcaggtaccggtccggaattcccggtcgacccacagcgtccgcctggatcatgaggaagccattaacagaatgtgggcggcacagtgcttggttattttcattgagaagtaacacttgttttcactgtcttgttaatgtctggccttgttgctcctgtggtggttatgcaactggaactgctttgttttgtttgtacttttgagtgttgttgcttttgttcatgggccaaacaaggaaatgcaataacgcataataaagatacagctcagagcaactgagaaaatgccaaattgttaaagaaaaagatgtggaaaaagattgtaatccgactggtgactgttctttctgtagactattgcatcttgattttggagttactcctacatagctatcctctcgaccggagaagatatggtccagagtatgacagtttgtatctgatacacaagcttctctgaaatcttgcctgtactgaaaggctgtttttctctg

SEQ ID NO: 38941 - DNA, 402 bp, Oryza sativa
  Clone ID: PAT_MRT4530_42529C.1
atgtcgtgtgttgttagccccagtctgccaaatgtgaatggacagattgagcagcaaatcggaacaaacacacaagaccttcagatttcagaacatgagatatattctccacgcagtgccatggcaatttcagaggaatattggttttgtttccagttgcagagtctcgggcgaaggagtcgcctggaacctgtcgcctggtctgcaaattgcgttggtaaggtgatacatcagtcttctccgaagctgccgttggataatcagggtcgggtttgcgctcgcaaatttcacatggcaagcgagcgtctgtctgcgtctaaacgcacagggggcatctgcatactagcaccttgttcatatgctgctggagctgataaacatatctacttttctccttttgca

SEQ ID NO: 38942 - DNA, 174 bp, Oryza sativa
  Clone ID: PAT_MRT4530_4252C.1
tggcaccagacaaggtttcccagatctgggataacacgggcccagtggagcccctaccccaattaatagtggagttgagctgccactccattgtaggcgcccccccaggctgttcacacactttgatagcttccggctcgtatgttgtgtggaattgtgaccggataaccattt

SEQ ID NO: 38943 - DNA, 1836 bp, Oryza sativa
  Clone ID: PAT_MRT4530_42530C.1
aatgactcacattttgcctacaggcttttaggcaccccaacaagcatcacaacacacccatactgggccaagaaagagaaacatattaacagagctagttttactcacgtgattattaaaggatatcttaagctgctgtgtattgaatcaattaaaatctcagagaaactatccataccaactaaccatgtacagaggcaaatagtagccttacagtatgaggtgagtagtaactcgccttattacattagaatcaaagaatgaattgaatcagtttacagaaagaatggtgctatgaataaaaagaattgaatgttggaaccccagcaaaatagtgcaagctcctaaaattttgcttgccaagtgacatactatctgaataccctcctcttccacacttctttaccaccgctctgttagtgcgctaagctggagcgagttcagtctcccttcaacaagttaaaattatgctatctgaataccctgctcttccacacattttaccaccgctgtgctaataagctggagtgtgagttcagtctctccctccaacgacaagttaaaattatcttgagaattgctgcagctgtatgatcacaatgctgatatcgtcagtcgagcccctagtaaccgcagtttcgacgagcctcctgcaagcagtcatgcgagaagctttgtcgttgctgatgcaaagcggcctggcaatgtcaactgcctcctggttctccaccttgtcccacaaaccatcagaggcaagaatcaagaattcgcactgcgaatcaacacccagagttgtggtgtctggatcagacaccacccactgcttgaggtgtgcatcaccgatgcctcttgacactgctaaggatccctgaactcgccatgttcctcggtaattcaccacgaatccacccagattctcaattctttccctctcatcctcgcgcgaggcccggtgatcagaggtgagcgcctctgccttcccggcgcggctgagcacggcacggcaatctccggcattagacacaacgaggccacctttctgcagcaaagcggtgacgcagcaggcgcccccgctctcctccctcttgaggaattcctcgtccgtcttcaggtagcaccgcttcactgcctgttcagtctcgccactgtcgccgccgtccaccttgcacatctcctcggccatgaacttgggcatgttctcggcgacgaactccgccgcgctcttcccgccgtggccatcgaatacaccaaaaaaggccactttggggtctccgccgagggcgaccttggccacatgccggtcctccatctccacccttctcctcccctttcccctccggcagtacaccgcgaactcctcgccgtcctcctccacctcgttcctcggatccgattccaccgcggccaccgccgcggcggcggcggcagcggccgccccgccgcacaccggaaccacgagaggggccgggcgccgccttttaagcacggaccccgcaggggcggagaccgccgcagccgcggcggccgacggctggggcgacggcgtggcctcctcgcgcaggtgggcgcgcagcgcgaaggggcggagcggcgacccggcggggggcgcggcctgcgccggcgaggacgcggcgacggatacggactccggcgaggcggacgcggacgcggccttgcaggagagcgggcggcgcgacggcgagaacaccggcgagctcgggatggcgaccgtgcaggacatcgcgactcgcgagggctctatctctccctcggagacgcggtcttcttcctcctcgccgctcgcgtgttccgccctcccgcggttgtgtttctgtt

SEQ ID NO: 38944 - DNA, 967 bp, Oryza sativa
  Clone ID: PAT_MRT4530_42531C.1
tggcagcgtcgcgctacgaggtggaggtgacggtggcctcggcgcgcgacctcaagaacgtcaactggcgcaacggcgacctcaagccctacgccgtcgtgtggatcgacgacggcgccaagtgctccacccgcgtcgacctcgacaacgccgacaaccccacctgggatgacaagctcaccgtccctctcccgccctacacccgcctagacgacgccgtcctctacctcgacgtcgtccacgccaacgccaccgacggggtcaagcccctcgtaggctccgagcgcctcccgctccgagacgtcctcgccgacaccggcataggcgcccgagcctcccgctccctccgcctcaagcgcccctccggccgcccccatggacgcctcgaagtccgcgtcgccgtccgcgagcccaagcgctactacgacccctcgccggcgtaccctgctccctaccaccagcagtcgtcccgtgacccctacgcctacggtaacactacaactggtggctatggctatgcctatggcggggcccctccggctccgtactccgcggcccctcctgctggatacccgtcggcctatggaggagcggctcctactcaacctgcctatggctccgccgcgccacctcaacctgccgctgtcagctatggagcgcctcctgtggatgcaaagaagaagagcaagatgggcatggggggtgggctggcggttggcgcggcggccggcgttcttggcggtctggcgctggcgggcggcgccagctacctggagaacaagtttgaggatcgcgtggcggagcgggtggaggaggaccgctacggcggcggcggtggtggctacgacgactacggcgatgacgactattaataatttatatgatattcgaattgcacttgcaggggagtcagattattgtaattgagtcttgtgtttttatcatccttgtcttacaaatcaatatc

SEQ ID NO: 38945 - DNA, 489 bp, Oryza sativa
  Clone ID: PAT_MRT4530_42532C.1
ttttcgcgtccggtcataggttcccagctgcaatgcagagcactttgcgcactccgtctccagctgctgcttacaggagcaggaactctgtcgtgtcaactcgcttgccgcggcctaggtcaacggtcatgcgcaggttcaagggtgcagacagcccagcacaagcagtagaagcgcctgcagcagaagcacctgcaggggcacaggaagacgctgcacctgccaaggccaagttcaatcatgcttacctcatcttcaacccagcagctggtcaggagaacccggccagcatccttggtgacatcagcctcaagctgagtgagcagatgaagctgacaatcctgcagacacagagggatggcccatcacccaaagagatggcccatcaggccctcaaggagggggctgatctcatcatggtctcatgcggcgatggcacagtgggtgcttgggctggagcttttgtggacacaggtgttccgatgggca

SEQ ID NO: 38946 - DNA, 144 bp, Oryza sativa
  unsure (1)..(144): unsure at all n locations
  Clone ID: PAT_MRT4530_42533C.1
gccgcgccccggtcccttcggcgtcncgtttgtcgccgcggcccgtggctcctgtctcttttggtctctgtgccttgcctctgctttcgcggtggggggcttgccttctccttggtgttgcgttccgccggtctctgccccccg

SEQ ID NO: 38947 - DNA, 249 bp, Oryza sativa
  Clone ID: PAT_MRT4530_42534C.1
atgcaaagaccaacgatatccttgtacgagaaagcttctccaaagcggtgccccaagaaggacacgacgtggtcgccgccaccgcttcatccggaagccggagcaaggttttcacccggagaacggaggggaacgacgccgaaagacgccgccgtcgtcaagccggccaacggcacagcagggctttcacccgcgataccccattcaaatccacgcaacctgcacaaggaacgtcgcaagccacattga

SEQ ID NO: 38948 - DNA, 246 bp, Oryza sativa
  Clone ID: PAT_MRT4530_42535C.1
atgacggatctgcggttgctgtcaccggatctggcctggcccaggccggatccggcggaagcggccggcgttgtggcgcagcgcgaacgaaggaggttgcgtggatttgaatggggtatcgcgggtgaaagccctgctgtgccgttggccggcttgacgacggcggcgtctttcggcgtcgttcccctccttggaggcgttgttatagcgttgacccctttcttttccttaccgttctccgggtga

SEQ ID NO: 38949 - DNA, 1538 bp, Oryza sativa
  unsure (1)..(1538): unsure at all n locations
  Clone ID: PAT_MRT4530_42536C.1
tttttttttttntttttttttttttttttttttttnttttttttcnnncnnttnnttttaaactaaactggcaggagaactgccaattatattttcaataagcaggagtaaaaaccctagacgggttacaagaaaagaaaaaacaaccaccgactggctgaacacacagcactcgccacaacacactacaactaaaaaccactgacggagcccaacatagggtgtcgataccaaatttgaccaagagcaatataggaggttccgactttgcaatctgtcatcgttgccgagcttaccgccaagcgacacagcagctccgactttagaatacaacatcgatacctaacacgctgccataatgatcaagcggcctcaacatcccacaatggacatcagcccaagctgcctaagcgccacatcctattcatgttcagcaacaacacccctagaaagaaactgtagtgtgtcatcgttacccagcttcattaccacaacgaagcagctccgacttcacctagcaaaatcaaacaaggagcaaaggtcgcccgccgcgaaacaaaaagtgaaactagaagagcaaaggcctcgtcgaaacctaggactaaaaagcttcgaagccaatgcaaagaccaacgatatccttgtacgagaaagcttctccaaagcggtgccccaagaaggacacgacgtggtcgccgccaccgcttcatccggaagccggagcaaggttttcacccggagaacggtaaggaaaagaaaggggtcaacgctataacaacgcctccaaggaggggaacgacgccgaaagacgccgccgtcgtcaagccggccaacggcacagcagggctttcacccgcgataccccattcaaatccacgcaacctgcacaaggaacgtcgcaagccacattgaccattcagcaatcagcctaggccaccgcccacagatccgcccgaccggccgaccctgccgccaactcaaggagaagggggagggggggcaggccgaagggggcggacgccacggcggctaggacagtgtcgccccaaccaccggtgcagagccgccgatgtgccccgccgccgacggctccaccgggcgacgcctcgcgccccgcttgcgtgtgtcggcgcgcgcgccggcctcgcgagccgtctccgccgccagagaggggcgcccctccgctgccagccatacctccttcgttcgcgctgcgccacaacgccggccgcttccgccggatccggcctgggccaggccagatccggtgacagcaaccgcagatccgtcatcgtcttgcccggagagctcgccgccgccactccccgccgccggttttcgccgcctcccccgcgccaagaggggacgccaccacaggagaaggccccgccgccgccctcctaactcgccggccaactttccggcggtgagctccggcggcggcgaggtggggaaagggggaagaagggggcggcggagctaggtttcgccccccgtgtcgcctgcgcgtgggcgacgcgggggttcacgggtccctc

SEQ ID NO: 38950 - DNA, 297 bp, Oryza sativa
  Clone ID: PAT_MRT4530_42537C.1
atgggacccacgcaggtcccatatgtcagccccggcttcctcttccctctcctcttcctctcttccacgggcggtggcggcaaagagcagctgggcacaacaggccgatgcggcgggcgcgggtggcgcggggcatggcggcggggatgtgggcgacgggtggagctccgtgaggaggttcttcgccgcggcgacagagcggtggtgggcgacctcgtcggcgccatgacgcgctctacgcgccataccacctcaccggccattccccgccgcccgcatccagcacgcgaggactaa

SEQ ID NO: 38951 - DNA, 294 bp, Oryza sativa
  unsure (1)..(294): unsure at all n locations
  Clone ID: PAT_MRT4530_42538C.1
cccacgcgtccgcggacatnaantcttcttacctnacactgaacgaactttttcaattgccagataatacaaacacgcgcgattctgatcacatatgctttattttatatacaaaatcacttctactgaatcaccaacaacaaaagcttaatgacattcaacgttcaatactatcgatacatacttccaagtaatatcttcaaaagcatttcccaatactcaaaaacgagcactgcactttacggacatattttaccggattggcttatcagacactaatatagtcactttatt

SEQ ID NO: 38952 - DNA, 369 bp, Oryza sativa
  Clone ID: PAT_MRT4530_42539C.1
atggcgacgaaaaagggtacgcttgacggagcactccttaccggctgtacatcatcgcagagttccaacgtcgagaggcctagagcaccattttcagccagtcctggacaagaaggaaccgccgccggagaagactcattcatcgcgggcagtgaggaggaatctcagaggtggctccacaggatcattgatccgtttttgtggttaggacacagcgccgacgaggacagggtgcatctgcacgaaacgcacgacgacctgctagccggatcgacaaatatcagacgagaaacagtggccggatctggacacaaaaacgcgccagaaaaccggaaggaattggagcctccgaaggcgaagccccgatga

SEQ ID NO: 38953 - DNA, 273 bp, Oryza sativa
  Clone ID: PAT_MRT4530_4253C.1
atggatgatcgcagcgactactccaacgttgcgctcgtggatccggcctctccggctcagcaacgacggggacacgcaaacgaggttgagcttgaggagaatccgcaggtgcagctccagccctcgcctgccctcccacctgtcgcctcagctccggcctcgtcgcttgccatcgctcgctctcgccgcctgctcgctctcgtcgaccccgtctaccttgttgtcaactacgagtcagcacttcagaccgccaagtcgaccacagttaaatag

SEQ ID NO: 38954 - DNA, 759 bp, Oryza sativa
  Clone ID: PAT_MRT4530_42540C.1
atggcggaattcgacggaggaggggtggacgaggtagccctcggcggtgcgaacccgaagacgacgacgacgcggctcggcggcggcgttagcggcggccggaggagtggaaaaggcggcggcggcgggtgtagcggcgcgggagcgatggagagctcgggagcggccgatggaaaaaggaaaaaggaggaggagaatgcggggatggtttatatgggctcgggaggggcggacgaggccgggaggcggccgaatttctcgccgacgtgggggagtggggagagagagttgggggggattcaaaccgaatcccgcccttacggggcgcgcgcggggcgggaaggcgtggggaagggggcggcgacgtgggcgcggcaacgcgggcgcggggcgcggagtggaggaggtggggcgccggcggttgccgaccggctggaggttggggaaggtgctgacaggattggtgaatgtcttgccgctgcagcgttcaccgaatcggagaaagggaacagccgccagaacagtagggacgcctcgtcctactcaccagtcaccggaaagtcctccgcgaaagccccacattcgcttcacggatggatattaacgccgcttgtgtcttccgtgacgtcggcgatggaggagtgctgcagccgatgcagcgagctgatggaggcatgtcgggaagcagttatcagtaatgagcttgctgctcatgtcggcgaccgctgggactacaggcgctggtgcatgtggtgctga

SEQ ID NO: 38955 - DNA, 446 bp, Oryza sativa
  Clone ID: PAT_MRT4530_42541C.1
atggaggaaagcgattctttgaggagttagacagagatggtgatggtcaagtcaccctggaagaccttgagattgcaatgagaaagaggcgattgccaaggaggtatgctcgggattttttacggcgcaccagaagtaacttgttttcaaaatcaattgggtggaaacaatttctatccttgatggagcagaaggagccaacaatattgcgggcatacaccaccctgtgtttgagcaagtctgggacacttcacaaaaatcaaattctcacatctttaaaaggtgcaggccttccggccaatgaagataatgctgctgccatgctgcggtacctaaatgcagattcagaagaatcaatctcctacagccattttcgcaatttcatgctcctgcttccttcagagcgccttgaagatgaccctcggtatgttgatgtcttgcgttag

SEQ ID NO: 38956 - DNA, 2220 bp, Oryza sativa
  Clone ID: PAT_MRT4530_42542C.1
atggacgcctggcagctgttcgtccccgcgatcgccatcctcatccccttgctccggctcatcctcttccgccgcggcgacgacgggagacgcggccgcctcccgccgggtcctccggccgtgccgttgctcgggagcacggtgtggctgaccaactcgttgtacgacgccgagcccgtcgtcaagcgcctgatgtcgcggcacggccccgtcgtctcccttcgcttcggctcccagctgctcgtcttcgtcgccgaccgccgcctcgcgcacgcggcgctcgtcgagagcggggcctccctggccgatcgccccagccaggccgcctcggccaggctcgtcggcgagggcgataccatgatctcgcgcgcgagctacgggcccgtgtggcgcctcctgcggcgcaacctcgtcgccgatacgctgcacccgtcgcgcgcccacctgttcgcgccggtgcgcgcgcgggtgcgccgcctgctcgtcgacaggctgcgggaggagcacggcgaggcggaggcggcgccacgcgccgtcgtagagacgttccagtacgccatgttctgcctcctggtgctcatgtgcttcggcgaacagctcgacgaggacgcggtgcgcgcgatcggcgcggcggagcgcgacacgatgctctacatgtcgagcgagatgggcgtcttcaacttcttcccggcgatcaccaggcacctcttccgcgggcgtcttcagaaggctcacgccctccggcggcggaaggaggagttgttcgtgccgttgatcaactcccggcgggagtacaagaaaaacggcggcgagccgaagaaggagacgaccacgttcacgcactcgtacgtcgacaacctgctcgacatcaacctcccggaggacggcaaccgcgcgctcaccgacgacgagctggttatgctctgctccgagttcctcgtagccggcacggacagcacgtccgccgcgctgcaatggatcatggccgagctggtcaggaacccatccatccaatcaaagctctacgaggagatcaagtccaagaccggcggcggcggccagcacgaggtctccgaggaggacgtccacgacatgccgtacctgaaggcggtggtgctcgaaggcctccggaagcacccaccggcgcacatgctgctacctcacaaggcggcggaggacatggacgtcggcgggtacctcatccccaagggcaccatagtgaacttcatggtggctgagatgggcagggacgagaaagaatgggagaagccaatggagttcatgccggagcggttcctccccggcggcgacggcgagggggtggacgtgacgagcagcaaggggatccgcatgatgccgttcggcgtcgggcggcggatttgtcccgggctcggcatcgccatgcttcacctggagtacttcgtggccaacatggtgagggagttcgagtggaaggaggtggccggcgacgaggtggacttcgccgagaagcgggagttcaacaccgtcatggccaagccgctgcgcgtgcgcctcgtgccccggaccatcgttgcacgcgcatcgccgcccttctcccacatcccggcggtggcagcggctctgcatcccgccgcggtctcggctctgcttgcggtcagcggtggcggctgggtccgcatcccatcggtggcgcggcggggtccgcatctggtgggcggcgacggctttgcatcctgccgcggcgacgagtccgcatcccgccgcggcctcgactctgcttgcggtcatggcgacgccgtctcctccctgcctcctccgcgccctccctcttgtcacctcaccctcttctcgggggctccgacgccggcctattacctccttgctccactgctcctcgccgtcggcggatgccttgaactgttatgggcttgtgccattatgctcatgataagggctgacgcggcgggcgcgaccgatggccggcggggaagagcacagctggcgaaggggaggatgatgtggggaggacatggcgggcatggctcggctattccgaagggaggcgatgctggtacggtgctgtggctagcgttattagtagatgttgagaggacgtcgtcgcgcgtctccggttcttcccacccgtcgtcggccgtgctcctgcctcaccggccgccgaccatgcccctcatgcctgcccttctccacgtggcccgtgcccaagaaggagagtactag

SEQ ID NO: 38957 - DNA, 2598 bp, Oryza sativa
  Clone ID: PAT_MRT4530_42543C.1
atggccgctgccgccgccgccggcgcggcgacgcttctctcctcgttttagccttgcggtctaaacgcttcctttttcgattagcctcccgtagacgccgcggtcaagcccgggaagccctccacccatgactccacgcgttggtcgaacggcatgtgattttagactgcgtagttgggaggtgagtaagggcagggatataggcaccactggtgtgcgtgttgcgtgctacaggagcagcacactctcaccatcaagggtgtatggatacagaaggacggggcccagacggaggaagtgaaccctcgtctgtgatgtgggactcatgagtatcacgtgttgctaggtgaagtgatcttggagcagcaagatgctggaaatgaagtggtcgagtaagagtattgtagggcaccatttcccttcctcgaagctatcttcgtttacacagaggccaaatacctttatgttgtgaactgtagcccatgtgggcacaatgatggtggcactgaagatcttgacacttcgattgatgatgattgctcggatatcatacaggatcacagtagagctaaaagtgcagttgttatcgaggaaatataacaggaaaacaaagatggtgaagatggagattcagagtgtgcctccgaggatgatgactcagagatggatatacaatcagcgtagaggctaaagttcaggttgttaattgaggaaattcaagagggatgacaagcctgctgctggtggagcacaaatgggatctcacaggaaacaacccagcgaaaattggtgatgattctaaactgcagcttgttgttaggactccacctgctggaatctttggaaagcgaagttggcgaccatcatgacccttcaggggaagtaaaggatgaaaatgatggagtgtcaaagaaaaataaaaaggccaaggccaaaaagactgctgtgggcggtgtggaaaaggagatcaaacaggaagattctccagctgatcttgttgatgcaaaacaaaagaaaaacaagaacaaaaatacctcagaagcagaagctggtgctcatcagaataccgataagacaaaacatatccacactgatgctgaggaagacactgcacaggaggctagcaaaaagaaaaagaacaagaaaaagaagacacaggagaagaatgaaagtgagaaccagacaccaaaaacacaggagaagaatgctaaaggaaaccagacatcaaatacagatcttacggggtcagagagcaagaagcagccgctccaaacacgcacttttggcaatggtatgataattgaggagatagaaatgggcaaaccagatggtaaaaaagcctctcctgggaaaaaggtttctgttaaatacattggcaagctaaagaatggcacaatttttgactctacggttggtcgaagggcatttgattttagactcggtattggggaggtcattaagggctgggatataggcatcaatggtatgcgtgttggggacaaaaggaggctcacgatcccaccatcaatggggtatggaaacaaaagaatggggccaataccgcagaactcaaccctcgtgtttgatgtggaactcgtgaatgtaaagagggtttctttcttgtccgacaaggacttgtatcaacccatgggtataaatatgtacactcgaggggagagggaggccaacagcatcgaccaggaggcgtctgctagcagtagcgaggatgctgctaatgaggacaagccagctgaacaaggtgtcagcgggaccatcgacaggatcgtgaccttcatcggcgacaggggtagcaacctgaacaacctgggggagatgctcaagcagtgggaaggaacctgcaaccgctacggaacctttcttctccacatcggacaagtccagttctctgagaggaatggacccgtgccagtggtcatcgacaggaccaccaccgtctcccgcggggtgggctgcacgctcctccacctcggcatggccctgggcagcggcggcgaggtagtacggcgcgtgggggtggcatgcactgcggccagtatgctcaacgacacgcctggtctcttggcgctcctggatgcacgcagccaggagcaacctctcaagatcctcctcaagtcagtggaggacgccaaggacttcatcagcaactggaagatcaacaaggacgtcgtcgaggtggacgtttgtccagccctgacccttgacgaggtcggcgcaatccgcaggctattccaggtcgagaaagctgacaagttcttgacaggagatgtcgtcaaggtgaagctagggcagtacgaggccatacaagctgccagaaatttgcctgagctgcctgtatccgccgtatgtgctatactggctgcggctgagaaaggaaaaaacaagggcgcagctgatgttggcgcccaaggccaacagaagccttctgcctatttatctgttatgttgctcttctcaacttggtattctaaagtgagcataggcatcaatagaatcagagaggataaagcatcgagacatcctagtttttgcaggtgggcaatattcataggttctttgcaggaaaagttctatttataa

SEQ ID NO: 38958 - DNA, 411 bp, Oryza sativa
  Clone ID: PAT_MRT4530_42544C.1
atggctgcggccaccgagaaatcgccaatgcaactgaacaaggcacaagagaacatcatgcgagatatcctgggcttggtcagtagtgccatggattcatctctcaccaagagctggaacaccagctcaaatccgtgcgaatggagtggggttcattgcacttctgctgcatcctcttcttttgtcaccaggctctccctccccggatatggcctctccaatgccaccatccttgcatctatatgccttcttgatacattacactcccttaatctctctagaaactccttcactgacttgccaagccaattctctccttgccccatgaaggcagaattgcaagtgctcgatctcagctacaataggctatccagtcatcttggcaatttctccggttttcatgagctagag

SEQ ID NO: 38959 - DNA, 1530 bp, Oryza sativa
  Clone ID: PAT_MRT4530_42545C.1
atggacacgtggcacgtcgccgtcgccgcaatcctcgtcctcatccccttcctccggctcatcctctcccgccgcggcggccgcggcggcgggaagcgcggccgcctcccgccgggtcctccggccgtgccgttgctcgggagcacggtgtggctgaccaattcgctggccgacgccgagcccctcctccggcgcctgatcgcgcggcacggccccgtcgtctccctccgcgtcgcgtcccggctgctcgtcttcgtcgccgaccgccgcctcgcgcacgcggcgctcgtcgagaagggggcgtccctggccgatcgccccgccatggcgtcgacgaggctgctcggcgagagcgacaacctcatctcgcgggccagctacgggcccgtgtggcgcctcctgcggcgcaacctcgtcgccgagacgctgcacccgtcgcgcgtgcggctgttcgcgccggcgcgcgcgtgggtgcggcgcgtgctcgtcgagaagctgcgggacgagaacggcgacgcggcggcgccacacgccgtcgtggagacgttccagtacgccatgttctgcctcctggtgctcatgtgcttcggcgagcggctcgacgaggacgcggtgcgcgcgatcgccgtcgcgcagcgggacgcgctcctctacctgtcgagcaagatgcccgtcttcgccttcttcccggcggtcaccaagcacctcttccgcgggcgcctcaaaaaggggcacgccctccgccggcggcagacggagctggcggcgccaacggcggagccgaagaaggagaccacgttcgagcactcgtacgtcgacaccctcctcgacatcaagctccccgacgacggcaaccgcccgctcaccgacgacgagatggtcaacctctgctccgagttcctcaacgccggcaccgacacgacgtccaccgcgctgcagtggatcatggccgagctggtcaagaacccatccatccagtcaaagctccacgacgagatcatggccaagaccggcggcggcggcggcggcggccagcgcgaggtctccgaggaggacatccacgacatgccgtacctgaaggcggtggtgctcgagggcctccggaagcacccaccggggcacatggtgctccctcacagggcggcggaggacatggagatcggcgggtacctcatccccaagggcaccacggtgaacttcatggtggcggagatgggaagggacgagaaagaatgggagaagccaatggagttcatgccggagcggttcctcgccggcggcgacggcgagggggtcgacgtcacaggcagcagggagatccggatgatgccgttcggcgtcgggcggaggatttgcgcggggctcagcttcgccatgcaccacgtggagtacttcgtggccaacatggtgagggagttcgagtggaaggaggtggccggcgacgaggtggagttcgccgagaagcgggagttcaccaccgtcatggccaagccgctccgcgcgcgcctcgtgcccaggaggacgacctag

SEQ ID NO: 38960 - DNA, 1742 bp, Oryza sativa
  Clone ID: PAT_MRT4530_42546C.1
aattaagaagcatccatatcactatatcggcactgatcattcagaacacaggttatggtattgtactaggtagtgtttaattaataactcgacgagagtagtaagaagcatgcatttggattgagctaagctactgaaacggtgaccctaagccatacatgcatggtgatctaggcccttctgggcacgagacgagcgcgcagcggcttcgccatgacggttgtgaactcgatcttctcggcgaagtccacctcgtcgccggcgacctccttccactcgaactcgctcaccatgttcgccacgaagtactcgacatgtagcatggcgacgccgagcccggcgcaaatcctccgcccaacgccgaacggcatcatccggatctccctgctgcctgtgacgtcgaccccctcgccgtcgccgccggcgaggaaccgctccggcatgaactccattggcttctcccattctttctcgtcccttcccatctccgccaccatgaagttcaccgtggtgcccttggggatgaggtacccgccgatctccatgtcctccgccgccctgtgagggagcaccatgtgccccggtgggtgcttccggaggccctcgagcaccaccgccttcaggtacggcatgtcgtggatgtcctcctcggagacctcgcgctggccgccgccgccgccgccgccggtcttggccatgatctcgtcgtggagctttgactggatggatgggttcttgaccagctcggccatgatccactgcagcgcggtggacgtcgtgtcggtgccggcgttgaggaactcggagcagaggttgaccatctcgtcgtcggtgagcgggcggttgccgtcgtcggggagcttgatgtcgaggagggtgtcgacgtacgagtgctcgaacgtggtctccttcttcggctcgccgttggcgccgccctgccgtttcttgtactcccgccgcgcgttgatcagcggcacgaacagctccgtctgccgccggcggagggcgtgcgccttctggaggcgcccgcggaagaggtgcttggtgaccgccgggaagaaggcgaagacgggcatcttgctcgacaggtagaggagcgcgtcccgctgcgcgacggcgatcgcgcgcaccgcgtcctcgtcgagccgctcgccgaagcacatgagcaccaggaggcagaacatggcgtactggaacgtctccacgacggcgtgtggcgccgccgcgtcgccgttctcgtcccgcagcttctcgacgagcacgcgccgcacccacgcgcgcgccggcgcgaacagccgcacgcgcgacgggtgcagcgtctcggcgacgaggttgcgccgcaggaggcgccacacgggcccgtagctggcccgcgagatgaggttgtcgctctcgccgagcagcctcgtcgacgccatggcggggcgatcggccagggacgcccccttctcgacgagcgccgcgtgcgcgaggcggcggtcggcgacgaagacgagcagccgggacgcgacgcggagggagacgacggggccgtgccgcgcgatcaggcgccggaggaggggctcggcgtcggccagcgaattggtcagccacaccgtgctcccgagcaacggcacggccggaggacccggcgggaggcggccgcgcttcccgccgccgcggccgccgcggcgggagaggatgagccggaggaaggggatgaggacgaggattgcggcgacggcgacgtgccacgtgtccat

SEQ ID NO: 38961 - DNA, 209 bp, Oryza sativa
  Clone ID: PAT_MRT4530_42547C.1
cttttcaatttccattttgtagaacattaggattagagagaggtttaagaacatctgccaaatcttagttcttggcaaggaaagatcgacagacatcaaagcagcctctcgtcatgctcaatttttcctgaaaccatggcaaccttggtgttgtaaacaaagcaagcggtgaaagtgctgttgctgtttttgctaaaaaaaaaaaaaaa

SEQ ID NO: 38962 - DNA, 2298 bp, Oryza sativa
  Clone ID: PAT_MRT4530_42548C.1
atggacgcctggcagctgttcgtccccgcgatcgccatcctcatccccttgctccggctcatcctcttccgccgcggcgacgacgggagacgcggccgcctcccgccgggtcctccggccgtgccgttgctcgggagcacggtgtggctgaccaactcgttgtacgacgccgagcccgtcgtcaagcgcctgatgtcgcggcacggccccgtcgtctcccttcgcttcggctcccagctgctcgtcttcgtcgccgaccgccgcctcgcgcacgcggcgctcgtcgagagcggggcctccctggccgatcgccccagccaggccgcctcggccaggctcgtcggcgagggcgataccatgatctcgcgcgcgagctacgggcccgtgtggcgcctcctgcggcgcaacctcgtcgccgatacgctgcacccgtcgcgcgtgcgcctgttcgcgccggtgcgcgcgtgggtgcggcgcctgctcgtcgacaggctgcgggacgagcacggcgacgcggcggcgccacacgccgtcgtggagacgttccagtacgccatgttctgcctcctggtgctcatgtgcttcggcgaacagctcgacgaggacgcggtgcgcgcgatcgccgtcgcgcagcgggacgcgctcctctacctgtcgagcaagatgcccgtcttcgccttcttcccggcggtcaccaagcacctcttccgcgggcgcctccagaaggcgcacgccctccgccggcggcagacggagctgttcgtgccgctgatcaacgcgcggcgggagtacaagaaacggcagggcggcgccaacggcgagccgaagaaggagaccacgttcgagcactcgtacgtcgacaccctcctcgacatcaagctccccgacgacggcaaccgcccgctcaccgacgacgagatggtcaacctctgctccgagttcctcaaagccggcacggacagcacgtccgccgcgctgcaatggatcatggccgagctggtcaggaacccatccatccaatcaaagctctacgaggagatcaagtccaagaccggcggcggcggccagcacgaggtctccgaggaggacgtccacgacatgccgtacctgaaggcggtggtgctcgaaggcctccggaagcacccaccggcgcacatgctgctacctcacaaggcggcggaggacatggacgtcggcgggtacctcatccccaagggcaccatagtgaacttcatggtggctgagatgggcagggacgagaaagaatgggagaagccaatggagttcatgccggagcggttcctccccggcggcgacggcgagggggtggacgtgacgagcagcaaggggatccgcatgatgccgttcggcgtcgggcggcggatttgtcccgggctcggcatcgccatgcttcacctggagtacttcgtggccaacatggtgagggagttcgagtggaaggaggtggccggcgacgaggtggacttcgccgagaagcgggagttcaacaccgtcatggccaagccgctgcgcgtgcgcctcgtgccccggaccatcgttgcacgcgcatcgccgcccttctcccacatcccggcggcggcaacggctctgcatcccgccgcggtctcggctctgcttgcggtcagcggcggcggctaggtccgcatcccatcagtggcgcggcggggtccgcatctggtgggcggcggcggctttgcatcccgccgcggcgacgagtccgcatcccgccgcggcctcgactctgcttgcggtcatggcgacgccatctcctccctgcctcctccgcgccctccctcttgtcacctcaccctcttctcgggggctccgacgccggcctattacctccttgctccgctgctcctcgccgtcggcagatgccttgaactgttatgggcttgtgccattatgctcatgatctcctccaacctcaagggtattatagacattttcaaccaaactaaccagggaatgctgctcaatctaacgttgatgggcagaagggctgacgcggcgggcgcgaccgatggccggcggggaagagcacagctggcgaaggggaggatgatgtggggaggacatggcgggcatggctcggctattccgaagggaggcgatgctgggaagaaaggggaaggtactgacaggagcaggacgtcgtcgcgcgtctccggttcttcccacccgtcgtcggccgtgctcctgcctcaccggccgccgaccatgcccctcatgcctgcccttctccacgtggcccgtgcccaagaaggagagtactag

SEQ ID NO: 38963 - DNA, 387 bp, Oryza sativa
  Clone ID: PAT_MRT4530_42549C.1
atgataaggacatcactccttcgaatacacacaacaacaacaatcctccatcagtcattcaaggaccaataacaagagttcgtgcgtgacaattgaatttagagctgagctcgttcctatattctcctttatatgattttgagaatagattgctacctaatgattatattgtgattaggaacaatgaagatgacaaggagacacttggagagggacttagaggcatggatgatcatcaaggacgtccaagttaaggtggaggcccaaaacaagtcgacttcgagtacgattcggagttcaggaccagtctgcactaaaacgagtgcccaggtcgcatacgtgctcggattggggagttctttatatggatgtaaagctaagaagata

SEQ ID NO: 38964 - DNA, 411 bp, Oryza sativa
  Clone ID: PAT_MRT4530_4254C.1
tcacttgccgatgatcaagcccccgacaacactattgttcaccatgacctgcggctttccaaacgaacgaaccatgtcaccaacgacaacctctccaagcagcaacaccaccagccaactctcatcaccactgaagccccgccggccaactccggccacctcgtcagccaactccagccgaaatcggcttcctaccctgggctgacggccacttcggctccaactgaaacaaccacctttgccggccatcatcgcctctgccagccaccgtctttgccggcctcctgtatctcgaactcccttttcccccactagatccaggaaagagacagccaaaggttggccacccctccttctctgtccttcgtccttgtgttgccaccatttgctgccgccgcttctcacctccat

SEQ ID NO: 38965 - DNA, 381 bp, Oryza sativa
  Clone ID: PAT_MRT4530_42550C.1
atgaaggatgggagccgactatggcttgatgtccgcaacatcggacagttgaatgatgcggcggggaaaatgtattggctagggaaggacacggacgagctacggcgtgagacgggcaaccttggccagggccagtcgcgtccgcgtttgatctccgtcagatgccaagtcgagcgtctcctccctatttcatgttgtcttgctcagctactgcagtatgactgcagtgtggccatcggcaaggcggtgaggtccaacgcctcctacaaatccctatcctgtgatgtcctacgtaccccatcaccactaccaccggcgacgatggcttcgtcatctctcccgacttctgacaacgtggtagtgctgaagctccgaggatag

SEQ ID NO: 38966 - DNA, 453 bp, Oryza sativa
  Clone ID: PAT_MRT4530_42551C.1
aaacaaggggaacatgcatttcttatttatatatgacaggataaccaaagcagggtcactcgcttaacaagaccatgcgaaactcgaaacgaaacacgcgaccttgccagagcatataagccatcgcagcttattggtacactacattatcaaacaaaaatgtccattcgtcataaagcctcaggacttgaaggccttgacgtggaggttctcagagactccctcgccggtggcggtgtttgcggagtacgctccgagcgtgaactgggagttggcctctgcagcgggcgagcagctccgtctgcgccttgccgacattctgcggcttgccggcccacgccttgagcgtgctttgctgcaacgcgcggcccaaggagaaggtaaccgatcatggcttcttgcccctgctggccacctggttcatggcgatcaggttccttgtcgccttactac

SEQ ID NO: 38967 - DNA, 761 bp, Oryza sativa
  Clone ID: PAT_MRT4530_42552C.1
gcacgaggatcaacctagcttaatgacgtagacgagctagcttagcacacatggcgtcttcaacctcgagctcgctcgccgtggcaacaatggtggccgtcgtcctcctcctgggtgccaccacccaggcggcgcgcctcctcgacgaactcgtccccggcattccgatgccgacgatccccggtgtaccggcggtcggccccaccatcccggccatcccgacgatccccggcgttccggcggtcggccccaccatcccgaccatccccaccgttccgacgatccccggagttccggcggtcggtcccaccatcccggccatcccgacgatccccggcgtgccggcggtcggccccaccatcccgaccatcccgaccatcccgacgatccccggcgtgccggcggtcggttccaccattccgaccatcccgacgatccccggcgtgccggcggtcggcccgactatcccgaccatccccggcgtgccgacgatcccgacggtgccgggagtgccggagctgccggtaaatcccggaggcgtggtgccgacgatcccgaaggtgccattgccgccggtgaatcccggagccgtcgtgcccgccgtgccagctctgccggtgccgccgatccccggagccgcggggggtgtcgtgccgaccctgccggtgccgccgttgcccgccgtgccgggagtcccgctgccggaggtgcccggcgtccctctgccgccggtgccgtccgtcgtcccgcccgtgccttag

SEQ ID NO: 38968 - DNA, 393 bp, Oryza sativa
  Clone ID: PAT_MRT4530_42553C.1
atgtggcggctgacgggagaggagctagctgggagaagcactattagaaaatggatttctccaggcggtcagaacgcgttttcacaggctgctcaactctccgccaccctaccacggatctgccacctgtcgccgagatccacccgtgagccacctccaggatccgcccaccaccgcccttgcgtcatcgctaggatctgccggagtgccatcgccggatccaccacccgtgtcatcctcttcccccaccacatcaccaccccgcgcgccgcttccgagccacaccttcccccacgccgttacggccgagtaccgccaccccgcactgccgccgagccaccccctttcccgccaccccgtggagatgatggcggcgaggctatggactcgtag

SEQ ID NO: 38969 - DNA, 493 bp, Oryza sativa
  Clone ID: PAT_MRT4530_42554C.1
ggtaacaggggagggaggtagcatctggggaccggcaaggctgcaacacagtgatggtgaggttggaaggaatgagaaagacctgtgggggcatgtgtgattgaatcattagagatatactaaaaattagagggagtataaggcacaaccacttttaatccaaagaccaagaaataattactatcatctcctagtttggatcaccctaataaatataatgtatgcatacaatagaattagagatcttgagagcagaggatttaaaaaagtaataatttaatggagaagaggtcctaattaattatttgcatgcatccataccttatattatggaacatctaaccaaagtagttgtgccttatattatggaatggagggagtatatgcactgtacttcattttgtctaacaatggttggttgtctgctggtgttaactggagcggaattaatacaattgccatttgtcttcacttgttttcactatgtccacac

SEQ ID NO: 38970 - DNA, 1494 bp, Oryza sativa
  Clone ID: PAT_MRT4530_42555C.1
atgacggcacgtgatttaccattacgttatttagaagaaattacagatggattttcagacagcagaaaagttgggagtggtgggtatggagaagtttacaagggagtggaaagagcagggacagaaattgccgtcaagaagctttatcatatgtcagggattgatgatacacaatttaggaatgaattcaataaccttatgaagattcagcatccaaatattgtaagaatggaagccttgacaagcatctatgtgttagttggtttgcttggctgtgtccatccggttggatgcagaggtttggttttacctattttacaaaaacaagaatctcatggacttgattggtgcacaaggtacaaaataatcaaagggacttgtgaaggtttatattaccttcatgagcgattgaaagagtcaatttatcatctagaccttaaacccgccaatatactgcttgataagaacatggacccaaagatcgcagattttggtttatcaaggcttttcggtggaacacaaactcataccaccaggaattgcaaaggcaccgagttaataatagcaggtcctttgggatattccaaatgtgatgacatgcccccccaacaatttattgagcttgtatgcaagaaatggagggataggatggaggcaacatcaaactatgcatcaaccgaagaagattgccaacgattaaaaagatgcattgaaatagcattacgttgcgtggaggtggagagaaagaatagacctagtatgcgggatattattcgtgaattgaaacagatagacgaaactagtagttcaatgtcatcctggaacaaggtgaggattgccaagattgggcagtggggtggaattggaggtaattatcgtgatattgaggtggcaccctgccgtctaggaagcttgatgatcggttgtggtgaagtcatctactcaattgccttctcatactacgactacaatggacagcagcacaaagtaggtccatggggcggtgatggacctgataaaggtgtcaaccatacgattcagttcagcctatcagagtatctaacgggaatttctggaacaatcgctagctcaccatatggtgttattataacatcacttactttggtcacaaatacccgtacttacggaccttacggtcaagtaggaggaaccccattccagattcctatacaaattaaaggcagcattgttggtttctttggacgtgtaggttggtatgtagacgcatttggcatatatgtgaaccctaatcaggatgcaacacacgaagatgaggctgcggttgttaagattgggccatggggtgcaaatgaaggggaggcacacgacatcgacgtgttaccatgtcgacttgaaagtgtggcaatatgtagttctgactacgtcgaatcattcggattttcatatagtgacaggagcgggcatcagcacactgctggtccatggggccgtcctggtgggaatactcatacg

SEQ ID NO: 38971 - DNA, 1922 bp, Oryza sativa
  Clone ID: PAT_MRT4530_42556C.1
atggcggcgctgtcggagttggatgccaccgaggccagcctctccctgccgtcgtggagatggagctacagctacctggagaagatccggagcatgtccgtcgtcgggtcatcgtcgtcgtcgtcgtcgtctcgctcggcaagatccagtaactacagcagcaccgtctccagcaccgagtccggcgccggctctcaccgtcgtcgctgcaaaaccggcgctgcctccggcggctccttcctgagagtggtagggttccaagtcccaggccctcgcgatatcgccagccaaatggtccgtgacggcttcgtgcttgccctgatcggagcgttcggccgcgcgccgggacccgtgctggagaggtggttctccgagctcgacgtcggctgggtgctccggccaactgatcagcagcagcaggaggaggaggaggaggaggaggccgagcggctggtatggcggtggacgcgagcgctcaccgtgatggcccatgcgctgagcgccacgcagggccacctccacgacgagaggtcagccgccgccgccgccgccgccgccgtcgccgtcgttggaggtgtggaattcgcaatctcccagccgccacatcacacggcgcccgcggtagcttcttcctccgatcatgaactgctgctacgcggcgtcgtcggcggcggcgatgacctctgcctcgtgcggttcactgacacgaccatctccaagatgatcgccttcgccgccgccctcgccgccgccggtaaggccgggacttgcccaactccaaccgcggatagcttctttgggctcatggaggtgcacacctgcatctccgacgtgtcagagatcctcatgcccgccttgaaacaggaggctctcgatctccggctacctgattcagaacaaatgcaaagcctagtcaacaagatcggtgaagccatggcgaacacacaggacagcttgggtgaagccatacggaagacggccaaggatgctgaagctgttactcctgtcttgagcgccatggattcctgggaaaaattcacacagactgaaggaatccacagggctactcggttaatcgtggactatgcaagtttgttctggggataccgtagagtgctggagtccatcctatgttgttacaggagtgaaagtagccagaattgttgggagatagtacaaagcctgattgagcaaatgatcatcaccttcctggaccagctcgagaagaaatccgagtcattctctgaccctagcctgaggtacatcttcttgattaacaactcctacttcatacaggaccagtttcttgccaccaacaccgattacagcttcccatcgagcaaagggatcagatattggcactaccagaattgttacctcgatgtctcatgggagcccgtgctgtctttcctttacctatacaataagatgccaaagttcttccccaaacactccccgcagctgctggccagattccagtcggaatttcagaaagcgtgcaggcatcagaagctgtggaaagtcccgaacaccgagcacaggaactcgctgcgaaaagccattagtgacaaggtcatcactgcatacagaaagtacctggagggccatctggagccagagaaaagtagcagcgatctgctggccatggaagacatggtgaacgagctatttgaaggatgaaggagtactaattcctgttttagaattacatggcctaattggccatgcgtataggataaattttgaagcagctaacaggacaaggggctaaggttaaacaagttcattcgatgcctcttttttctagtgttctgattttttttaaggaaatcttcattctaccttgacaaggaataatatgtacttcagtcttgctgtgccagatttgttggcacattgcaatgcgtgcttcctcttgtatt

SEQ ID NO: 38972 - DNA, 1873 bp, Oryza sativa
  Clone ID: PAT_MRT4530_42557C.1
tttgagaagtcagaaccatatgcgtcagcaaacaaattcttcaaattacatagtagtacacaactgaaacaagctgcccatttcgcagctgctatatatttacaccaatcattctgtatgaaacacacaaatcaccgtcataatacaggctaagctattgttaccatgaccggatatacacttggatgtagaggttgcaatgattttcactatcggaaaaaaaaaaaagagctactgttacctttgcccagctcttttcgctaacctccgcaattgaaaatcacagcacagtggtgcagcttaacttcttgccaaccaaactgtactaatgtactaccaaaaatgtgtcctccccagctcagctacctagcttatgagttatgaaagctttgcttcagtaagagaggactcaaattgtcaagttgtacttatttagctttcgccagccagctttcagtgttttggtgccaacaagaggtacattttgacctatcatagattgtcttttcaacaagaggttgtagacaagctcattccaggtatcagggactccaggcaagcaccagtggctgcaatcttgcctgtagagagggacagggcctgaaggactcaggtgtactgagacgtgcccatctttccgttgagccgtcatctgagtcacgttcagtatatccaacccgagaagcttgggcctgaagctgttccctagtacatcatttacggggttaagaaaatcagcccattgctccaatgatttaactggtgtcacatccggatgagtttccaaatgacaatttcctccagtcttccagtcaccacctctgaaatgcacaggagcatatgtacggaagatgacatgggtcttgcttgagttaacctcattgtgaagccaaccaaacaatgtctgtatggatcttttgtaagcatctccgacagtcatgtccattttaactgcatccccttcttgaaaataggtgccacttctgattgttttctcgtagttccaccagtgcccagtgttaaggatcaatacatcagcatccctccactggccccggtcagacaaccaatccatggcatctaccctaattgtatatttaacaaccccaggagctccaggtggggcacgcccttgaaggactataaaaggagatctgtaatattccacggtgcaattgtagtctctaaacttgaaaattaagaaacccatgtgttttgtgatgggattcccattaacttcgaagatggagctcttatcaggaacagcaacagagagcatacaaagaagagattcccactggttccgcccaattgaatcaccaacaaatactactcttttgtttctcaacttctccagcatatttctggcatcaaatccagtggggagcataaggcatcgagtttccaatcgcggtgcacagttcctaagtgcggtggtcgtcaacctcatttccgatccaatctcaccaggtatcctgctaaaagggcccaaagtcagaactacatcgaccaacctggggagatcgcagcgcgacggcctccaccgccacttggagtaggacgcgtcggggcggccgttctcggagcaccggaacccgacgtccaggaaggggcagtccgtggagtggtagagcgggtagctgtcgttccacacccactccccgtcgaacaggtcgcactcctcctcctcctccccctcggcgcgcgcctccaccgccgccgcctcggccgcgatggagaccccgccgctccagagcttcccgggggccgccgacagcgcgaggccgacggccgccgagcagcggagcgaggcggcgcagaggagcagcaccagcgcggcggcggcggccaccgccacggcgagccccgccat

SEQ ID NO: 38973 - DNA, 363 bp, Oryza sativa
  Clone ID: PAT_MRT4530_42558C.1
atgagcacgccgaccgccgccgtccgtgagcacctccaccatggcgagcatcctcttccagctggagacggggaggtgcacgaccttctactcgcccgtcagcagatcgtaggcgaagctgagcgccgccgaactgctgatgatctccccaccgccccggccgccgagcctcgccgcctcgtcgccaacctccccgaggccggtcgctgcctcaccacctcgttgcccgccgccacgccgcctcccgcccactcccacgtggagaggagaggagaggagaagaggagagcagagaagagaaagaaatggagaggagaggagagaaagagagagatgagtggaaacaatagggagaagaggtga

SEQ ID NO: 38974 - DNA, 2736 bp, Oryza sativa
  Clone ID: PAT_MRT4530_42559C.1
ttgactgtccttccgaactgaccccgggctgcaggaattcggcacgagctactgcttccttcacctgtctttctgttgaggtacactctttgggcacagtggccattttgcaacatttgtgtcagtccaggatgttggaacaggacgttctttcaccgtgtaatcaatatacttggccacgccattgatctggacttgcgtttctttctcaattagagcagaaccgtactgcctggtgtggccttgttgattgtcgtttatgagttctgtgtaagcttcaatgaccttagttttttctgactggaggatgtaattgattgttattttatctttcaatgtcaaaccaaggttcgctgatcctcttagtctttctgcaatggttttgttattgtcatctgtctcagttgcttcatccccagtgattatgaacggagcttcctctgttccattaccatcaatctctttggctaaatttgtctcatcctcgatggctagtgtgtttttccggcatatttgttccacggaaagtaacttgtttgtcaatttgttctccatgaactgaatggacctttctaactgttggagcatgtcaacaagtactttgatgtgacctgaatgctctacggctgcaatttttgctggagatttgattttcgtttcatggtcatcctcacactgatttagctctctgtcatcatctttttccttctcattgtcagtaccgtacggcatgtgatcattagcatatgcaaaagattgttgtgcatctatttcttcgttgtcagaaagtatgggatagtcattttctagttcctcaaaggcagtgtcttcctcaattctctgttcattgatataaaagtcattttctctgtcttcaaagccatgcgtgtcatgctcatacctcaatccccccccttcagctgttctgcagtcatatttgtttctcaacctgacattggctgcattccagaatgaaatcaggggaatctgacgtccattgtaattgatgttgcagaactcagagtttactgcctgcagtaatggaagattgccttcaatattttttagtcctcccttgaattcatgggcctttgtagtaggacaaaggatgtacccaatggtgaaaaacatcatccttctaatgaaatcttcctcgttgatttcagattgtttcgattcttctaaaattgcttcttgcaatgatatgagtgaaatattcttgctctcgccatccttgtgcctagaataaatcttgtaatcctccgtgatcaatggcggcagtttggaaatcaccggtccttcggctggaatatccaatatacaccggttgatgttaatctctggcattgctaacaagcctccaaatccaattttttccatggccgcggttagcttggtagcacgttccactgcatgccacatctgctcaagtgtcttctgaactcttgggtgccatggttcgtcgacccaaaaaaatttatcgcactgatcctcttcctccagcggacaacctaagaaccttcttcctgtgtcaggtccttcccaagctgtcctccgtttcggcgtgaggccatgcctgcaagttagtctggtgccaagctcctctccacaatactccgaatcttcaatgtacatcgggacatccatgcacagaccatggcgatattccttaacagcgccgtccgccattgcagcttcgttgttctgtaccttcttgcttgttaccatggctgttatctgtggagtgaggatgaggttgatggatgcactagtgtgaccagcaactagtgcttcctctttcttcttcttcttctgctctttcttcttcctttggcactggaggcggccaggctgtcctcggcactgcaggcgctgcggccggttgcacggctgcaggcgagctcgcggtgggacggccagctccgagcagtgcagtgtgccgactagagtcgccgaggtgagttcatgttggaccatacaaacatccatgttcaccacagccatcctgtactccaccctctgggacagcaaaatcacacatcttcgttcactttccatgtcaccactttcaatatcattccggctactttgcccaaccacataaccaaactcaatgtcaaaattttcataattttcactactatcctcttcaagcattagattctctaacatcttcattactttcaccgtgctctcttctgtcatggatgatttgaaaaaagcttcactgttctcatctgatactttatgcttaaccttgaactcaacccattttctctcaaactcatcttcttcaagtggagcatgcacaaggaccctcttcaagcatcctgcttcgtcggtctcatactcataatagaaatccatatcatctttctgacgagcttgcatgtacttaataacacggtcagcatctccaccatcaatccgtttcttcttcataagacataaaaaattgaatgctcgaacaatagttttgtaaattagttcagtacaactccccgtattatcttcatgcatctcttcagtatggtaggcatcctttcattgcctaaatcgaatgttcgattatcctcgactttgttgacatcagcttcttgtttgggtctaaaagcatcggcttgtatagggactgacttcctttttttggacagggtgtttttgatgtcctgtaagagttgcagttcatttagctatatattatgaacaaaagctatatattatgcagttcatttt

SEQ ID NO: 38975 - DNA, 1455 bp, Oryza sativa
  Clone ID: PAT_MRT4530_4255C.1
atgccgtgcacgtcggcggcgtggatgttgcacgtgggtggtgcggcggcggagcaggcgtcgtcgtcgtcgtcgtccaagggaggggggagggtggtgacggcggggacgacgacgatggacacgggcgggtacaataatggaggtggtggtgggggtgggggtggcaatggcggcggcggcggcgaccaccaggagagcagcagcagcggcggcggcggcgggcagtcatccaggctcgcggcgcgcggccactggcgccccgccgaggacgccaagctccgcgagctcgtcgcgctctacggcccccagaactggaacctcatcgccgacaagctcgacggcagatccgggaagagctgcaggctgaggtggttcaaccagctggacccgaggatcagcaagaggccgttcagcgacgaggaggaggagaggctgatggcggcgcacaggttctacggcaacaagtgggcgatgatcgcgcgcctcttccccggccggaccgacaacgccgtcaagaaccactggcacgtcatcatggcgcgcaagtacagggagcagtccaccgcctaccgacgccgcaagctcaaccaggccgtccagcgcaagctcgacgccaccaccgcctccgacgtcgtcgtcgcccaccaccacccctacgccgccgcccacgacccctacgccttcaccttccgccactactgcttcccttttccggccgcctcccccgccgccgccgacgagccgcccttcacctgcttgttccccgggacggcggcgacggccgggcgcggcggcggcggtggcatgacatggccggacgccatggccgctggcgaggtcatcgacgacggcgccggcggcggccggtacgtcgtggccgagccgccgccgccgttcctggtgccggcggcgccgcacgggtggctcggaggccacgagatgatggtgatggtgaacgacggcggcgacgtcgccgccggcgtggcgtcgtcgtacgacgggatgataggcagggatcagggcggcggcggctcacacttcgaggcggctgcggcggcagcggcggcgccggcattcatagacttcctcggggttggcgcctccccccattttcctaacccacctatctcgtttttcgcgcgcacgcttttcaaactgataaacgggcgcctccggccaccagatctggccatcgtgaggccaccgatgatggaggatgactcgaggtgtgcggcgccgatcccgttgccgtcgctctcgccgccactactagcaattcatggttgtcatcctggggcctcctctgttagatctggccatcgcgaggctgcagacgttggaggagctgaggcacgtggcagctgctcccgtcgccgtatgttgccacattcaagaagtgaaggagaagtgaagagggagaaggagaggatgcagagaaaagatgtgaagtga

SEQ ID NO: 38976 - DNA, 479 bp, Oryza sativa
  unsure (1)..(479): unsure at all n locations
  Clone ID: PAT_MRT4530_42560C.1
aaatgaactgcataatatatnagcttttgttcataatatatagctaaatgaactgcaactcttacaggacatcaaaaacaccctgtccaaaaaaaggaagtcagtccctatacaagccgatgcatttagacccaaacaagaagctgatgtcaacaaagtcgaggataatcgaacattcgatttaggcaatgaaaggatgcctaccatactgaagagatgcatgaagataatacggtgagttgtactgaactaatttacaaaactattgttcgagcattcaattttttatgtcttcttctctaggatgagacaaatttagccaaagagattgatggtaatggaacagaggaagctccgttcataatcactggggatgaagcaactgagacagatgacaataacaaaaccattgcagaaagactaagaggtcagttcggaaggacagtcaagccatcatatcaaactcaaagtgatttcat

SEQ ID NO: 38977 - DNA, 527 bp, Oryza sativa
  Clone ID: PAT_MRT4530_42561C.1
ctatataacttgatgctcgcagcgtggcgactccactccacggacatccttgacagcagttatgaacctcccttcccatccccttcccattcccagccgccacgccagccgccgccagctcgctaggccgacgcacgcaccgtcgccgcgccacggcgccagcccggcttcggccgtcgcccgcggcggcgcggcccaccgcccgcccgccgacgccgcctcgacgcctcctggctcttgcccagctgcggagctgcccaacttgtctcctcccatcctcgacagcagtcagaaagacagcaaccgagcaacgactgaactgaagtgtattgattatttgaatgattgcaataagcaagatggggccagaatatttgaatgatagattgattacattcattgaaagagatttcttcttgcaagttaataatgaagacatgatcaatcattttcaaaatatcaagaaacgaaaagatctctctaaaatatcatattcataaattcttcacatgaggaatagggtcgtg

SEQ ID NO: 38978 - DNA, 2770 bp, Oryza sativa
  Clone ID: PAT_MRT4530_42562C.1
aattcggcacaaaaagtatgcatcttcaaattgctcacgttgccgcagtaaatttgccgctgtcaagagaacccttatgaccaatgcgaaaatgacctttgcagtccagtttagcaccggcggggagatgcggctgcataaggtgctgcgggtgtcgtggcgtatgaaaacggagaagaaccggaagatcaatgtgctacactgcgaagagttgagtccctgcgaaggtagaggtgttgcgggcgtatttcctttcgcgcagatggaaaaagctaagccgggtaaggtaacatcaagcacttgttcttcctttcagtttgaaagaaatgttgcaattgactggagcttggaaaatagagatagtagttttgaatacatggctgataattgattggaaataacctagatggaaaaacagtgttgcataatataaaagtttagatagatacacttagatggaaatacagtgtttcaaagatgccactaattggcttcaaagcttcattgtaacttcagatgtggacgaattttctgaatgtagacgtctgatgtcgtcgtggacagcaagcactatatttagagtagtgttgattaggttggcggcgacctttagtctgaaaacttcattcggttccatatttaagaagtcgctcgttaattcctttccatcccaggtctccatgaacttcaaagcatttaacccacatgaccaactgtctttctgttgaggtacactctttgggcacagtggccattttgcaacatttgtgtcagtccaggatgttggaacaggacgttctttcaccgtgtaatcaatatacttggccacgccattgattaggtttttaatatcttcgcttgcattgtaccattgtggctgcatctggacttgcgtttctttctcaattagagcagaaccgtactgcctggtgtggccttgttgattgtcgtttatgagttctgtgtaagcttcaatgaccttagttttttctgactggaggatgtaattgattgttattttatctttcaatgtcaaaccaaggttcgctgatcctcttagtctttctgcaatggttttgttattgtcatctgtctcagttgcttcatccccagtgattatgaacggagcttcctctgttccattaccatcaatctctttggctaaatttgtctcatcctcgatggctagtgtgtttttccggcatatttgttccacggaaagtaacttgtttgtcaatttgttctccatgaactgaatggacctttctaactgttggagcatgtcaacaagtactttgatgtgacctgaatgctctacggctgcaatttttgctggagatttgattttcgtttcatggtcatcctcacactgatttagctctctgtcatcatctttttccttctcattgtcagtaccgtacggcatgtgatcattagcatatgcaaaagattgttgtgcatctatttcttcgttgtcagaaagtatgggatagtcattttctagttcctcaaaggcagtgtcttcctcaattctctgttcattgatataaaagtcactttctctgtcttcaaagccatgcgtgtcatgctcatacctctgttcatcattcaaaaagtctggatgttctatctgttcaataatcaatccccccccttcagctgttctgcagtcatatttgtttctcaacctgacattggctgcattccagaatgaaatcaggggaatctgacgtccattgtaattgatgttgcagaactcagagtttactgccttcacatgttcccaataccaacactgcagtaatggaagattgccttcaatattttttagtcctcccttgaattccttcaagcaatcgcagagatgttcccttgttaagcttgcccaattgatagtgtgaatttttgttacatctctcagtaaaggtagatagctggagctgacatgggcctttgtagtaggacaaaggatgtacccaatggtgaaaaacatcatccttctaatgaaatcttcctcgttgatttcagattgtttcgattcttctaaaattgcttcttgcaatgatatgagtgaaatattcttgctctcgccatccttgtgcctagaataaatcttgtaatcctccgtgatcaatggcggcagtttggaaatcaccggtccttcggctggaatatccaatatacactggacatcccaaagtgtgatcggtaaactcttgtcttggatcaatattgtttggcttttgacgtcgtaccgatcagctaaccaaatacaaattacccggttgatgttaatctctggcattgctaacaagcctccaaatccaattttttccatggccgctgtcacggagagaataggtagtttcctaccatgacgccctcttttgccagggttgcggcgacgagcagtggaagtgttgttgtcggttagcttggtagcacgttccactgcatgccacatctgctcaagtgtcttctgaactcttgggtgccatggttcgtcgacccaaaaaaatttatcgcactgatcctcttcctccagcggacaacctaagaaccttcttcctgtgtcaggtccttcccaagctgtcctccgtttcggcgtgaggccatgcctgcaagttagtctggtgccaagctcctctccacaatactccgaatcttcaatgtacatcgggacatccatgcacagaccatggcgatattccttaacagcgccgtccgccattgcagcttcgttgttctgtaccttcttgcttgttaccat

SEQ ID NO: 38979 - DNA, 507 bp, Oryza sativa
  Clone ID: PAT_MRT4530_42563C.1
atggtgacggtggcacaagcggcggcgaacctcggtatgcatgtgcatgtcgagctccggcttgatttgtgcaaaatgtgtgcatggatgtgcggcaatagggttcctagagactcactaaaggtcgtgcgtgcgctgacgaagcttgggcgacgacgacgatgcgtggagcgacccggcggcggtggaaaacggtggtgcgacggcgacagcctcctccagcctccggggatctccacatcggtggcgtcttggcttcaatcttcttgggcgtctttctccttggacctgggtgatgtcgttggcgcagtggtttggcctgagatccaccggatggacgggaacagagaaggaagccggcgacggcgctctggagcagaagacggcgacgcgcacggcacaaggtggttgatctgcgccaaaatggacggcggcagcggtggtggttgccggaggtggtggtggtggtactcgacgctgtgctgcaggttcaggccgctcgggtag

SEQ ID NO: 38980 - DNA, 1047 bp, Oryza sativa
  Clone ID: PAT_MRT4530_42564C.1
atggcgtcggcgaagttggtcatggcgttggtggcggcggccgtgctgatgcagtgctgcggcgtgctcctcgcggcgaggccgttggaaggggacgtcgccggaggcggcgggtggcggccaatgcagaccgccggcggcggcggcggaaagatgccggtcatgcagatcctacaagctgtcccaatacagccggggaacgggtgcaagcaagcccccagccctcccggcgcaccatgcttcggcagccgccgttccgccgccgtcgcccatgcgtggtgggaagtaattcctgcgccctcccccgccggcagagcagcggtggaggccgccgctggcagagcagcgcaggaggccgccgccgagcaccggcgaccaccgcagacgaccgccgcccaccgccccaggcagagaagcgcaatcccctaccgctgcccaccgccgtccaccaccgcctttcttcgatccgtcgccacgccctcgcctgtgtcgcctagtgaggatgaaggttttgctttctataaccagtatgcgaaagagaaaggatttgttacaagggatttgtacaatttttttgtgaaaatgaagaagaaacggattgatggtggagatgctgaccgtgttattaagtacatgcaagctcgtcagaaagatgatatggatttctattatgagtatgagaccgacgaagcaggatgcttgaagagggtccttgtgcatgctccacttgaagaagatgagtttgagagaaaatgggttgagttcaaggttaagcataaagtatcagatgagaacagtgaagcttttttcaaatcatccatgacagaagagagcacggtgaaagtaatgaagatgttagagaatctaatgcttgaagaggatagtagtgaaaattatgaaaattttgacattgagtttggttatgtggttgggcaaagtagccggaatgatattgaaagtggtgacatggtgcttgatccgacacaaattgtccctaaaggagctccgacaaagagaatgaggggtttcttggagaaacgaaagtga

SEQ ID NO: 38981 - DNA, 490 bp, Oryza sativa
  unsure (1)..(490): unsure at all n locations
  Clone ID: PAT_MRT4530_42565C.1
nnnnnnnnttttttttttttttttttttttttgactaaaaatggcaatgcacaatttagaaangatcagcataacaaaaccatgtggtcacatcgaattctgtatttgattatagtatttgggtctatcaggacaaaatttgaaacatacaaaataactacaccttcttcgccagcgtcctctgctttgtgccatgttcaaccactttttcttcaacatgaagccccttccttcgcctgacagaattcataagcttcttagctaaagtttggcccaatgctggaaccatctccaaaattcttaatctcctcatgcgttttggggataaagaaaggggcctcaggaatagcttcccagtggctaagaacaagcagagcactggctgcaccaactgttacactcctaagctcattagaaaatccaacgctctcaacaactggtaagtatgcgtgcacagtaaataaagaagttccctcttgcatctcctcct

SEQ ID NO: 38982 - DNA, 504 bp, Oryza sativa
  unsure (1)..(504): unsure at all n locations
  Clone ID: PAT_MRT4530_42566C.1
atggcgcagccgcaagccgacggtgcagcgaggccgtggaaccttcggcagcggacgcggcggcgcccagccgcctccatgtcgtgggcggcggcggcggcggtgccggtgccgtcgtcgtcgcggcgccggaagcgcgcgccgttctcggtggcgctcacgccggaggagatcgaggaggacatctacgcgctgaccggctcacggccgcggcggcggccgaggaagcggccgcgcgtcgtacagcggcagctcgattcgctgttccctgggttgtggctgacggaggtcaccgccgacgcgtaccgagtgccggacgagtagccgccgcttgctccggcacgacggcngcngcgcncgcaaaggattnctcccaaactttgaaganccccacctatcctcanctcnncaccacatngcggntctaagatcnngccncgccccggatttataactgctagggctacnctgtcgcgtcgagcccgtatgtgcncgngcgnttgt

SEQ ID NO: 38983 - DNA, 813 bp, Oryza sativa
  Clone ID: PAT_MRT4530_42567C.1
ccttccagcacagtgacctccacaagccaagaagctgcaagagcaagccaagccaagccaagaacgaagcagcagcgagagcgaggtgagcagcgagcatggcgggcgaggcggcggcggcggagcggtgggtgggggcggcggtggacttctcggaggggagccgcgcggcgctgcggtgggcggcggacaacctgctccgcgccggcgaccacctcatcctcctccacgtcctcaaggaccccgactacgagcagggcgagaccctcctctgggaggccaccggctccccattgattcccctctcggatttctctgaacctacaattgcaaagaaatatggagcaaagcctgatgccgaaacattggacatgcttaatactgtggccaggcagaaggaggttgtggtggttttcaaagtcctttggggagatccccgtgagaagctatgccaagccatcaacgaaatccccatgagctgcttggttattggaagcaggggtcttggcaaactcaagagggtgctgttaggtagcgtcagcgactacgtcgtgaacaacgccacttgcccagtcacagttgtcaagacagccgatggttgatcctattgtcataaatatccatgtgttatatagtctgcttaaatctttgtccatctatctgaaacatattgaaccaccatgcagtgtaattgtaataataaacgaagtcaactgaagacgctcagttgtactttgtgcttgcactctctgagcctgactatgaaatggatcctgctgtttttcttagcaaaaaaaaaaaaaatttgggggc

SEQ ID NO: 38984 - DNA, 330 bp, Oryza sativa
  Clone ID: PAT_MRT4530_42568C.1
atgaggttcgtggcggcgtacctgatggcgaccattggcggcaacgcgagcccgaccaaggacgacgtgcgcgccatcctcggcgccgtcggcgccgacatcgacgaggacaagctcggctacctcttcgaccaggtcgccggcaaggacctcgccgagatcttggccgccggaagcgagatgctcgccttcggcgccgctccggccgccgccgccgccactgccggtggcgccgcggcagctggggagaaggaggaggaggagaaggttgaggagaaggagaaggagggggaggacgacatcgtcttcagcctcttcgacgacgaatga

SEQ ID NO: 38985 - DNA, 737 bp, Oryza sativa
  Clone ID: PAT_MRT4530_42569C.1
cggcggcttcaaggggcgacggttggaggagcagcggtgcccgcaggtggtacctcatttggtagtgcgccgaggggtgagacgaaagtgatgcaactgcaagcggatcgctcgcctcctccaatcctcgcataaatcaacagaccatttaccttcagaagctggggtcatctctacactgacttcactagttttgttaagcaattccccatcccatggagaaccaggaaacagagtaatagctcaaggtccaggcatgtcatcaagggtttgacatcatgactcaaattgttggtggcatgtcatttcagagcgctacagcaatcccaggatgacaaaatgatccatttattgatgcttagcaactctgctgggggcataccgtatgattcctcgtgaagtggagtggatcatgacggtattgaattttgatttctccttgctgcttgacttgtgtaagaaggcccagcctatgcagccgtgcgaggttttgtaggccttggttagaacatagaaatgggcagcgtcgtgcccttagttcatatatactagtttctaagaaattcatatataaggagttttcgcgaaatcgcaccgtttgatagaccaaaaggcatggcgttggatggaatagttgcattccttagaaaaggatgcaccctgtctttcatcctttttccgaaaaatattcttcctgtttcttaatgtataaggatcaaaggcgtccttcttatggc

SEQ ID NO: 38986 - DNA, 141 bp, Oryza sativa
  Clone ID: PAT_MRT4530_4256C.1
cagtcagtactgctacaggcgggtctatcagtacaatttcctcagctcacctctctaagaaggcatggaaactgtgcatgccaaatgcataccatccattattgctccaacaacaccaggaaaatctgcatcgtgcaaaaa

SEQ ID NO: 38987 - DNA, 586 bp, Oryza sativa
  unsure (1)..(586): unsure at all n locations
  Clone ID: PAT_MRT4530_42570C.1
gtgcgtgctgcctgtgttgcctcggctctgcacaagagcacaggtgccaccaccacgagtttctcaatccagttggattcattggatgcacccaccatcaacagatgaccagacacacacaagttacaagtacacaacgcaagcaagcaaggtcatcctcctcctcggcttctccgttgctctccctcagaatcacttattacttgttcatggtcatgggtgctacagggaattgaatttcagatcataagatttaaccaatattgctgacaagatgctcaagggacctgtggaccatcggagccatcccatcagtgcaactccatttgaggtgttttatgatggatcatggcatggggtaaattgtataaggataaggaacggcaacctgtttgttaaatttatctactctggatcaacagtcgagcataatgttgatggggattgtctacgcttacggtcgagaagggcgacttgttctgattgttcaaatgttctcaagccaggtgttgatgtctgtgtgcagtcatctcatacacccgnaagcaagttcacaagggaggaaccaaacgcttctgtagttact

SEQ ID NO: 38988 - DNA, 3549 bp, Oryza sativa
  Clone ID: PAT_MRT4530_42571C.1
ggggtcagcctggcagcttggctcgtgggtgtgtttgtgcgtgttgcggcgctgtgtcgcgcccagcgtctcggggtctgctgccccgcccccctccagctcccggggcggcccggggctgtcctcctcccccccccgggcgaccggctctcccgtgatcgtgctccgttctgcttctccattgcggtttcccctagcgcctggacccctcggtccctgtttggttgcgcccggctgtccacccgcgcgggggcccctcgctcgcctgtggtcgtccccctctcgacccgagagtgagagccccgctgtcccggggcccccccgtccccctcttcctctcgttcacctccccctcacccccgcagctaaaagcccacgccaacaccgcccggctgtgcctttaacgcgagccctttgtaggaccatcctgggactactgagatcccctgttcatttgtaattagacatcgcataacactgtccttggactataccatgatatgtgccagcttcagctgattgggaatcttcctttgaatatgatttttttcccatgtatatcttcctcccacttcaagaagttgcacctatcaacaataccacatccgcagaagtaaagctccgagtatcgctgatagtcaatagagcctcaagcggtgttgctattctcaacagaagtgggatctgtttcagcagaagtgggatccttagctgacacatcagaaggtccatttgattggatcatgttgcttaacggcttgacactcacacataagtgtcttgcaaccctgctggatccattgattcggccgaatgacatgcaatcagcaagccgcgtggatgtggaaaatttgtctgcagatccctcagtcatgtttatctgcttgggtctcggcattgacttgagtctcccatttttcacatttccattattagcatctctatcttcagaagccacagttggaaggtccgacccaaaggctgcattagccatgctatcagcttttgagttctcttcggctgatttccttgatggtgctctcttgcttttcattacagcaccatgattatcagtagagactgaacccctcattctttgtttggttgctcccttctgaacaccagagatagagcccctcattctcttgttgacttctcctttaccagagagagagcccctcgttgtcttcttggttgtgccttcttcaccaacagatgtagagccagtcttccgtttcgtggctacctcattatcagcactgatagtgcccactgtctctacgacagcctcattatcaccagagatagaccccttcattttcttttgcacaacttgatttttgtcagtaatagatctctttctcttcctggctccactagaacaattagaagagttgttgacatcacagacagcaagattttcatcagtttgctttttcgatctacttctagatggtttcttctttgaatttgctgtggttgtgtttacagcagcctcagcatcaatagattcagaaagaggtagattcatagaaggtgaagaatttgatgtgtcaccagggagtacattgtcctcacatggtattctagaacgttttcggggcttcctgactttagcactcacagtgttctcatcacttccatcaactttggagcgaacaagtggcattaagtcactgggtccaatggcaggtcgctctgtttctctgtcaacaaagttgcattgaagaatggatttctttatttgttgagctgccttaactgaaggcaatttatcttgacacaactttctccatcttctcaagcacatattgtcagtacggtgaggaatcttcgccccagcaatcttggaccagcaaggcccaaactcatcgactgatgccaatagtatggagtcttcttcaggtcgccattccccaagatctatatcaggatcaagaacattgcgccacctttcattgcactgactctgtgtgcgaccaggaatgaactgagcaatcttattccagctgccagacccaaacaacttcacagctaccatgaggcgtttatcctcatcaagagaccatctccccactcttgacctttcagggtttaaggtttttctccacctgttagagcactgattgccagtgcgaccatccatactagctgatacaagttgccaattagttccaaaggtgttgacagcagcttgaagttgaagatcttcttcttcagcccagtccttattcaatatgcagtgattaagacttcgctgataacgaacaaggcactggaaaggtgtcctgtgagtacccaatgtaactgcaatgttaatccagttattcattccttgctgttgaacagttagtataagtcttttttcctcccgagcagtccaggcattatgactaatcaatggatcatcaaagtttagccacctcgattcacattcagcaccagatcgaccaggcaggtacatagcagctattttgtcccagtttattaatggcaggaccgatctaagactttcgggagtaacctcaaaattgccagcagtattcgtcagtgcatatgccatatctacagcactgaagtcaccggtggaacttcctttattgatcgagttcaaaatcaatgcctcttggtattgctgctttattcctttagcaagtttctctttctcaacatctgaccacggttgcttctgaagagacatagggagttgcttcagtaccattttgtactttgaaacatgagggttatctgcagggccaagaaataatgcaggtgtcttcttatctttattcttcgttgattgtgcacatggctttcgagaggagatcaatctaacacgaggatcctccttttggcacaaaattttgccaaatgcttttctgcagcttaattgataatccaaaagacattttacacgatccctgagatccttattttcttcaatttttgcttcaatggtaatcatcttccttctaatgaacttctggcatgctctgttcttcttaagagcatccactaacaacaaggcagctttaggaaacccagttctggtagttgcctctttattgtgcttctccgcatcaaattcttcatcaagttcatttccaaaaatattgccactcccttcctttgatgcctcagtttttgtgttcatctctgacccactggaggtaccggagtggtagtgcgagaaccggcgctgtatcgcgcggagcgtctcgaggtcgtcctcgtcgtcctccgagtcggagggcggccaggcgcagatcgggcgcggcaggggcgaggacggcgaggccttgttgaggaggagattctcacgtatgctgcggacgagggccaaatcctcgtcctcctcctcgtcgtcgtcatcagacaagccattcacctccgctcccgccgccgccgccggcggggcggcgaggcaggcggagacctgcgcgaccgccgcgtcggggtcgttcccggagaggatgcaggattggcgcagcgcgtccaggtccctctgcaggtcctcgtcgatgtccgggtcggagtcgtcggagtaga

SEQ ID NO: 38989 - DNA, 2037 bp, Oryza sativa
  Clone ID: PAT_MRT4530_42572C.1
ccgccgcctccaaaaagcatccacctgtacccacaaacggaagcaaagattccaactttcgatcgagagcctcgccgtcgattcccccacctcggctgagcccggattccgaggcagcccccccatggcgggagccgagcgaccctactacccgccgcggcccacggacggcggctccggccagcccgccggctgcgactcgccgatgaggtgggacgacgacgacgaagaccacggtggcggcggcggcgatggcatgaccgccgttgcgggattcaacctgttcgaggaagaatcagatgaccctcctgccaaaaatggcgtggtcgacgatcctgatactaccactacaagtgattgcaacactgatatgagtgaggatcttgtaaagagggaagaagggatgaacttccattgtgatcccccgcttcacgaacatactggcatctgggtgcctgtttctgtcccgccaatgaccaaacgcgatcacgaggagtggcataagggctttggtcataatggtgactactttccagaagacgaatttaactgggagatagatgaagagaacaaggagatgacgatgtgggatgtattttctgagatggttgttgcggcaaaggataaggtaatatcagttgcatcgtatgatcttgggagacgtggtatgtctatgttgtccaagtttttcttccaagaagcttggaaggatatggcccaaacacttgcagatgccaatgctggcattgcgaatgagctcctagagactgaacgaacaatatggttacctgacagcgctgccagcgcctgcatgctctgtaacgtgcgttttcatccgataatgtgctctcgacatcattgtcgtttctgtggtggtgtgttttgtggtggttgttcaaagggtagaagcttgatgccaccgaaatttaatacttcagaacctcaaagggtttgtgatgtttgcggggtacgtctagagagtattcaaccttacttgataaatcggatcagtcgtgcttcacaacctccaactcatgatgtcactgatctgagtacattgaggtcgtggctgaacttcccttacgcacacacaatggaatatgagatctacaaggctgcaaattctttgaatagttactgtaaggtgggaagactgaaaccagaaaaggctatcccctatactatccttaaacaagcaaaaggccttgctataattactgtagcaaaagtcggtatgatggttgcatataaagttggtactgggctggttattgctcgaagagccgatggttcatggtcacccccttcagcaatcgccacttgtggtattggatatggagctcagcacatcataacaaaatcagataatttccgacttacccatcaggctggaggtgagctagctgatttcattattgtgctgaggaacacagaagctgttaaaactttcagtggaaaggcacatttgtcagtcggtgctggtgtaagtgcttctgttggccatgttggacgagtagctgaggctgattttcgtgccggtgatggtggttatgctgcatgttacacatacagttgtagcaaaggtgcttttgtgggctgtgctctcaatggtagcttagtatcaacccgagacacagaaaatgcccgattttatggtggtccaataaaggcacccgatatccttatgggatccatggctagaccacccgcagccgctgcgctctacaaggttctgtcagaattgtttgacaatcctgagaagcaatcgctttaggtctctagtatgcgttgcgtcttctggtaaatacattctggaactctctgtcaagtaattggattgcggttttgcgatcttttcacttattcgttggttgcagtttacgcaattgtacagtctgccattcattgacacgccaaaggtttcacatcatggttaccacaaaaccaaatgtaaatacatgtacattggatcccttcttgcttcatcaagatataaaagaaaaaaaatatatactattttccaaaaaaaaaaaaaaa

SEQ ID NO: 38990 - DNA, 480 bp, Oryza sativa
  Clone ID: PAT_MRT4530_42573C.1
ctaaaaaaaaactagtaaattaatttgtggtgtcgatttttcagtacagagacaagtgccatcacgcttgcatcttaaagccaatgataaaatcatccacatatgcacgtaatttgagacctttgtaggaccatcctgggactactgagatcccctgttcatttgtaattagacatcgcataacactgtccttggactataccatgatatgtgccagcttcagctgattgggaatcttcctggacatggaaaattactggataagaacattcttcctgtctgaaaagacttacttgatatgtttactacctttgaatatgatttttttcccatgtatatcttcctcccacttcaagaagttgcacctatcaacaataccacatccgcagaagtaaagctccgagtatcgctgatagtcaatagaggttcaagcggtgttgctattctcaacagaagtgggatctgtttcagcagaagtgg

SEQ ID NO: 38991 - DNA, 550 bp, Oryza sativa
  Clone ID: PAT_MRT4530_42574C.1
aaagtaaatgttaccgtgcattaaaaatcaaggagagtacttcttacgacttacaagtaattacagataagattgttaaatcgcagattctaaatcaaattaacataaggtgtcatggtgcttaccagctgatgattatatagtactcccaggcgatacatttaagtcgatcgaaatcgcccggtttggatttggtcggcgtctccgcaagcgcgtcaacacaatcccggtcgccaccgcgagccgtacaaccctgaaagctgtggacgccatcacgccatcgagctgggcgcctgggccacagtgccacttcccccgcaccggcaccgcggcgccacgacggagtacgtacgtgcgtgtggagtccacgcgcagccgagcgcgcggcgcggcgtggcgttgcgcatctcaccgccaccaccaccgcgcctcctcgccgtgcgtgctcatcatctcgttctcatccggttgccgagacggacgagatgccgagccgccaacccgagcagcgcagtgcgatgcgaggcgcggcccgggctttcggttgctg

SEQ ID NO: 38992 - DNA, 240 bp, Oryza sativa
  Clone ID: PAT_MRT4530_42575C.1
acaagaaaaagggggggtttaaaaatttaaatggggccggttttttttgaaaggattttgacaaggggaacgcatgtaagggtgcccgggggttttgaaaaaaatttttttaaagcccaaatggggaaattttaacgggggagcgcggggggactggaaaaaagggtttggggggcaagaagttttttgtccggggaaattggggggcccctttttgggggacacctttttggaccccgg

SEQ ID NO: 38993 - DNA, 643 bp, Oryza sativa
  Clone ID: PAT_MRT4530_42576C.1
atggctggaaacaagcttctggctattaccttcttcgtgctactaagtattggagtatccaatgcgaggatgggggtggtagctagatacgccgccggcggcggtggcggtggtggtgggggaggtggtggtggccaaacaggaggatatgtgccttattatggaccttactatgctggaggtggtgggggcggaggcggcggcggtggaggcaggtggtggcggtggcggtggaggtggtggaggtggttattatggaccatatggaccttactatggaccttactacggaccttactatggaccttatgctagtggcggcggcggcggcggtggtggtggcggcggtggtggtggaggcggtgggtatggttatggtgctggcggtggatatggtcaagctggtgggccttattatggaccttatgctagcggtggtggtggcggcggtggcggtggtggtggaggcggcgggtatggttatggtgctggcggtggatatggtcaagctggtgggccatattatggaccttatgctagcggcggcggtggtggtggcggcggcggaggtggtgggagcggtccaggtggtagtggctacggaggcggctcaggaagcgggtctggtggtgggcacccataa

SEQ ID NO: 38994 - DNA, 276 bp, Oryza sativa
  Clone ID: PAT_MRT4530_42577C.1
atggcgtggcgtggcgtcgcttatatcgcccgcggaggcaaggatgaatcggagtcggagtcggagttgctccacccctaccgccgcgcgcgcatcctcgaggagatggacaccgccgagaaggccctgctccgcggcaggccgaacgggacgccgttggatcgccaattcgccatcgtcgttggcgcgcgcccgcgccacggcaattgttccgagatcaagcacttgctcgtcaccatcgcgtcggtcatcacgttccggcaaatcttgcagtag

SEQ ID NO: 38995 - DNA, 436 bp, Oryza sativa
  Clone ID: PAT_MRT4530_42578C.1
ttttttttttttttttttttttttttttttttttttttttggtggttttttttttttttttttgttttttttttttttttttttttccaccagaacaaaattttggtttggaactttttttcccaacgggtggggctttcccggggggataaagtttttacccaaggcggagcctaaaaacagggggggtaaggttttttaaaggcccataacaaaattttttggggggcaatccgggggcaaagtggaaaaaagacttccggttttttgaacgggggggtggccacacatacaaggaattttgaaccccagacggcattaacctatagataaggcttccaaattccagcctgggaataataggttttctccagcacaggttaaattggggtttccttgggcccagggaaggaaggtctgggtttttttgcttcct

SEQ ID NO: 38996 - DNA, 769 bp, Oryza sativa
  Clone ID: PAT_MRT4530_42579C.1
aggtatcaacaggaattcatgatcagaaagaatatagtgagtgaaaatcgatcatttttgataatgtacttcagtccaacgacacctaaaattgcagcataatccccatcagtagctgtctctggtgatgccagcacaagtttagattgaaatatctgttcattgatataacaggaatcagtgttgtttcatgttttaagtattttgtaacccaagaaagattcttacgtttaagctcttgttctccattgctcccctgcaaagcaacacaaaagtttattagtacgagtgttgttagagagataaggtagatctgatctgctatttaaccaacacaggagatttagtgagaacaatctgtagtagaaaaataaataccactggaagaacatctgtaccaacaaaacaaaacacaaagtcctaggtcttggagactgaacaaaattgcagcatgacaatgtaataagagagaaggcttacatattgaaatctggaacaacaacaatattgaacaaatcaagatcatattcaaggccaaaaacctcctcatcccacttcatagctgctttaagagaatacatagcatgcgctgtctttgctaaatcttgaccaggagtccaaattctaagtgttacttttcggccagaacatgtagtaaatgagtcctccctgcaatccaactgaccagcaactaaagcaaataagtagcttggtttcttgaaggggtcttcccacaatgcataatgcttgccaccctacagttaggaag

SEQ ID NO: 38997 - DNA, 1285 bp, Oryza sativa
  Clone ID: PAT_MRT4530_4257C.1
gcacgaggcgaagtcccaagcgctcgccgccgccgccgccgccgcctcctcttctccgtcgccggcagccggtcgccgccaccgccgccgatccgagcccgaccgccagccacccgctagctccctctctcgcgtttccaaacccccaaaaaggtggtgccgccgccccgtgttcctcaggcgctcccactaataacaaactagaagaaaagggagggtttcctgcgatttctccttgatgctccggatcgcctctcgcgcgggtttgctcggtggtaggagatgctacagcgccgccgccaagagcggcccctcgatcgccggggtaagcgacatcatcgccgtcgcctccgggaaaggcggcgtcggcaagtccaccactgcagttaacattgctgtagcacttgccaagaagtttcagcttaaggttggtctgttagatgccgacatatatggaccatccatacccacaatgatgaatctccatgcaaaacctgaagtaagtgaagatatgaggatgattccagttgacaactatggagtacaatgcatgtccattgggtttcttgttgacaaagatgcaccaattgtttggagaggtcctatggtaatgagtgctcttgagaagattacaaggggggtagcctggggtaatcttgatattcttgttgttgatatgcccccgggcactggtgatgctcagctatcaatgtcccaaaggcttcggttatctggtatttataagtcgattctgggtttagtggagaatatgagctgtttcaagtgcccgaagtgtggtgagaagtcttacatttttggggaaggtggaggtcagagaactgcagaagaaatggatatgaaattaatcggtgagatacctcttgaaatcgacatcagaacaggttcagatgaaggtactccaattgtgatatcatcaccagattctgcatcggcacaggcctacatacaggtcgctgagaaggtgatccacaggctgaaggagaacgagttctcccctcttccgaatcgggcagctatccctgctgccacctccgcccccaatcccttcctcgccggctcatcgcagctcgccgtggtttcgtcgccgggggcagaggagggttcacttgtcgtgcttcccaactgcaggggtttgggtattgtggaattggatgcaattctaaaacccgatgatcccaccaaggaggacgacgagaacaagcacaagaacgctcaagccgctaactccatacctagcgccttgagtggaagtgagttcaactga

SEQ ID NO: 38998 - DNA, 1751 bp, Oryza sativa
  Clone ID: PAT_MRT4530_42580C.1
cccctcgaggtcgacccacgcgtccgcttccattagcgactaatccagccttcgttaagggtgattagaatttgattaatttcaaggcctcagatcggagattgaatggagtgcggtggtgcgctgcagctgccgccggggttcaggttccacccgacggacgacgagctggtgatgtactacctgtgccgcaaatgcggcggcctccccctcgccgccccggtgatcgccgaggtggacctctacaagttcaacccatgggatctccccgagagggcgatgggaggggagaaggagtggtacttcttctcgccgcgggaccggaagtacccgaacgggcagcggccgaacagggcggcggggacggggtactggaaggcgacgggggcggacaagccggtggggtcgccgcgggcggtggcgatcaagaaggcgctcgtcttctacgccgggaagccgcccaagggcgtcaagaccaactggatcatgcacgagtaccgcctcgccgacgtcgaccgctccgccgccgcccgcaagctctccaagtcctcccacaacgccctcaggttggatgattgggtgttgtgccgaatctacaacaagaagggagtgatcgagaggtacgacacggtggacgccggcgaggacgtgaagccggcggcggcggcggcggcggcgaagggtggtcgcatcggcggcggcggcggcgcggcggcgatgaaggtggagctctccgactatgggttctacgaccaggagccggagtcggagatgctgtgcttcgaccggtcggggtcggcggaccgcgactcgatgccgcggctgcacaccgactccagcgggtcggagcacgtgctgtcgccgtcgccgtcgccggacgacttccccggcggcggcgaccacgactacgccgagagccagcccagcggcggatgcggcgggtggcccggcgtcgactgggccgccgtcggcgacgatggcttcgtcatcgacagctccctcttcgagctgccctcgccggcggcgttctcccgcgccgccggcgacggcgccgccttcggcgacatgttcacgtacctgcagaagccgttctaattaacggaacgtgacgcctctgcaaacgctaattagctcactaaccactgtcaggtcgatcgtgtaattcttttaccagtctagggtacagccaaaaaaccaaaaattaaccgtgctcgatcgatcgatcgatccatggatcgatgatcgcctccaccggcagatcaaaatcgaagcaaaaaatcagggagaattcttggtacttccagtacctctcgtcgacaccacgtgtcgggttttctgcaccgcggatcctcgctggccgcatcgtaacggcgagcgaggttaaaaatagtggagaattcaagaacacatccctgatttttgtttctgccggatggggagtaccgtgagcatggtagaaatgactggtaaaattttcgttgatgataggtagccagagtcgatgtaaccagtcgattttttttttttttggttttagttgacatgccttcctgatagattcagaacaaacaatagagaagagaggagaaaaaaacacagaggagaaattcagagaccaaagttcaaagttttggaattttcaggggcgccagcagctgatggtattgtcagtcgtgtctaggttcgtagaggaaattaaaatgtagaagaacgggtacttcagttcacttcaaaaaaaaaaaaaaaaaaaa

SEQ ID NO: 38999 - DNA, 361 bp, Oryza sativa
  Clone ID: PAT_MRT4530_42581C.1
accaaccctattttctttcgggcgggaattaacaggttttaaaattcatttcccaactccacaatatttacactccttttaacacttttttccacctttttaaaactcctcctttttttttcccggttaaaattaaaattaacttgaggccacccaacttccccggcgtaaaaatattaacaggctgtccttcctttctgccgccccaaaaattacggtaaccatttttttcccaaaaggttcttctaattccttgaaaaggtttttaacgggccccttcccgttaacttatcccttgataaaaaaccccatcttgaaaaacttggcctccccccctttttttatttttttaaccttaaaa

SEQ ID NO: 39000 - DNA, 631 bp, Oryza sativa
  unsure (1)..(631): unsure at all n locations
  Clone ID: PAT_MRT4530_42582C.1
cagtagctgagcttgaacancanancgangtanacatggccgccgccaccatggccctctcgtcccggcgctggccggcaangccgccgccaaaagtgttcggcgaagggcgcatcaccatgcgcaagtcngcggcgaanccaagcccgccgcgtccggganccgtggtncggcgccnancgcgtgctctacctcngcccgctctccggcganccgccnaactacctgaccggcgaattccccngcgantacaggtggganaccgcggggctctccccccacccngananattcgccnanaaccggganctggangtgatccactccccgtnggcgangctccgcgcnctgggctgcntnttccccganctcctcccccncnaccgcgtntaattccgcnaagccgtgtngttcaaagcggggtccnnatnttccccaaggggggntcaatactccgcaacccacctgatcaccnccnaacatcctccccntcttgggggtccaagttgtgctcatnggcnccntccaaagggttnccgcatcccccgggggggcgctccggcnaaagttcttcaaaccccctcttncccccgggggggangntttcnaaaccccctccggggctcccccc

SEQ ID NO: 39001 - DNA, 243 bp, Oryza sativa
  Clone ID: PAT_MRT4530_42583C.1
ggggacaggggccagaatagcatacagatccgatagacaataacacgcaggttacacccatttaccagcgcatatatataaccggggagcattactgcccaagaaaaaaatgcactgtactcaaggaaagcgctatttatgaggcaagggatatgctcagaacagcttagatgaagtgcgacctctagtgcttatgcccacgggaggttctggatgtctttcttaatcgggaatggtgaagta

SEQ ID NO: 39002 - DNA, 603 bp, Oryza sativa
  Clone ID: PAT_MRT4530_42584C.1
atgggtgagctgaagcgcgccctcgacgcgcgctgccacgtgttgctcgagatgccgacgggcaccggcaagacggcggcgagctcttccccatgtgcgcggacggccgggagctcctcactcaagcgcggacgccggcgagctcctctcccatcgcgcggacgggcgggagctcctccccgcgcgcggacgccggcgagctcctcccccgtcgcgcggacgccgacgagctcctcccccggtgtgcggaaggcctggagctcttcccccgcgcgtggacggccgggagctcctcccccagcacgctccttccccggcgagctcctcccccggtgcacggaaggccggaagctcctcccccgcgcgcggacgccggcgagctcctcccccgtcgcgcggacgccggcgagctcctcccccgtcgcgcgggcgccggctcctcccgcggcgcgcggacggccgggagctcctaccccacgcacggacgccggcgagctcctcccccgtcgcacggacagcaagctcttcccccagcatgcggacggccgggagctcacatgtggaaaagatgacatgtggagccaactaatttttgttttgtga

SEQ ID NO: 39003 - DNA, 354 bp, Oryza sativa
  Clone ID: PAT_MRT4530_42585C.1
atgtcgagcgcggcgtggcggttggcgaccaactcctaccgacgccacgcgacgtggaggcaggcgagcgcattccggcgatgtgaacggaagacactagagcaaagagtggaggataggactggtggtgaccaattgggcggcgaaaagggcgccgttaaattcaacccatcctcgtcacgtcgcatcgcagcctccctgtgtcccatcttccccgcgttgccccgcaacatcatggtgctgccacctgcaccaagtgttcactacgtcgctgccacggccaacacatccatgccgcactgggagctgcgcaaccgcctctcccgcgtctatagcgccgacgcttgcctataa

SEQ ID NO: 39004 - DNA, 463 bp, Oryza sativa
  unsure (1)..(463): unsure at all n locations
  Clone ID: PAT_MRT4530_42586C.1
tcttacgcgtccggtgctagctccatggcgttcttcagcagcggatcgcgggcgctggtggaaatcctgacgggattgcagaggtgcgttgctgttggttaatctttccttctctttctttgccagtgaaagcggaaatctttttttcgataattgaattcaatccagtctctacattgaggtgaaagcagaaaagttgtctgtgtgcaaaggttggctgcctgagttgtgccgctcctacatacatacatggattggttgacgcaatgtgatcagaaaactatgtttctcttgatctttgcagtgttgaacgacctatgcctgttgatcataccttgtttgagtttggatcaatccgttaccatttacaggtaattttgctccaaacacctttgatgcattatcttgcaatttgaaacaattaatgtanggcatggaaaatgatcatataatacgcatcaag

SEQ ID NO: 39005 - DNA, 334 bp, Oryza sativa
  unsure (1)..(334): unsure at all n locations
  Clone ID: PAT_MRT4530_42587C.1
gaaaaaaaaaactacttcgacggggaggcgtagggcaggatgttgcccggcgacgacgaggatggccggcgccgccgtttacaacaccagatgaccagacgcgaggcggccatgtacgcctccggttgctttgcctctctgcgacgcctccgaattgagagaaagtgaagatgtgcagcggcggttggaggcggtattggctgcaggcgggcggggtctctcccggccatcctcgtggcgagctcggggcgatctccctctcctgtacgccgtggctgaagcgcatgccgcgccctggagtacttccactcctcgtnatccttctacttcacct

SEQ ID NO: 39006 - DNA, 600 bp, Oryza sativa
  Clone ID: PAT_MRT4530_42588C.1
atggatctagttcctcgatccaaggcaaattgggacacatttagcaacagggccttttgtgagatctgtgccgaggaatgtgaggctgggaatagacctacgggttgtttgtcaactactggctacaaaaatctacagctgaagttctttcagaggacagggaaaaagcatgaccaaaaacaattaaagaaccactgggaaacactaaagaaggaatacaacttgtggatcgaactgaaggaaaaatcaactggattaggctgggatccaattaaaggaacatttactgctgatgatgcttggtgggcggaccacatagtgttcagctatacccggatcttactgaatttgccaagttatcggatgaaaaggcaaacgaagattattcttgcatgtatggctcttcacaatttcattcgagacagtgttttgcgtgatgaactttttgggagatgtgatctcgatgaagagttcgatccaaacactgaacaagctagttcatctcaagaaaatggtatcaatggattagcggtggatgatgaagacatgaatgctttccgtgataggattgctaattcactaacggcaacaagggcatag

SEQ ID NO: 39007 - DNA, 359 bp, Oryza sativa
  Clone ID: PAT_MRT4530_42589C.1
ggatgaaccattgaagggagcgagattaattattacagtgacagacggcggggtcatcgtcaactaagtactgtagaaagaagcccatgaaccgggcaggatcagaatggttgcatgctcaagttgtagtgcaccgtgcacgcacgtacggaagcgagttagctcgatcaatttgggaatctgcagacgcggcgtatgtcgcctccggtggccgccgaattgacgccgaccctcccgagcctggacatggggggggcgatagccgtcgaagaaggagctatggctccacgcgtagtggcagactgagccgcgcgagcgatgaacgagaccacagcctgggggagtctaagagtcccctg

SEQ ID NO: 39008 - DNA, 2497 bp, Oryza sativa
  Clone ID: PAT_MRT4530_4258C.1
ttgttttctatatatcggagtgatcgatgtcatgtcactgtacgacgacgcaagtggctgtaggactgcgtacaagatcggatgaacaatgatcactctcttaattgttttgacccgtcgcgcgttgagattatagcgagagggcatatgggcaaagtaaacggatgtgtccaaaacagggtgggccccgcgatatatattcagcagcaggtggcccccagttggcaggtctccatcgggcacaaagatgactttggccatgtttaggggagcttctcctcttagcttgatcacgccggccttaaaggtgcccatacacgtacagttacggttactgtgagccgcatctccaaccgtcgcgcgacgacaggcgatatacgaccagctgctacagtggtaaactcctctgccgccatcacccctctgcctgatcggtgacctagatgatgaagccgacaacggctcggttggcgcactgatcaactgcatcgggacgatgacgacgaggaggcggccagcttcctcgccctccggcggcggctcccttgccctccagccgggagctacgacgacgaggaggaggcgaccggctccctcgccctccggccgggagctacaatgatgacgaggaggcggccgggagcggcgcagccggccgaatcaacgccgcccctgtagccgacgacgacgaggaggcggtggcctcgagcgagcgagcgagcggcgggtggcgcagttccctcaatctctggcctcgagcgacgacaacgaggaggaggcggtcgggagcggcgccgccggcctgatcaggccgccgacgaggaggcgcctgtcgcggctgctggtggaggcagcgcggtggccgccgccgacgtcgaggaggaggaggcgacagtcgggagcggcgccgctgccgatgacgacgaggaggaggcggccgggagcggcgccaccgtccccacctcatgcggccgccgacgatgatgatgaggaggctgctaggagcggcaccgcccttcccacgccaggatccggcggtggcggctgccctccggctagatcttggagataccccatcgaagacaaggaaggacaccagaccagcagcgacaacctcactggagatgatttgaaagaccagcaccacctcatcgttgtggaggaagaagtgttcccaccacagggaatatctgttgcacttgtggatctaacaccaacagaaacctccatagcaaccctctgaaccgcatgaagctgagaaatcccggattgaactcaagctgagcatggaagggagcatctgggatgaagaagatgggtgttgacatcgccttcgagctgtacacaaaagaggaagaagaaaactgaaggcaggcggtgcacacgtattggaggatgctgggcacgataacctctacatcagcatacaccatgcgggcactttgccgtcggcaacgaagcagccggactatgctggcgctatgctcccaccgacaacggagccaccgactaggggaggaaggtatcaggcgctgctcaaactttccatcgtagatgccaccgagcttctcctccacttccttcaccatgcacggtgcccaagaccctccctcatcccctaagcgtagaaccgccatcgtcactgccatcccctcttcttcctcatcctctctcccctctctctcttcttcttcttcttcccggggagtgccggagcggacggggcgggtgggcggcggagcaggcgagcgaggcgggctgtccgagctccggcggtgggcaacggcgccggcgacgggagcctcgaccgggggagaggaggcgccgcggtagccggagccggggtggtcggcgcggcggcgggtgaggtggtggttggcgcggcggcggagagaagctgctgctgcatctccagcatgatgcagactctgctttccggattgcttgttttctttgcgaatccacaatccccgctacgaccggccgcctcgccatgccagtatatgccttggcgaccccttcccgggctggtcgggagaccggcggcgtggtggtcggcgccgccgcggggtcttgcgccggccgcatccccgccctcagtaccgctgccgccgctgtcgaactccatatccttctcgagcgtgacggcgatggcgccggagtggtcatcctcgtcgtcggagcccgcggtcgagcgctccgactcctgcggcaccacgaggccgcggaagacgacgacccgtcggagagggaaggcggcggcgagggcgccgcctcgccgaggtcgctggccgcagtcagtgtccgaagaagagagaggataatggaaagaagaggagggcagtgaggatgacatatggggcccatacggtttgacctgtacatgtttctctggttgcggattctgttgccgaaactgatatgtgtaatgggagatctctttgggttgatctctgctttattttgttgagcgaaaaaaaaaaaaaaaaaagcggcc

SEQ ID NO: 39009 - DNA, 643 bp, Oryza sativa
  unsure (1)..(643): unsure at all n locations
  Clone ID: PAT_MRT4530_42590C.1
actgagcaaacattattcattcattgccaagcctaaagtgtgcaattgatcacaggcttgaatcaatcacactaaatggaacacaagcagtatgatgatgtgggcactggacaggaacacctgaaccctcatctattacaggattcatgggaaactttttttttcactgacaataaatatacaaaaacagatagcatcaagacaagtgccgagntgtacactcctgatcatttggtgcacggaaaagatggcgaagccggcaagggtctaccatctacaaagcctgccttattgcacgattcaacgtctgaccacaagctacattctcaagtttactacgttttcagaccatcttcattcatcttatatgatgtcaatataacactcgcatgcatatacacataacccactgtggctgtgtaattgtagttagggcacatgctcttcatcaaatacaacaaatcccttagtggcattcgttgttgagaacagatgtactcttcagatggccctgccttgtggcacactataagaaacaaatcctctgacatcgcggcacatcaactgatggaaagaatttgctgccttaatgcatcagggcctcctttaatgaagtacagcaaaactctgctgctggagttga

SEQ ID NO: 39010 - DNA, 192 bp, Oryza sativa
  Clone ID: PAT_MRT4530_42591C.1
atgtcgacatcgctacgggcgaaaagttggccggagaggaaatcgtctaggaatcgctttgcgcaccgaggggatcaccggagagagaggacggagtttgctttagtggtgaaagcggaggaaacggtgatcggacgtgaaggaggaatcgagacggagttcgagatagagattgtcccggaaacagagtga

SEQ ID NO: 39011 - DNA, 117 bp, Oryza sativa
  Clone ID: PAT_MRT4530_42592C.1
atggcaatttccccgacggggacccgcccctacaaggacggggtcggggctatatttggccccacagatcagatccatttcaagttgggagtgaagtgcttcaacgttgctgactag

SEQ ID NO: 39012 - DNA, 639 bp, Oryza sativa
  Clone ID: PAT_MRT4530_42593C.1
atggaggggaggaggtgccccatcgtcctcgttctcccctcgcagtgctcccgccgccgacgccctctccttctcccgcctcgccgctactgccgcccctgcgtcgccggccgccgactcctcctctcggtgcggcggaagggagaatccaacctcggcgcggcggcctccccttcagtgtcgcagcctccgccgtcgcggcgcccggggatggagaggagggtctcgacgccgaggtgccccttcgtcctcgctctccccatgcagtgctcccgccgccgatgccctctccttctcccgtctcgccactaccgccgcccctgcatcgccggccgccggctcctcctgtcggcgcggcggaagggagaatccaacctcggcgcggcggcctcccctccagcgtcgcagcctcagccgtcgccgccgcggtggcctcccctccggcgtcgtagcctccgccgtcgccgccgtgtcgcccaccgccgcttcctctcccgcctcgccccgggcgacctctccacgcccgccggccggcttgctacttgcagaggagacaagcgagagagagagaagggagggagaggaaaaggaagagagagggtgctgacgtggcatccttacatgtgggtctcacgctga

SEQ ID NO: 39013 - DNA, 315 bp, Oryza sativa
  Clone ID: PAT_MRT4530_42594C.1
atggagcatgaggaggaccgcggctggtggaatccgtcaacgtcgcggctgaatttcgtgatcaaattctttgaggagaaatggatgacatgtggatgtgagcaacccagattcgaggcagacagcgaaaaaaagaactggattgcacaagtggcgcaacatgcctttgccttgtccctggacaacgcaaatgagctgctgcctgttgctttgttaagtgaggccatggatgatttagcctgggctttccagggccccagctctccaataagcatatgtaattcctattactccatctggttaaaaagtatatga

SEQ ID NO: 39014 - DNA, 618 bp, Oryza sativa
  Clone ID: PAT_MRT4530_42595C.1
atgcacaccataaaggagaccaagatgctcgctgcaaaactggacctcctcatgaaacatttggacgaccacgagaagaagccccagggcactgttaaggcattggactcacatgtaacgtgcgaggtctgcggcagcatgggtcattgtggaaatgactatccggaaacacgtgaagaagcgatgtacatggataacaacacaacgggttccgtccacagggaggtcaggggtgaaaccaaccccacccatatttccaaggagccaacaataacggaatgcagcaatgccatactccacaagctcccggaaaagaagaagggtccagggtatctcatgatcacctgctcgatcgagacacagaaattcaaccaggccctctacgaccttggagcaagcgtgagcatcatgcccaaggatgtcttcgacaaactcaactttacagtgttggcaccaacaccaatgcgtctgcagctgggcgattcattggtccattacccaactggcatagtggaatacgtaccggtcaagatacgggatttcttcatcccggttgacttcgtggtgttggatatggaatctgacaaggagacgccaatcatcttggggcgtccgttc

SEQ ID NO: 39015 - DNA, 2474 bp, Oryza sativa
  Clone ID: PAT_MRT4530_42596C.1
ccccgccgtgtgggggttttcggatcgcaacccaaactcgcacaagggagaagagaagagaagcttcgagagagaggtggaggaggagacgagcgcgtggtggtggtggtgttggcggcgatggatcgggttcgcggatgcgcgttcctgctcggcgtcctgctcgcaggatccctgtttgcattttctgttgcgaaggaggagaccaagaagctcggtaccgtgatcggtattgatcttggtacaacctactcgtgtgtcggtgtgtacaagaatggtcatgtcgagattatcgccaatgaccagggtaaccgtatcacaccctcatgggttgcattcaccgatagcgagaggctcatcggtgaggctgccaagaaccaggcagctgtgaacccagagaggaccatcttcgatgtcaaacgtctcattggaagaaagtttgaagacaaggaagttcagagggacatgaaacttgtcccctacaagattgtgaacaaggacggtaagccctacattcaggtcaagatcaaggatggagagaacaaggtcttcagccctgaggaggtcagtgctatgatccttggaaagatgaaggagactgctgaggcataccttggcaagaagatcaacgatgctgtcgtgactgttcctgcgtacttcaatgacgcgcagaggcaggcaaccaaggatgccggtgtcattgctggcctgaatgttgctaggatcatcaatgagccaactgctgctgctattgcgtacggtttggacaagaagggtggtgagaagaacatccttgtctttgaccttggtggtgggacattcgatgtcagtatcttgaccattgacaacggtgtgtttgaggtgttggccaccaatggtgacactcatcttggaggtgaggactttgaccagagaatcatggagtacttcatcaagttgatcaagaagaagtacagcaaggacatcagcaaggacaaccgtgctcttggaaagctgaggagggaagctgagcgtgccaagagggccctcagcaaccagcaccaggtccgtgttgagattgagtccctctttgacgggaccgatttctcggagccgctgacccgtgccagatttgaggagttgaacaatgatctgttccgcaagaccatgggacctgtcaagaaggctatggacgatgctggccttgagaagagccagattcatgagattgttcttgtcggtggtagcaccaggattcccaaggttcagcagctcctcagagactacttcgagggcaaggagcccaacaagggtgtcaaccctgatgaggctgttgcctatggtgctgcggttcagggaagcattctcagcggcgagggcggtgacgaaaccaaagatatccttctcctggatgtggcaccccttaccctcggtatcgagactgtcggtggagtcatgaccaagttgatccccaggaacaccgtcatccccaccaagaagtcccaggtgttcaccacctaccaggatcagcagacaaccgtctccatccaggtctttgagggtgagcgcagcatgaccaaggactgccgtcttctcggcaagttcgacctatctggcattccagcagcaccaaggggcaccccccagattgaggtgaccttcgaggtggacgccaacggcatcctgaacgtgaaggctgaggacaagggcaccggcaagtcggagaagatcacgatcacgaacgagaaggggcgcctgagccaggaggagatcgaccggatggtgcgcgaggcggaggagtttgcggaggaggacaagaaggtgaaggagcggatcgacgcccgcaaccagctcgagacctacgtgtacaacatgaagaacaccgtcggcgacaaggacaagctggcggacaagctggagagcgaggagaaggagaaggtggaggaggccctcaaggaggccctcgagtggctggacgagaaccagaccgccgagaaggaggagtacgaggagaagctcaaggaggtcgaggccgtctgcaaccccatcatctccgccgtctaccagaggaccggtggcgccccgggtggcggcgccgacggcgagggcggcgtcgacgacgagcatgacgagctgtagatgatgatgatgatgatctgattcgattgattcaaaggagacagccaatttttgtaagagatggccggttacttttagtggggtgacttactactaccttgggttggggtttaggggtagcaagaggggagagttttatttgcagaacaccagaaaagagactaaatctctcctcttgttacttgtgttgctctcttagtttgttactctgtcgagtgtagaacagctcttccttttgctacttccttctgatttccatgtgaactgtgaagaagaagaagaaacataagtaaattttaattactaaaaaaaaaaaaaaaaaaaaaaaaaagaaaaactccgcggtccgggcggac

SEQ ID NO: 39016 - DNA, 1537 bp, Oryza sativa
  Clone ID: PAT_MRT4530_42597C.1
ccccgggctgtttttttttaaaaagaaagacacgcacctttttttttttacgtaattgacaatcaagcttcttgcctagttagggacaataatctacacaagcacacacatacacacactcgcaaatcaatacccgttctgtatactactacttgaggctatctcatctctcactttttctctttccttcttgttttttctccttgcttccttcggggagctggccggtaactgttttggcgatggtcagatcggttaagcggaggaggaggagcagacgcggtggcgcgggcatgacacgaggtggtcgttggtgagcccgacggcctgcatgaacgagtggatgacggtggggccgacgaaccggaagccgcgccgcaccatgtccttgctgatcgactccgacttggacgtcttcaccgggatcttccggctgtatttgtagctcggcgacagcggcttgttgtttacgaacgcccacacgtatttgctgaacgacccgaagtccctcctcacctcggaaatccggcaggcgttgttgacggcgcctctgatggtgcccaaatccaggccgaactcggcgcttagcgatgccatctgcttctccgtgtacttggcgacagcgtccacgttgaaaccggagaatgcctccctgtagacgtgtctcctcttcaggatcgaggtccagtccgccccgacttgcacgccggacaacgtgagcatctcgaacagcaactcgtcgtcgcgcacgggcacaccccactcctcgtcgtggtaggcgacgtacagggggtctgaatatggagtgatgaagctgcatcgcttctcgtcatgcccggtgacggcaccggcgacgagctcggcggcacccgtcgcggtagcgctgactttcccttcgactcgggagaaggacgcggtgcggccgtagtgcgcgatccgcatcttgcgctgcgcctgcgccatcgcgacgtgctcccgctgcgccgccgcgatgctcccggcgggctcgtacgcctcgagccccgcgaacgtcaccaccggcagcacggcggcgccgcccttcttggcgggcttcctgctcctgtccaagccccccatggccgcagccgccgccgcagtcctggcggcagccaccttggctccagacaccctcgtcgccttagcactgaccgaagctggagtaggtggtgggagaagagacgccgccgcagcgcgggcgaagtcggcggcgcgggtcttctcgggggacgccgcgcaggtggtcgcggccgcagcattgtcgagcgaagccggcatggagagcgacttctgcagggacttcttgagcggccgggcagcttcaggcgccgccacgcggttccccgccggctgcagcaccgggcggccgtcgatctgagcgacgccggcggacttcacgttggagttgcacatcttgtccgtgaggagaaaaatgctctgagacggtgtaccgatgatttaactccgggaatatgtgcgcttcgagtagcagcagcgaagagatgcgtgccgaattcct

SEQ ID NO: 39017 - DNA, 264 bp, Oryza sativa
  Clone ID: PAT_MRT4530_42598C.1
atggcggctcccggctccggctccggcggcatccccatcaaggctgatcaggactcggatggctcggcgcagagcactgctgatatgaccgctttcgtgcaaaatcttctgatgcagatgtgctcactagatgaaatgggcgcaagaattgatgagttggagcagagcatcaatgacctcaaggttgagatgggcactgaaggtattaccccaactaagccaaaggacgaagaatcgaagcctgcgggtagctctgccgaatga

SEQ ID NO: 39018 - DNA, 689 bp, Oryza sativa
  Clone ID: PAT_MRT4530_42599C.1
ctcccgaggccggccgggggaaaacccccaacccatatcgcgcagttcccacttccatctcgccacgagcggatctgcgcctgcgctctccccccctcgccggcggcaagcctatggcggctcccggctccggctccggcggcatccccatcaaggctgatcaggactcggatggctcggcgcagagcactgctgatatgaccgctttcgtgcaaaatcttctgatgcagatgcaaaccaggttccaatctatgtcagagaacatcatttcaaagatagatgaaatgggcgcaagaattgatgagttggagcagagcatcaatgacctcaaggttgagatgggcactgaaggtattaccccaactaagccaaaggacgaagaatcgaagcctgcgggtagctctgccgaatgaaagaaacagaagcagttgaaatggtagcatgccattccagatttgatttccgtatcgacatctccagccattcatcactgacaaattacatgctgtaagatcttagcagggcacttttatgcatctgagatttgtggtagcagttgagaatctctcttatagatgttgttgcatgttttactgtgaacttctctgtggatattgtactgtactgcgcagagcaatgatcataataggtttgtttagattccagaaaaaaaaaaaaaaaaagcggcc

SEQ ID NO: 39019 - DNA, 237 bp, Oryza sativa
  Clone ID: PAT_MRT4530_4259C.1
atggctggagccaaacacctagcagagattcccgacccatgctgggaggcgattaacgttacacgcgtcggagatgccgcgttggcggtgcacaccatcgatcctctcttggcgcaggtgcgcgcgcttcgaaagtgccagcgatgtacaaacccaatgggctcagtgctcaacgagaggcattttagactgggctatagcccatcgaatgaagctagccaaatcctggcccggtaa

SEQ ID NO: 39020 - DNA, 300 bp, Oryza sativa
  Clone ID: PAT_MRT4530_425C.1
ctgccaacaaactcgctagctaccaggagaggaccattaacgatttaatacactgacacacacacacatatgtgcaagttcgatcgatacaagacaggaagagatcaccatgtctagctagctaaattaataagctagctagagctggttgcatggttgattagctacgacgtgcagttgattagagatggaagagatcgccggtggtggctcgccgccggcgatggaggaggaggagaggtatgtggaggtggcgtcgaggttctaccgcgtgaagcaccggtgccgccgccgccggcg

SEQ ID NO: 39021 - DNA, 254 bp, Oryza sativa
  Clone ID: PAT_MRT4530_42600C.1
gtcaactcctgcgctgctgcctcccactctggggctcacctcggcggctactacgcttctccccgccgacgacgaggtcacagaccgtggagcctgccgcggcggcggcggcggcggcggctgcggtcgtcatggatgcgccgcggagggagcaaatgcaccaacaccaccaccggaaggcaggggctcaaggagaggccgcacctgctatagccgctgcgggggtgggagcggaaggcatctccagaaagata

SEQ ID NO: 39022 - DNA, 186 bp, Oryza sativa
  Clone ID: PAT_MRT4530_42601C.1
atgtcgatgtcgaacttcgcgaagatggggtacagcatctgcgggagcttcgcggccggcatctacgtcggcgttaaactgcgcgtgaggcagcaagcggtggagcgctcggaggggaagaagtacatcagcaacatcgagcaaaatctccagagcctcaagaatctgtatgagcgcgtcgagtag

SEQ ID NO: 39023 - DNA, 1048 bp, Oryza sativa
  Clone ID: PAT_MRT4530_42602C.1
ctagttttcttttttccatttgcatccatacataatgagaccctttgccacttttataagaccacctttgctttgcaatattctgtaaaccccaagccagaagagtcggatatagttggtgccaaccatctcatagtagacggttcggaagtatagttggacattaaggaaccagatcaatcctgcaaggacgccgtacgtgccctgataaccacggctatccttgaaagacaaaacaaataacagaactagttgtatccgtgcacatatgttatttgccctgccgttcctttgcaactctgctgctaagatgcttagcttgtagaacatatatccaagaacaatgtccacgaaaaggaatggtgtcatgttgcatagttggctaaaaccggcgataactaacaaagcaccggagaggatgccgatgtggaaactgcggcagcggaagaggttgccggcggcgccgatctcccgcagcacgcggaagacgggttcgagggggccggacacaagagcatgccatatagcgtccatctcctcccggcccttcccaggggggtcggaatccgcgagagaaaaatacgtggcgtcttcttcggacaagttctccgcccaccacggcgatccgggcagtgtgtacgagcctggagcaggatatggcggcagggcttccgagcagccagaagcgggagacgcggccgcgcaggacaacctcaagccaacgactccattgccacgcttgctgcatcgaagaaggccagcgctaaccctatcggggccgggccgcgtccccactggccggcggagcaaggcgccggctgatgggcagcatcggagagaagacgccattgtggcggagctcatcgccatgatgcctagggtcttagcacccggcgttctatggcgggtcgggggagttccaaaattaggcggcggcggcggcgggaagacgaaggggcgaccgccgaccgggcgagtgctcgatcaattagggccttgtgtcggggaagaggatacaactacgcgagcggagagaactgggtctggt

SEQ ID NO: 39024 - DNA, 365 bp, Oryza sativa
  Clone ID: PAT_MRT4530_42603C.1
caaaaacccgggcctaattttattcgggaaaaaaatgctcaggcccgttccaggacccctggggggaggctaacaggttaaaacgggcacgcccacacatacaattctttgggccaaactggaacagggggcaggccccctggggattatctaagcccactttacgatgcctgccggggctctgggggccaaaaaatggtattggcaggcccggaaataatccccggggggccgcaatttaggggccacctagatgggcccagggacgggggcggacatgaagttggtggtggggccccggttgatgggagcaatcttgtcccctgtcacaaaagcttgcggggtcaggatttacttgaagcggg

SEQ ID NO: 39025 - DNA, 819 bp, Oryza sativa
  Clone ID: PAT_MRT4530_42604C.1
atgcagggcgaggcagcgtgtggaggcccgttgctggcgcgacggccgtgcaggtggcactacgaggtgtgttggcgaacgaaggcccagcgcagggtaaccgcgaagcggacggcgtcgcgcctagcgacctcggtggtggcggggacatcgaacacgatgaggaacgccatctccggcgtccgctccaccgcgtccatgaaagttggtgtactagttcaccctcgagaacgccatcgccgtgtagccgccgttcgtgaggcaccaccacagcgacgtggcggcagagacgttcgcggtccaggcgagcaccgctgcgagcacaacatcgtcagcggcggcgaggagcgcggtgggggtgatgaaagcgcacacgagaatcgggtagggcgtctgatggaggccacggggcggacggaggaagacgagcgcgtagacggagaaggggagcatgaagaggagcgcatcgtggccgagcgagaaggccatgccgccggtgacccgtcactctggcgggcactcaacctgctccacaaccaccttgcgcacttaatgtcgtgggacgcgctgacggaggcactcgcgcgtctccacgacgacgtccgccgccgcacctgcacgacatttgtgccatctgcacgtccgccgtgccactgcacctcgccgtgccacccgcacggccgccgtgagccccagccagacgcaccccgcacggcgtcaccgcgagccaccgtcgccgccactacgcctcgccatgccgcccgcacagccttcacgcccgtgccggtcgtccgcacgctgcctctcctctcagagtga

SEQ ID NO: 39026 - DNA, 1591 bp, Oryza sativa
  Clone ID: PAT_MRT4530_42605C.1
tggaagcatcatttggggattgctctacttcatcgcctcatcttgacaagtctgaaatgattatctcctctgatcaagaaggtcttatctcatcatccatctcaccaacatacaactacaagcaaggtaatgaaatggtgaataaggttgatgattgtccaactctcccattgtactccaacaacaccgataatgaaattgctatatttgattgtgttgttgactcatacaaaccatctagcgctaaatgtgtgcatgaggatgatatggatggatgctctactttccatagtacttgtggaactaaccttttgaaggaagaagtgaatgaacataaatggttaagtgaagaatccacatcatcaacttgtttatcttccattgccgaagatcatgcatgctttatgggcgatgatgatgactttgtggttgatcaattgaacaagaaggatacaacaatggtgatcatgctcatgggggttattgagaagcaacatgaatgactcattaagaagaatgaagaaatcaagggtctatctgatgaacacaagaaactcaatggatctcattcttcattaattatgaagtacgaaaaattggaaaatgaattttcttgtgccactaattcaattgcttgtgtagcatttttagagaaggaaaatcaagagctcaaatctgaatttgagatcactagcaagtatatggatttacaagaaatgcatcatgaactttgcagattctcatgaccatagtagagatagctcatgaggtgataattgcaacggtaaaatcatatgggcctcatgctcaggttgatcttacttgtgctaacacttgctgctccgaagcaaacatttccctgagcactacatgtgacttggattatgtaggaaaaaaggacaaggacttgtgggcaatgcttaaccttctcaagataaccgtgggaacatggtgaagaagcctgagaagggatcaaccgtagcttgcaccaagttctatcaagcaaatactaagttcaacaacaagagtaaagggcaaattcaaagtagtatcaaaactctcagtacttgcatcatgtgcaagaaagtgggacactatgcgttgatatgttccaacaagattgatgaccaagaggagaacaagaagaagcaatatgaagtgttatggatgcaatgtgaaggatcatgaagttgcatcatgcccccatatgaaggatgaagactttatgtcatcaaggaagaaacttaatatcaaggcaacaagtaagatgaaagatgcggtgaagaaagcaccatgtaaagacaagaatcgactttgttacaattgccggtgaaagggacaaattggtaaaaaaattgtcccaatggtaacattcttaacccgaactttttatttgaatcttaaattgcttaggaaggcaaaaaatgtcactagtattacttaaatgattagttcaccacatgctagcacaaagctcacttgggtgccgaaatctcttatgactaacctatatggacccaattttcttgtggacaaaaatgtgctaaaatgagaatatgatttcaagggttatgctaatggagctaaagta

SEQ ID NO: 39027 - DNA, 1240 bp, Oryza sativa
  Clone ID: PAT_MRT4530_42606C.1
aagaaccacctgttcttgccggtcttgaacctctcctcgaggcgagccttggcggccttgcaggcggccaccttcttcacgatcaccgccttccgccccgcgtaccgcccctgcagcaggatcaccgccttccccggcttcaggaacttcaccatcgcggcggcttggtacggatctccttctccttcgccggtgtggttggtcgccgccgccgccgccgccgccgagctcacctcctagctcctctcctcctcctcccgattcagatcgcacaccaccaccactcctccgtcctcgcgcgatcctccgccgccaccgccccaccgcgccgccgcccgcctcgccggaaggggtcaacggcgccggcgagccccctcccccttcccccctctccccccccgccaccggatccaccacctcctaatctcatgctttgtttgcccctgccgccgacgccggcccactgccttcctccatccccgcggcttcggcggcgccgccgccgcctcgccgcctgccggagtccaccacccaccgccagtcctccgcccacggccatccctctaagccccaaggaaaccccccgcttccccctccctcaacccccctcctaccctcaccccaaccccaaaccctaacccgccgcctcaaactcatcgtcctcgtcctcgtcctcgctctcgctcaccgccttcgccttccgccccgcggcggcgtaccctctccgcgcgtgcagcgccgcgggggtcgcgcccgcggggtggagcaggaagcgcgccacggcggcggatggcggcgccgccgctgccaggcggggagcggccggctccggtctccccccagcacccttaggccacgccggctcccagatcttggcccgctgaagccgtctaccgccgtccccccgctcgatctcgtcggcgctgtcgtcctctcccgcctccttgccggccatcgagctgcccgctgccgctccagaacccgccgttagctccaacccaccggcgctgccgcttcaactcccggcggccgccaccgctctagcccccgcccgccgccgctctagcccgtgctccccgcgaccaccacgtcaaccccacagactaggtcaacaccgccacgtcagcgaaatcgccctccaaaaccaccaaggcgtcccccaaccgcaaaaccagatttaggacatccctcaacttacaaatccgttaactttaggtcctccggtggttttgaccataat

SEQ ID NO: 39028 - DNA, 1222 bp, Oryza sativa
  Clone ID: PAT_MRT4530_42607C.1
ttccacagagttataaaccactcaacaacaaacgatctgaatgagcgtgcgtacgttggtacacagaaagacccaaccgaagtcgggccccacaccacaagtgtgcgcgcggcccgggtcgatactatctaactcactagaagtcaagacatgaaaacgccagacccgactacgcccgctaagcacgagcgccagtcttccccccacccccgccccaaggctatacaggggggccaaattccttataacggcccctatcgaaaggcacatgcgccccccttttgcacttgcccccggcgcaagcgagcggcctccacgggtccgggtggggtaccacagttttttcccttcccgcctttgaaaaacccgcccgcgagcggggccttacccccccctaatgggggaatttgggtccggggccccccccaaaagggcactccacctcgctgcgctccgtacctttccacataggcacactatggcaataaacaagctagggacgttggttgttatttttttttcccaaacaaaacttcaaccagatctatccttggcatgacttcataacacatgagcatcatcatgtcttaattttaaactcaatactaacaaccaagtcttcatggacacagataccaaaaaaagcagatatagattaacggatgatagcaagaacaagaaggcgcgcctagaagcggagcttggtgaagaaccacctgttcttgccggtcttgaacctctcctcgaggcgagccttggcggccttgcaggcggccaccttcttgtcgcgggtggcgagggcgtcgggtcccccggaggccacgtccttgaagtcgacgtcgagggtgtagcgggtgggcatgatgtgggtgaagttgacgagcttgaggaagcacttgaccctcgacttcttcgccgtcttcttcgccgagtccttgcggatcaccttcttcgggtacttggcgaggccggcgacgaggcagtggccgtaggggcggtcacgggtgccctcctcgaacacgcgcacgatcaccgccttccgccccgcgtaccgcccctgcagcaggatcaccgccttccccggcttcaggaacttcaccatcgcggcggcttggtacggatctccttctccttcgccggtgtggttggtcgccgccgccgccgccgccgccgagctcacctctgctgctgctgcgccgccgccggatggtgtcccggccgg

SEQ ID NO: 39029 - DNA, 249 bp, Oryza sativa
  Clone ID: PAT_MRT4530_42608C.1
gacagtaatcgcgagaataattaactttgatctttacccactcgtataatccgtctagaactgacgtcatattacaagttcgtcagttctccatttgaacagtaagtgtttgttgtaaattaaattgtggaaatactacttatttccgccgaagtgtcttggacgcttcattgctgactcaaattgatgtaccaccatctgaaaaacaattgatctaatacggaaacactcatacaaaaaacaagggga

SEQ ID NO: 39030 - DNA, 474 bp, Oryza sativa
  Clone ID: PAT_MRT4530_42609C.1
atggccgtgggcggaggactggcggtgggtggtggactccggcaggcggcgaggcggcggcggcgccgccgaagccgcggggatggaggaaggcagtgggccggcgtcggcggcaggggcaaacaaagcatgagattaggaggtggtggatccggtggcggggagccgccggagacagggaagacggtgggacgggggcacctcgaggagaggagggaacggggagaggggggaagggggagggggctcgccggcgccgttgaccccttccggcgaggcgggcggcggcgcggtggggcggtggcggcggaggatcgcgcgaggacggaggagtggtggtggcatatacgaaaactatcttacaaccaactaatcaactactgcaaagagaaaaacaaacatagacatcaatcccagagtgatccaaagcagatcaccacccagatcagatcgaaaagcagaacttcagcttag

SEQ ID NO: 39031 - DNA, 695 bp, Oryza sativa
  Clone ID: PAT_MRT4530_4260C.1
tcatccctctctcttctctctttgttcttcctcatcctcactcccctctctctcttcttcttcccggggagtgccggagcggacggggcgggtgggcggtggagcaggcgagcgaggcgggctgtccgagctccggcggtgggcaacggcgccagcgacgggagcctcgaccgggggagaggaggcgccgcggtagctggagccggggtggtcggcgcggcggcgggtgaggtggtggtaggcgcggcggcggagagaagctgctgctgcatctccagcatgatgcagactcggctgcctcgccatgccagtatatgccttggcgaccccttcccgggctggtcgggagaccggcggcgtggtggtcggcgccgccgcggggtcttgcgccggccgcatccccgccctcagtaccgctgccgccgctgtcgaactccatatccttctcgagcgtgacggcgatggcgccggagtggtcatcctcgtcgtcggagcccgcggtcgagcgctccgactcctgcggctactggtccagctgtcgcgtgagcagccacggtcaccaccacgaggccgcggaagacgacgacccgtcggagagtgaaggcggcggcgagggcgccgcctcgccgaggtcgctggccgcagtcagtgtccgaagaagagagaggataatgggaagaagaggagggcagtga

SEQ ID NO: 39032 - DNA, 204 bp, Oryza sativa
  Clone ID: PAT_MRT4530_42610C.1
atgagcagtgctgaccttgccctcaatcttgcaatcgatggcctcgagctgcacctgcaacatgcggaaggtgtgggcaagagagatttcaatgtcggtgaacaaagggttgtagcctgcatgcgggcatggtcgactggcaccggtagggcagggtgcatccaatgccaagcaagattgaataagtttgaaattcgtccctaa

SEQ ID NO: 39033 - DNA, 965 bp, Oryza sativa
  unsure (1)..(965): unsure at all n locations
  Clone ID: PAT_MRT4530_42611C.1
taaaaaaacaaaagggctaggctgcatgacttcctggggacacccccccgcttatgccgacagggggcctttccttagtttgcattttgaagggatgggggctttttttttacccatgggaaagggatttctcaagcgttatttggtacgccagggtttccatcccccgttttaaacccgcccagtgaggcgcgtaatcgcccccttagggcgattgggacccggccccccctccagggnttttnttttntatttttttttttttttctaatatgcttctttaatagatccatactactaaacatccacacccacacaagcaggcagtagtaccattacatcagggtgattgagattaatttagaaaatccaaaaccattcattggctgctactcagaaagcgaaaagctttagaaaaagagaaaaaggatgagatggccgtgcaccagtaccatcccatcgccgccgccgccgccgcaggagagagctcagaagcggagcttggtgaagaaccacctgttcttgccggtcttgaagcggtcctcgaggcgcgccttggcggacttgcaggcggcgaccttcttgtccctggtggcgagcgcgtcgggccccgcggcgacctccttgaggtcgacgtcgagggtgtagcgggtgggcatgaggtgggtgaagttgacgagcttgaggaagcacttgacgcgcgacttcttcgccgtcttcttcgccgagtccttgcggatcaccttcttggggtacttggcgaggccggcgacgaggcagtggccgtaggggcggtcgcgggtgccctcctcgaacacccgcacgatcaccgccttccgccccgcgaacctcccctgcagcaggatcaccgccttcccgggcttgagaaacttcaccatggctgatatcctctgctgcgccgccgccggggaagatggagttagggttcgggttttttttttttc

SEQ ID NO: 39034 - DNA, 1040 bp, Oryza sativa
  Clone ID: PAT_MRT4530_42612C.1
ctagtggaccggccgggctccacggctaagctcagctagctacaatcgcaaatagctgcagcgatcgagcgaatattgatcgtgctcgatcatcttagccgccattgcaaacgatcgaatcgatcggccgatagcctttctcgttggcattttatttcaagcagaacacgatgaagcaaaagatcgtgatcaaggtgagcatgccgtgcgagaagagccggtccaaggcgatgaagctggtggtgatggcctccggcgtgagctcggtggaggtcaccggcgacggcaaggaccggctgcaggtggtcggcgacggcgtcgacgcggcctgcctcgtcacctgcctccgcaagaagatcggccacgcggagctcgtgcaggtggaggaggtgaaggagaagaagccggaggagaagaagccggaggagaagaagccggagccgtgctactgccctcatccctgctactaccaccaccactacggtgggataccggtggccgtcggcgaccagccgagcgacccctgctccatcatgagtgaaagtagcggcggccggagcgacatcaaggagcgggagtgggagcggtggcagttggaactagatcgcgctgggctcctcgtcctcctcgttgcagctgcccccctcgccgtcgttgtctccgccggtggcgccggccggttcatgtcgatcgacgcgtcgccgccgctgctccaccaccactctcgcccgccgttgcagaggccgcaaggggagcaaggcgtcggcggcggcgaggcggttctcggccgtggccagctcgacctggagtctctcgagctcctcgccgggggcatggagggacaacgcggcggcggcaagccaggcgcaggagggacgacacggcagcggcatggcgggatgacgcggctgcggcaagccaggttgaagatgatgtgtgacgatgcatgcaccgctgcatgcgcaggatgatactgatctcttaggcacgcgtcgctcggggcgtcgtggtgcgcagagaaggagaacagtgggcagcgt

SEQ ID NO: 39035 - DNA, 192 bp, Oryza sativa
  Clone ID: PAT_MRT4530_42613C.1
acgtgatcgcttccatcatcgaagcgggggggaattgatacacttaccgtgccttacatctgacacatcttattattagactgagagcagtttttcaaggcgtaaaagagatcgtctcgaacaataagcttattatatccattcatagctcaccccgactcgattcagtgccgtgaaatccttcgtagccta

SEQ ID NO: 39036 - DNA, 375 bp, Oryza sativa
  Clone ID: PAT_MRT4530_42614C.1
atgctcactaccagcgcccatttagtgattggtgtgcaagcgattgtgcgccaacaagctgacaaactgcgcacgccaattgtgagtgggtgtctgacttgtgatgccagactccaagctgcaagccccaaactctggttggcacctgtgcaactgtgcgccatccactatgtggtatctaccctaactactatagtgctcccacggagcacttgccacctgttggtggtgtctggtaactgaattgtaacccatataactagttcgtatgttaaaaataaagtcatacatcatcatgtgtgacctgttgaaacttagggtcatataaatctaaataaaatcatcttacctatttaaaaaaaaaaaaaaaaaaaa

SEQ ID NO: 39037 - DNA, 597 bp, Oryza sativa
  Clone ID: PAT_MRT4530_42615C.1
atggaatcagttcaaaaattaccaaaatggacagagacagaagaccagcaagccacctttgatgacccccaggatgaggaggccgcagaagtagggcaagaacttgaggaagctccccagggaggcccagaacccacttggtggctccattggcaaactctcttcagcctccttcaaacccaaccaacaggcaagaggccaagaaccaacaaagccccccgaattctgaacagcaaacgaagtttcaggctaaccaagatcctcacaagcaatcttgcctccaatccaaaacgcaagaagccaagaaatgttaccacatcttctcgggaggagaacctgcagcaaggcttatcaagaaccggccatcatccatccgagatcaaaggattcagcaaaaaggaaaactctgaagatggatggacccaagaaccaaacccagggcaagcaaaggacaacctaggggaagctgccagcagagtgagtgagcaacaagacaggaggagtggggcctcctccctggagcttggagaaactaaaaggaacagcaggcaggcaaagaagttgtggatgtacaccggacaacagcaacaatggtag

SEQ ID NO: 39038 - DNA, 1299 bp, Oryza sativa
  unsure (1)..(1299): unsure at all n locations
  Clone ID: PAT_MRT4530_42616C.1
atgctgatgcaggttgagtcggggagcgaggcggcggcggcgacggcggcggcggtgctgacggcgccgctgtccctggagggcggcctcgcggcggagctccggccggcgaacctcgtgcagcgcgtgctcagcctcttccgcaacgtccgacccggctccgatctctctcactttcagctgcctgctacgttcaacctgccgaagtcgcagctccagttatacggcgagggagtgtactgcgtcggaaaagactacctgcggcggtgcgcgaaggggagcgacgccgtcgagcggttcgcggcggtcgtcggctggagcatctcgacgacgaggcctcccatcttcggcttcgcgccgtacaaccccgttcttggagagacccaccatgtctccagcggatcactccatgttcttctcgagcaggtgtctcatcgtcctccggtctctgcactgcatgccactgacgatgacggtgagatcgagctcgtctggtgccaaaacccaatcccgaaattccacggcacaagcgtggaagcgacagtgaaaggcatgaggcacgtcaagcttctgaaattcagcgagaattacgagatcgactgcccaaacctgctcatcaggttgctgcctgctccatcagcggagtggtctgggacagtcaggatcgtctgcaaggagtccgagctcgaagcagagttgatctactacaggagcaacgctttcctgggactaggtggcgatccaagatgtgttaagggtaagatattcagctcaagatcaggagagatcatctgcgagattgatggacattgggatcggatcgtgtcggcgaaggatgcgaagaccgggaaggtgtcggttctgtacgatgctgaatccgccattgctgacctcaagacacctgtggtcagaaaccaagagggcgtgtcaccttcagaatctgtggtggtttggggcgaggtgagcgatgccatcctgaagaaagactgggagagatctagtcaggcgaagcgacgagtggaggacacggcgaggaggctagacagagagaggaacgacaagggagaggtctggattcccaagcatttctcgctgtctcaggacaagaacggcagctgggaatgctcgccgctggagaaatctgtgcctccagctccgatcattgtcccctcatgactgtagattacatgtaacanatgatcctatatatactatataantctataacatagctgatgatttgattttttttaaaaaaaaaaaaaaaaaaaaaaaaaaaaaaaaaaaaaaaannaanaa

SEQ ID NO: 39039 - DNA, 504 bp, Oryza sativa
  Clone ID: PAT_MRT4530_42617C.1
atgcctctgggtcacgcgctctacagtgcacggagcttgctgcgcgtggactcactgcgagaaagttcctcgcgtctttacttggggccgaggggctcttctagggcgcgcgaccttgctccacgcaagcacaaatcggcgctggcgcagtatagcaccggtccatgtcactgcactgtgagaggccttaggcaattcatcgagcacctagcgtgtgagatcgaggtcatcgtttccaagccgaccaagcaaactctgcccgcgattcccgctggcaaagctgaggcaaggctgctacttccctgcccggtgccctgccgcgcccaggcgccgaccaccgcagccgctgtgggccatggccaacccaacaccgccgccctttgcccaatactgaccaagcccgatagccgcagccttcctcctctgcctcctccctgcgcaaagccgacgccgctgcctccgtctgcaaaaccgctaacccgctgcctcctaggggccccttaa

SEQ ID NO: 39040 - DNA, 346 bp, Oryza sativa
  Clone ID: PAT_MRT4530_42618C.1
gagaagggcaggcacgcacggtaccgaagatggaggacgtgcgaggatgacaacgcggcttcttctatctgcgcgccgaacactcgctgtcggtcgcgcgtgcgctgaagacgacgaacagcaggggagtacagggtggcggaggcgaggtggcagcgagcgcaatgcatgagccagagcacaccgatgcggtggacatgcgcgtggcgcaccaccgacggcccagatatgaggcacgccttccgcctgccacgacgaccttcaccttggcgggggtggtgcgggagcaatggacgagatcggatgcacaggacaacactcttatccaccttaatgaacataggga

SEQ ID NO: 39041 - DNA, 540 bp, Oryza sativa
  Clone ID: PAT_MRT4530_42619C.1
ttcgtcaagtcagctgaaagggaggctgaagcgaggttgaagacgaagcagttcgcgatttggctggattcgaagaacagtctacaaccacgagtccacgagcgcagcacggcggcgggcgcggtgtgggcgatgagcaggcggcggtgtccggcgaggtcgagcggcaagcaggcggtggctttcgacgagctagtggcgctacggcgaggggcaagactggaggccggccagccggccagccggcgccgcgcgcggcagtccaggcgtccagcgccgtcgcgccacagcgaagatcaggaggtggcgagcctctctccggcgagggtgcaagcaggggtgcaaggcggcaaggcaggcaggaaacgccactgtgccgctgacccgctgtgggctgtggctggcagtggcattgtggcaacgacgcagcttattgatggtctgattgaagatttgaagttagaaattggtaaactactaacctctaatctctatctctatctctatctctatctctactacttatatataaaaaaataa

SEQ ID NO: 39042 - DNA, 2141 bp, Oryza sativa
  Clone ID: PAT_MRT4530_4261C.1
atggcgccggagtggtcatcctcgtcgtcggagcccgcggtcgagcgctccgactcctgcggctactggtccagctgtcgcgtgagcagccacggtcaccaccacgaggccgcggaagacgacgacccgtcggagagggaaggcggcagcgagggcgccgcctcgccgaggtcgccggctgcacctaaccctagtcgacgcgaacctccagccgccggaagatgctgcgaccagcggcggcggcggcgggcagggccatccggcgagccgcgtaccactccgacggcgcccctcctccccgcaagctccggggcccccgattcagccctctcaacaggcacaaccacgagatgtagatgtctaatattacgcacgttgatgtgcaggttgatgcgttgctcgaggaaatcaagaatacgccgagtacgtaaacctctgaattgcagcttctgttattatttgttgtgtgtcttgttaaccatcctaaattgataattactattaccgtccttgtctgcttctctagttctattttggctcgtcagcagattcttgttcaaaatgttctccgatcatgggttattgctgcagcagttctctcaggctattgctgggggtacaacagagtggccaaacgtcctgtggctggctctgaaccaccaacagaagatgaggtgtagaggacttgacagtgttttcttttggagatgggagtctagaagtctgggagaatcaagaacgtagtgaactaagcatgtgtcataatctatcctgtgtatcagtgactctgtgttaactataactaattagtcctagagctaattggtgtggggattctgtaatgagagatctcgttcggtttgacccgtacaaaaaaaaaaaaaaaaccggccagtggggtgaggcgggagaggaggtcggcgccgtggcggctgctggcgtcggcgggggctgcgatgggggagaatggagggcgtcggcgtcggcggcggcagcgacatgggagaaggggagggcgtcgccgcacggtcgcggcggggctgaggtcgtccatggaggtgagcgtgctggagcgagaccaccggcggaggaggatctcccaaggaggcggtggtgcatgccgtccgctgcctccggcgacgccacactcggccgccacctggcgcgccgcctcgtgcaggtgggcgtcagcgacgtcttcgccgtgcccggggacttgaacctcacgcttctcgaccacctcatcgccgagcccggcctccgcgtcgtcggctgctgcaacgagctcaacgccggctacgccgccgacggctacgcgtgggcccgtggcgtgggcgcctgcaccgtcaccttcaccgtccgcggcctgctgctgcacggccgccgtcgccgcagccatcggttctggaatcaggtgacgggcgacgaagccaggcgccgccttcaggaatcaggagcgcgccggcgcggctccgtcgttgccgtcggcggtagctcgtcggagtggctccgtcgtcgtcggcggtggttgagcgtctccatcatcgccgccgtcgccatcatcggagacgacagcctcctgggaccggcacgccgtgtgttctgaacctgtagcactaacaaacctcaattttaagcaggaagggaacaacgtcgagagcgctgctgccggctgccccgaggagccaggacatggttgcctcgtcaccgtaacgacgacgcgaggccgccgcgcgacgacatccgctgcaacggccgccgatgcgcgcgggcgcgcgctcctagctagctggcgtcgcgggcgacgtgtgatgtcggcacggcctcctctcctggttgggctttggctcgtctcatctccctacggcgatgttgatctgctcgtggagacgccgacacctgctggcccgtggcacgcggcacgcggagaggtgaaactctctatcgcttttgctgctgctgctccctcgttggtttcgaaatatgctccccctcgatgccacccatcacgcatgtgggggcacttggcaattgccaatcgtccgtccagccggccgtgcgtgcgtgtgcgacgggaggtagctaccaccggcaccaccggcatggaggctcgtgtcgccccacacacactttcggctgct

SEQ ID NO: 39043 - DNA, 345 bp, Oryza sativa
  Clone ID: PAT_MRT4530_42620C.1
atgtctcctgatattatcaataagttcaagctccttacaatcttcgtgggggttattttgctggacctgggagattatgtcgcagaagagccttttcatattaggcttttggggaacctggatgaaagctctacagtcgaatcgtccaccaaatttgttgtagaaaagcttggcaagtgtgcaactgtggagatcgtaccgttcgtaccgttctattgcctcttggacataaatcctgaattccgatatcatgcttccgatctgttggtgccacttgagtcttctaggaacaccactaatcttcagatggttgatcctgcagacaaatctggtcttggtatttag

SEQ ID NO: 39044 - DNA, 462 bp, Oryza sativa
  Clone ID: PAT_MRT4530_42621C.1
atgatatcggaattcaggatttatgtccaagaggcaatagaacggtacgaacggtacgatctccacagttgcacctatagacaaagatatgcgtccgttagctatgttctatcaacaccctatgaacaaactgctgacctagtcattgatgggcggacgagcaagtttatcaaatggctggccaatgatggggatccaaagctcaagatggtatctattgtcggatgtggtggtattggtaaaactacacttgccaagcttttctacaacaaatttggtggacgattcgactgtagagctttcatccaggttccccaaaagcctaatatgaaaaggctcttctgcgacataatctcccaggtccagcaaaataacccccacgaagattgtaaggagcttgaacttattgataatatcaggagacatctacaagataaaaggtgctgctattttctgaaataa

SEQ ID NO: 39045 - DNA, 199 bp, Oryza sativa
  Clone ID: PAT_MRT4530_42622C.1
gaaaatatcaaactgtcctgcattgaaatgcaagtattatatgatttgtgatagaattggacaaattgacatgacaaacttttcttataaaagaaatgttacacgaccaaattccatccagctatgagtagttcaccagtatggcaaagaaaccaaacacaaaagccaatgagttgccagtgttaccattacattaaaa

SEQ ID NO: 39046 - DNA, 530 bp, Oryza sativa
  Clone ID: PAT_MRT4530_42623C.1
atagaaggttatgctgatccaatatctggagaaatcaattacagaagcgtggcatgaataatccagtctccattagcacgcagtcaacactaactgtaaagcatcaaaagtgttctttacgtacattaccaaattaatgaactttcgtacaacacaaagctacaaagtctatcccagtctatttatatttattttcacagacggacggtatgtttcaccttgatttatatttttatagacggtcatttggctctaatttggctctaaggttatatccgcctccaaatatatactgtactatgtagcactacactgcaccgtacaatacaaaaaaaataccaatgtaaaacagcaacgtgccaaaagttttaaataaagaaaaaaaacaactgacgtctcggctcgcggcagcgcaagaaaaaaagcgcgcgaaaacgccgtgttgcgttgcaccttttcaaagcttacagctttgctcgcgattcacttccgcggcggacatggcggcggcggtggcgatcaaacttagc

SEQ ID NO: 39047 - DNA, 732 bp, Oryza sativa
  Clone ID: PAT_MRT4530_42624C.1
ggcgggcgtccgcgcgtccctcgcctgtgccacggggacttcggcggcgccgtgagttgctccctcggcggcgcgccgcccatcaccctcgccgcgttcacgctgggcggtgccgacgggaagggcttctacgacatgagcctcgtgggcgggggccgacgggggagcccgcgagccgctcctccccccgccgccgcgtcgcccctcgctggccgctgacgccctcctcctcccgctggctgagtcagagaagggagagagagagagagatgaggaagggagagaagaggggaaaagagaggaagagaggaggctgatgtggcagcctgacatgtggggcccacgtgggtcccacactgactcagccgccacgtaagataaaaccgaagtcaaaaccaccgaatgacctattgtggccggttttgatagttgagggacgctagatatctggttttgcggttgggggacgattgtgtaactcgatgactagttgagggaccttcggtgtactttttcctatcgcctttgcttgctaaggcccaccaatatcatcaacgcgccagaacttttgacccacatagacaatgccattaccagttgtggctgcaagcctgcaagcccacaagtaaattgcacagaagactgtgccatttgaccgaacaggttgacgggcatactgtggctgtgtttagttcgtgtgccaaatttttttaaatatacgaacacacattt

SEQ ID NO: 39048 - DNA, 535 bp, Oryza sativa
  Clone ID: PAT_MRT4530_42625C.1
ggagctcctacgcggctatgcccctaggcatcccgcccggctcgtgtcccgcctggtatgcgcgctgggggcgcaacccgtttgccgtgtgctggctcactcgtctggcaccccaggcttctctcctctggctgccggctccgatggtgtgtgctgccgcgagccgtttgcccggtcccgctgggttctgctatctccttgggttcgccttcctcttgttcgtctccctctggggaccccgcgtgcgcctgctcctaccggtccgggtttccccggtcgtcccgcgcgtccggagaagtcttggtaatgtaagatttcagtttagaagttgagttagattgtatcatatttgcctgaacatcatggagttgcaaaatgcaggtcatgaccgtgttacccaatagtttgatgggaaaaatctttgaattaaccatgtggattcagggctctctgtattgcagtgtggtggatggttcgaaagttttatgtttgctttacaagttacagagctattttatgaaaaaaaaaaaaaaaa

SEQ ID NO: 39049 - DNA, 492 bp, Oryza sativa
  unsure (1)..(492): unsure at all n locations
  Clone ID: PAT_MRT4530_42626C.1
atgcggctataccaatcccttgggcagtatcgtaagccggatggcttaggcatcgtctctctgaaaatcgactggatcatagagcgttaccagctgcctcaaagttaccagcgtatgcctgacttccgccgccgcttcctgcaggtctgtgttaatgagatcaacagcagaactccaatgcgcctctcatacattcgggaaacctgtcgtgccagctgcattaatgaatcggccaacgcgcggngagaggcggtttgcgtattgggcgctcttccgcttnctcgctcactgactcgctgcgctcggtcgttcggctgcggcgagcggtatcagctcactcaaaggccggctcgnnccctgccagcatacaaaaatgacctcagtcagagtggcgaacccgaagatataagatacagggtcccctggagctctcggcgttctgtcagacttgcgtacggaactgtcgcttctctttggaagcggcgctttata

SEQ ID NO: 39050 - DNA, 376 bp, Oryza sativa
  Clone ID: PAT_MRT4530_42627C.1
attatgtgcaaacttagggggggtgtttaatcattaaaagaaaaacgcaatttttttctaaaagcataacccacaggttccatgaccaggtaaatgtacaaaactcactgaatggacacctgggtttgatactacacgatgccaaacataaaccactgggaaatattttttaacacgttaaccaaccaacaaacgggggataaattattgcactctatattatgtgatacgcaagctgttacaaggtctcattactgaaccaaatagggggttaacttagtcccaaatgaccaaaatagcttattggggacttagcaaccctgctcgatcagataattgccaagccttttcaaaatcatgttgcactggcctgggg

SEQ ID NO: 39051 - DNA, 676 bp, Oryza sativa
  unsure (1)..(676): unsure at all n locations
  Clone ID: PAT_MRT4530_42628C.1
ctcctcttcagatggatcagatnccgccaattcatcttgaaatgtagattcagaacttcatcccattgccgaatacctgtctaatttgtatttggcatgacaatgcctccagcaagactcaagacatgcctatcttcgtctatctaggaaatctccgagttgcagctaggatgtcatccgaaggcaggattctgcaaaggcctgctgagcctgatacaagttccattctgctgcttctgtgtacttatgattgtaggttaactttgtacactagtccattttcatttgtttggcagcagagtgcagctgtattatatgcaccttggcattatggatacccccagctgaaggcaaggtattcactaggctcagatccaataagacaggcatgcatgctgacgctgatcttatctgggtaggagttctgtagcctgtagattagccacagctggagcattatttacgttttgccgcgttgattacttgattgctgcagtgagtaggaaggtgatttgtctaacagtttggtgactccactcctctggaatacaggtaatgttctgactatttaaccgttccgcatcaaatgtggcctgttgacggtgttgtaaaatttagccagatgaagtctgttgataaacgttgctttggtgttaaaaaaaaaaaaaaaaaaaaa

SEQ ID NO: 39052 - DNA, 571 bp, Oryza sativa
  Clone ID: PAT_MRT4530_42629C.1
gctgcaggaatcggcacgagggagaaagcaaaaatcatgaaggaattggaggatcttaagaaaaggtggaggaaatccaggcgagaaggatttggttgagggtgaaaaggataagctttggttggagattttaatagtagagcagaaacatagcatgtatgaattagaggttaaaaggctcaagttagaactaggtgcattggcagaggcaaaggaaacagctatgaactcatttgagactgagaagataaaattcataatggatgtggaggaccttaagaggaagatagaggaaatccaggtcggtaaggaagcgactgaggaagtagggcgcgacaaggatgctgaggccgataggctgagggctgagttgatgaagatcggtgtttctttgtcacagatgcaagcatcctataatgaacttgatggtaagaattcgcacctaaatgatgagaagaattcaatctagaaagcagtagatgctaagaaggttgaagcatgcaagctgaagtaaaaaaattggggaacttgaaaattacgatgctgaaaaggatgatgagaatgggaaact

SEQ ID NO: 39053 - DNA, 987 bp, Oryza sativa
  Clone ID: PAT_MRT4530_4262C.1
atgcagaaggtgcggctcaagtgggtgaagaaccggggcctggaccacatcatcgcccgcacgacctccatcagggcgtcctgcctgctgctcgaccacctcgcgcgcctcccgtcgtcgtcgcccgtgccggcgcgctccctcgcgcgccttcagaagccgcttggcctcaccgtgcccgtgctccgcttcctccgccgccaccccaccctcttcgcggagaccctgcacccgcgcttcccgaccctcccgtccttctccctcacgccggcctcggacatcctcctcggccgcctcgcccgcgcctccgcgctcgactcgcacctccgcctcgcccgcctcctcctcctcacccgctccaagtcgctcccgcttgcctccgtcctcccgctgcgcttcgacctcgggctgccttacaacttcgccgccgccttcccggtcgcccaccccgacctcttcgccgtctccaacaaccacatctccctgtccgctaccgcctccggcctccccgagggcatcgccatctcctccctccagcgccgccacgccgaggccatcgagggagcgagatggttcggaggaacgcgattcggctgctccggggaggaattgggcctgccgcacaagttcacgagattgttcacgcggtaccctggggttttctacctgtcgttgaagtgcaagacgacgacggtggtgctccgggaggggtacgagaggggtaagctggtggagcagcatccccttgcggcagtgagagacaaggtgttctatgtgatgcgtactggcgtgctgttccgggggaaaggcttgtccaagcttgttttggatgaggatggtgatgaggaggttgtgatggatggagatgaagagtttcacggagaagggatggatgaagatgctgacgttgagtgctttggaatggatattggtggatatgaagacaatactgatgatgaggacaacgaacgggatatgtatgattga

SEQ ID NO: 39054 - DNA, 175 bp, Oryza sativa
  Clone ID: PAT_MRT4530_42630C.1
caaagaacaccaccttggccctcgtgccaagcctcgccggaccgccgccgcgtcctgtccacccttcgctagccagatccacatgagaagaggatgcacccaagctctaagcaggtttcccttaccgtcggtgtcgagtttatcgcaccttagcgataaacacgattaccgcgtg

SEQ ID NO: 39055 - DNA, 304 bp, Oryza sativa
  Clone ID: PAT_MRT4530_42631C.1
ttttctctactactactagccagcaagctagctaactaactacgtggctatggcccccaccgtgatggtctactcggtcaccttcgtggctccatttcaagggctcaagtccaccgtccgcctccctcgaagccgacgtttcaccaacttgggctttggcaatcgtcagcaatggcggaaggatcatgtgcatgcaagcgtggccaattgagggcatcaagaagtttgagaccctatcgtacctgccaccactcaccgtggaggaccttttgaagcaaaccgagtacctggtttgatccaagtg

SEQ ID NO: 39056 - DNA, 320 bp, Oryza sativa
  Clone ID: PAT_MRT4530_42632C.1
ctaacgtgatgaccgtgcccgcgatagtaagtcaacgtagtagcgagaggaaccgttgattcacacaattggtcatcgcgtcttggttgaaaagccatgtggcgcgaagctacccgttgccgggattatgactgaacgcttaatcagaatccaatagcaacggcctgccccccgcccgccccgacccacgttaggggccaagcccccaagggcccgtccaccagccaagccggcccgccgacgcgccgcggccgccgcctcgaagctcccttcccaaaggcgccgctctagaggatccaagcttacgacgcgtgcatgcg

SEQ ID NO: 39057 - DNA, 113 bp, Oryza sativa
  Clone ID: PAT_MRT4530_42633C.1
acagagcgcctagataatagcacattctcaggctttattgaaccatatttttatggctctgagaacaccgaacagggaccactatactaccttaggaggcaccgcctcacaca

SEQ ID NO: 39058 - DNA, 370 bp, Oryza sativa
  Clone ID: PAT_MRT4530_42634C.1
ccgagcacacagcatccgcggggagtctcccgcacgtcacagccagccggccagtcgtcagcacagcactgggcacaccacagtcagcaggcagttctactgagatccggctcccaggagatgagttcactcagcacgcacagcacagatatcatcaccagcacaattacatccagttaatttattattgttattattagcatatttcaccccacattcagctctgggttgctaatcccattgcagttttaatctagatctagctttttgatgagagagaacttcttccatttataatcctcccccaccaggattcttttctttaatctactttcggacattattagtagaaaaaaaaaaaaaaaaaaaa

SEQ ID NO: 39059 - DNA, 912 bp, Oryza sativa
  Clone ID: PAT_MRT4530_42635C.1
cgtctaaactagtggatccccgggctgcaggcttttctgtgacttgatggtgataaggcaccttccaaactagcttttatccaacaatctgcatagttgttaatttttttcaaaacagggctcattatattgtgcatactttcagcaatgatttgtttgagaacgcgtgcatggaatttgatgaagataatctaaagcccacatttcggattctctggggaataccagatgtaatttgtagtgtattacacatgtaggacgttcaaatgcaatcaatattgctgaaagacttggtttgccctcggacataatagaaagctcacgacagttacttggaacagctggtgcagagataaacgcgttgataatggacatggaaaatttcaaacaacaatatcaacatcatcttcaagaggcacggttcccccgggcgccggccaaggagcttcacaataacttggaagtggcacagaagaacattatagaccacacttctgctcaaagaaacagcacaggcgagagtaatttcagagtatgctgttatggctcgttccattatacgtaagaagtttcagcagttccgcgaatctgcaatagccaaaagagtgcttgaagaagagaaagctgtgcagaacgacaaacctgagagattgaaggaccctgaaccaacgagtactcctgctgtcaaaaaggcacagaacacaaacatcagcatggccacaacgaccgaaggtgaagataatgggattccggaagttggagatttagtttatgttcctaagctaaaaaacgaagctactgttgtcaaaatagactcatcgaagaacgaagtgcaagtccaagctggtataatgaagctcaaactaaaattcaaagatgtcaagattcagaagaggatctccagataaaacg

SEQ ID NO: 39060 - DNA, 1181 bp, Oryza sativa
  Clone ID: PAT_MRT4530_42636C.1
gtttattgccagctcaagtgagtacgacgtcgacgtcgtcgacgactgcaagggcgacgaggccggcaaccagaaggctgttgttgtcgccgacccgaccgcgttcaacctcggcgcggctatgctgaacgacaagttcctcatgccggcgtccatgaaggaggaggccaccgatgtcgagttcatccagaagaggagcgcgtctggcgcggagcctgagctgatgctgaacaaccgtgtctacacctgccacaatgtccagtgcccgcatagcgactatggatacgggttccttgaccggaacgcgcgcaacagccaccaatacacttgcaagtacaatgatccactccagcagagcacggagaacaagccatcgccaccggccatcttcccggcaacctacaacacgccgaaccaggctctgaacaatctggatttcggcctgcccatggatggccagaggtcaattacagagctgatgaacatgtacgacaacaacttcgtggccaacaagaaccttagcaacgacaatgccacgatcatggagaggcctaatgcagtcaacccaaggatacagattgaagaaggcttttttggacagggaagtggcatcggcggcagcaacggaggtgtgttcgaagatgtcaatggcatgatgcagcaaccgcagcagaccaccccggcacagcagcagttcttcatccgcgacgatactccattcggtaaccagatgggcgacatcaatggcgcatcggagttcaggttcggctctggtttcaacatgtcaggtgccgtcgaataccccggcgcaatgcagggccagcagaagaatgacggcgcatcggagtttgaggaattggaatgatcctaagagatagtgctggccaagttatttttacatcatggcactctctggattattgcaccgaggtgctggaaatctagcttacatttaagtttgcataccattaaaagaaaaaacttgtcgtaatgttttactcatttatgtctagtttggttttttcctaactgagcgtttcaataataaatgtatagcaaacttatttttttactttgattgaaatggacaattttagaaacaagatgtatgtgagttgaaacatcgattaatatactcccaataagatattatctatactcctctaaaaacacacaaaccc

SEQ ID NO: 39061 - DNA, 348 bp, Oryza sativa
  Clone ID: PAT_MRT4530_42637C.1
ttcttatcatggactcctccaccctctcgtccggggccgtacatgtacctgtgacgccgccgaccggcactcctcctccctgtcgtacacccgacgcctatacctcgcgccgacacaggcgcgtgctcgtcggatacatctccgcccacaaaccacatattttcttgggggatatggggatcttgggcgaggagaggagatgaaagacatggaggatggataagaggatcacgcacctgtggagagggggagggcaggataccctcaggtgctacctgagaggaagaacaaatacggataagacagaaactacgcataaggacaacaaggaaagggaggacaaggaaa

SEQ ID NO: 39062 - DNA, 2606 bp, Oryza sativa
  Clone ID: PAT_MRT4530_42638C.1
gcccgaggctcgccaacccccgtccctgcgccctacttgcttcttttctcctttcttcctccaactcctacagcggacgcaccgtgggcagcagctccccctcttctccaccatcaacctattagctaaccgaccaattcctacgatctactggccttctcctcctccctcctccaacctaaaggactaacgagaattgacagctggcgggcttgtgggacgagggaaaaagtagcttggggctggggaacgagaggtggattacttccggagatgtagatggacatgaagcggcgtagccgaacgcagagccaatcctccggacgacagcagctaggttgttcagtccgggtgaggtatactaccaggtctcggtaaccaggatgggcgacaatcaatggatcgcatccggagttccaggttcgggcatcatggtttcaaacatgctcacggtgcgcggtcgaataccccgggccgcgaactgcaaggaggccacgcagtaagaatagagcaggcgtcggaattgggtacctaccctgcagagtatcgtgaagaataaacttgtagcgtttaaagaaagagcaatccttaagcttttaaagttcaccatggtcatccctctgcttccatggtggaagcgtctcctgtgaacccggtaattctataggtctttctcatataggttttgcattagttgcaaaatggctggaacttggaactggtttatacatgtatgtccgtccagccagtaaacctcctatggaaacttaatgttatttctagtttaatttgttagttaaatgctgttcaaaagaaaggttgtgaagagaccggaacggccccgcggccgtcgtgaagtaccatgccgacaacgccgtcccgggcttcgagagcgagctcgcctccggcaccgggagcccgcactcgctgcaggagctgcaggacaccaccctcgggtcgctgctctcggcgctcatgcagcactgcgaccctccgcagcggcggtacccgcgcgagaagggcgtccctccgccgtggtgggccaccggcgacgaggagtggtggccggagctcggcatccccaaggaccagagcccgcctccgtacaagaagccccatgaactcaagaaggcctggaaggtcagcgtgctcaccgctgtcatcaagcacatgtcgccggacatcgagaagatgcgccggctggtccggcagtccaagtgcctccaggacacgatgacgttttaggagatctccacctggctggccgtcgtcaagcaggaagaggagctgtacctgaagctgaaccccggtgcccgccctccggcacctaccggcggcatcaccagcgccatatcgttcaacgccagctcaagtgagtacgacgtcgacgtcgtcgacgactgcaagggcgacgaggccggcaaccagaaggctgttgttgtcgccgacccgaccgcgttcaacctcggcgcggctatgctgaacgacaagttcctcatgccggcgtccatgaaggaggaggccaccgatgtcgagttcatccagaagaggagcgcgtctggcgcggagcctgagctgatgctgaacaaccgtgtctacacctgccacaatgtccagtgcccgcatagcgactatggatacgggttccttgaccggaacgcgcgcaacagccaccaatacacttgcaagtacaatgatccactccagcagagcacggagaacaagccatcgccaccggccatcttcccggcaacctacaacacgccgaaccaggctctgaacaatctggatttcggcctgcccatggatggccagaggtcaattacagagctgatgaacatgtacgacaacaacttcgtggccaacaagaaccttagcaacgacaatgccacgatcatggagaggcctaatgcagtcaacccaaggatacagattgaagaaggcttttttggacagggaagtggcttcggcggcagcaacggaagttttgttcgaagatgtcaatggcatgatgcagcaaccgcagcagcccaccccggaacagcagcacgacgtaagccggatccatactggttctagttaaacgaattcgaatcgcatgggaaccgaatgaatcaccacccctagttcgattcgatcacgtagcttgtagctgtaggggattagaggagctcataagcctgattaattttcagtgtgcttgtaagaattattggttaataatttttcagtgtagatccatgctatgcaagcttgcaaaacacaattggctctacaattcgactcaggcgctggaaatctagcttacatttaagtttgcataccattaaaagaaaaaacttgtcgtaatgttttactcatttatgtctagtttggttttttcctaactgagcgtttcaataataaatgtatagcaaacttatttttttactttgattgaaatggacaattttagaaacaagatgtatgtgtcatagcgtgcacatgtctgatctttgtacatcagataccggaccaccgggaccttggaaaacctggacagaaccttgttgatttacgcatccactattggcatggatcgtgggccatgactattgcaagatgtg

SEQ ID NO: 39063 - DNA, 295 bp, Oryza sativa
  Clone ID: PAT_MRT4530_42639C.1
atggttgcacaggactccaatcaggacggagccacagtgttggagttgaacacggacaggagttgtctcctgttcggtcatggcggcgtgccgacgagtacgacgcgggccggctccggcgaggaggcggcaggtaccggcgaaggggcggcggcgatgctcctgtgtcggggaggcggctcccgtgggcatcggcatcctcaccggcgggaagcccacggcggcggcggcacgacgctctcaccggcggaatcccgcaaggaggcgggcggtggtgtcaaagcgaccggcacaa

SEQ ID NO: 39064 - DNA, 713 bp, Oryza sativa
  Clone ID: PAT_MRT4530_4263C.1
caagaagaggcacgcgcgcgccgatgcgagagcaaagcaaaatcagcagcaaactacagtagtagtacagtaattaacaagcagaggaggcagtaggcatggcgtctgtggtgttgaaggatctgaacaagcggctgctgggcctctcctgctcctccgccgcctccacctccatcgtcctctccggccactcgccgccgcacctccgagacccagctcgcaccagcaacagcagcaagaagaagaagacgaaggcgaacaagagcaagcagcagctggttagccctgcaagctcgtccaggttccttctcaactcctcccggatgcaacccagcgcggatgagttgccgccgcccttcgtcatcccggttgctgtcgcggctgcggcggaggagaatgagatcgtagctgctgcagtggaaggaggaggaggagaagaggaaaagagagagtcatcgtcgcaggtggaggtggtggtcctgcgggtgtccctgcactgcaagggatgcgcggggaaggtgaagaagcacatctccaagatggagggcgtcacctccttggacatcgacatcgccaccaagaaggtcaccgtcgtcggccacgtcacgccgctgtccgtgctcactgccgtctccaagatcaagcccgcacagttctggcccatctcctcctcctcatcgcccatgcctccacgcgcttccgcttccttctga

SEQ ID NO: 39065 - DNA, 285 bp, Oryza sativa
  Clone ID: PAT_MRT4530_42640C.1
atgagcggtctcaaagccaagcggagatggggcgagggttttgggagtccggctccggcagcagtagcatcggaggagaaccgggtcgtctccgtagccgacggtgataaattggagcttgtagtgggctatactgttaaacttgctcttagagttgctcccgatcggctggcgctcgcccaccgggtgacgcaagcaggcagcagccgacacgagccgtcaaaaaggttggcgttgccaagctcacctcctcccttggagtctcaaacatggggcttcccgtaa

SEQ ID NO: 39066 - DNA, 298 bp, Oryza sativa
  Clone ID: PAT_MRT4530_42641C.1
tgtatgcgcccgccctacattttatgggcgtttgaagaacctgaattgggtgttactggctgactgatttttctgttataaatacggaatccacccaagggggagggccaaccctaaggttcgcaagcaacacatgagattaccattacatgcattgcttaaactaaccctgactgatggttctcatgcagagtcagtttagacacctactttgtactaaacccttccctcactatctagcattttttttcatctttaacgaccttcacgataatattgcccttcttgttgctaatgc

SEQ ID NO: 39067 - DNA, 595 bp, Oryza sativa
  Clone ID: PAT_MRT4530_42642C.1
ggctctgttctaacttcttcttcctcagttcctctgcttctcgatcttgagcgatttcgaagatactactctcttcctcaactccgatcagatctagcctgattccggcggtgaacggcggcggaggttgtgtaacagccgcgtccccgccgtagccggccgtcgcgggcgtcacaatgccgctcaggttggatatcaagaggaagctcgcgcagaggtcggagagggccaagtccgtggatctgcatccgaccgagccatggattttgtcgagtctgtattcagggagcgtttgcatctggaactaccagacgcagacgatggtgaaatcatttgaagtcacagagttaccagttcggtcatctaaatttatcacacggaaacaatgggtagttgctggtgccgacgaatatgttcatacgtgtgtaccaattacaatacgatgggataaggtcaaggtttttgaagctcatacgggattacatcagtgtgtgggctgttcacccaacccagccttttgtgctgtcatcatctgatgacatgctgatcaagctttgggattgggataaagggttggatgtgcactcaaatcttc

SEQ ID NO: 39068 - DNA, 1177 bp, Oryza sativa
  Clone ID: PAT_MRT4530_42643C.1
tcgtttctccactccactctcccccaccacacgggaggggcaccgaggcataccgacgccaacctttggagccatggctccctgcctcctcctcgtcctcttcctcctcccggcgctcgccaccggccaccagcacccgtccaccctcggctcctccgccctctccgagtggcgctccgccaaggcctcctactacgccgccgacccggaagacgccatcggtggcgcgtgcgggttcggggatctggggaagcacgggtacgggatggcgacggtggggctgagcacggcgctgttcgagcgcggcgcggcgtgcggcggctgctacgaggtgaagtgcgtggatgacctcaagtactgcctccccggaacctccatcgtcgtcacggccaccaacttctgcgccccgaacttcggtctccccgccgacgccggcggcgtctgcaacccgcccaaccaccatttcctcctccccatccagtccttcgagaagattgcgctctggaaggccggcgtgatgcccatccagtaccgccgcgtcaactgtcttcgtgatggtggtgtgcgattcgcagtcgctggtcgaagcttcttcctgacagtcctaattagcaatgtcggtggtgctggcgatgtccgatcagtgaagatcaaaggaacggagtccggttggctctcgatgggccgcaactgggggcagatatggcacatcaactctgatttcaggggacagcctctctccttcgagctcacctcaagtgatggaaaaacattgaccaactacaacgtggtccctaaggagtgggacttcggcaaaacatacactggcaagcagttcctgctctagagaggaaagggtaccaatagcagcttacagttacaaatttttttctgatcctatgagttggattgtactattgtatattcctctgaggaacgataatagtatcattagagaaagaaatgtttagtgcagagcctccaatagtagtccaacatagaaaaggtgctcataaatgtggcatgtaccatttggaactctgataattgcactacagaggcttgatgtaccattcaaaatagaaggctgtacctgttgtctcgattgtatggtaattatttgtagcaattaaacagtgtcatacccttgtctgtaaaaaaaaaaaaaaaaaaaaaa

SEQ ID NO: 39069 - DNA, 2905 bp, Oryza sativa
  Clone ID: PAT_MRT4530_42644C.1
atggcgatggctgtgatgttggcagccgctcaggttggatatcaagctgaatgtgtttggtggttggatcagaggaagctcgcgcagaggtcggagagggccaagtccgtggatctgcatccgaccgagccatggattttgtcgagtctgtattcagggagcgtttgcatctggaactaccagacgcaggtttgcaaactatttagagcaaaacaggaggagacgatggtgaaatcatttgaagtcacagagttaccagttcggtcatctaaatttatcacacggaaacaatgggtagttgctggtgccgacgatatgttcatacgtgtgtacaattacaatacgatggataaggtcaaggtttttgaagctcatacggattacatcaggtgtgtggctgttcacccaacccagccttttgtgctgtcatcatctgatgacatgctgatcaagctttgggattgggataagggttggatgtgcactcaaatcttcgaggggcattctcactatgttatgcaagtcacatttaacccgaaagataccaatacttttgctagtgcttcacttgatcgcacagtaaaggtatggagtcttggttcccctgatcctaatttcacattagatggccattcaaaaggtgtcaattgtgttgattactttactggtggtgatcgcccatacttaattacaggctctgatgatcagaccgcgaagactgctttggttgttccatttttgtcaatcattgttttggatccttttaatcttactgtagactggaataacacgttgcttgtttcttacaggcttgagaacactcttaactatggccttgagcgagtgtgggctttaggatacatgaagggttcaagaagggttgtgatcggatatgatgaagggacaataatgataaaaattggccgtgaagttcctgttgctagcatggacagcagtggaaaaatcatatggtcaaaacataatgaaatccaaactgttaatatcaagactattggtgcagacaatgagattgcagatggtgagcgcttacccttggctgtgaaggagttgggaacctgtgatctttatccacaaagtttaaggcacaatccaaatggaagatttgttgttgtatgtggagatggagaatacataatctacaccgcattggcatggagaaatagatcattcgggtctgcacttgaatttgtttggtcacttgatggagaatacgctgtcagagaaagcacctcgaggataaagatatacagtaaaaatttccaggagagaaagagtataagaccaccattttctgcagagcgtatatttggtggagtattgctggctatgtgtacaaatgattttatttgcttccatgactgggcagagggcaggatgatacgcagaattgatgtcaatgtgaaaaatctctattgggccgatagtggtgatttagtgacaattgcaagtgacacctcattctacattttgaagtacaatagggatgtagtttcttctcatttggatggagggggttcagttggcgaggaaggtgtggaagatgcctttgaactacttcatgagatcaatgaacgcatccgaactggcctatgggttggcgattgttttatctacaacaattcttcgtcacgacttaattactgtgtaggaggagaggcaattgccattgaggcacaaagtgagtccaagtggaggcagttaggagagttagctatgtcaaccggaaagcttgatatggcagaggagtgtcttctacatgctatggatctcagtggtttattacttctgtattcatcccttggtgatgctgaagggctaacaaaattaacatctatggctaaagaacaagggaagaacaatgttgctttcctttgtttcttcatgcttggaaaactggaagaatgtcttcaattgttaatcgaaagtaatcgtataccagaagcagcattgatgtcgagatcttatcttccgagcaaagtccctgagattgtaacattatggaaaaaggatctccaaaaggtaaaccccaaagcggcagaatcattggcagatcccaacgagtacccaaacttgtttgaagactggcaaattgctctcaatgtagaagctaatgttgcgcccaaaaggggtatttatgcaccagctaaggagtacattatccatgctgagaggcctaacgagactctggtggaagctttcaaaaatatgcgtatacatcaagaggaggtgctgccagatgaaaatggagatgacactcacgaggctatcgaggaaaatggagtagaagagagccaagaagatgctgttgaggttgatgttgaagctgatggttcgactgacggtactgtccttgtgaacggaaatgataccgaggaacagtgggtattgactcctgaccaatagtgaatcagcgggacagcaacctgatacactgattcagcttgtaaaggttgctgactcctactgaaactatgtgaaggccgttttcctccacttgtataatcattgggcgtgctttaagatcggcatatccgacgataaaacccacagaaattagtcatcgctttgtccttgtttgagatagaaaattttgtacctttttacacacataggtccttactgtggattctcaggatgctttatatatacgagggatgttcccttctcgttgaggttgaatttgattagctaaagaggatccatattttacacaagagtacatagggtaaaagtatgcttgctggatccagaatgtttctttgatgcaatctgcaagacaacactttgtgcgagctatgtatcatttcatttgtgctattccttgcgagcgttattagtgaataataaaagtttagatacaagagtgattcttttatattgatat

SEQ ID NO: 39070 - DNA, 176 bp, Oryza sativa
  Clone ID: PAT_MRT4530_42645C.1
tcatgaagatgtagcaagatcccgaatgcggggttccttgtgtttctgtttcaccctttcgtgtacatatctttttcccctcaggatgcagttgctatcgcacattggacaaatgcacaaatgagttcagtgataagaagtagcattccagactttcaaaaaaaaaaaaaaaaaaa

SEQ ID NO: 39071 - DNA, 739 bp, Oryza sativa
  Clone ID: PAT_MRT4530_42646C.1
gaaaactgaaagagtatcagactaaacaagtattacttcaatatatacacatgtacacaaattagttagccaagtactctttctcaataagatgcgtatagatgaaaggtttaaaaaagtgaaaaatcttcctgatctttccattatgattgttgaaacaaagttgcacaatagacatgagattatttacaagcttctcaaattggttatagtacttccagtagcaatagctagtgttcaaataatcttttctgccatgaattatgtgaagaataaattgagaaacaggctgggggatcaatacttgaatcattgcttggtcacatttattgagcgtgagatgtttttgaaagtcaaggacttatcggtattgacatactgtgaaccattgatttttttttactatgaacttttttttgttaaacgggaatacccaacttcgaaatgctggctccgccactgcttttactacagtagtttattactccatgcctcatgcagagagcagtgctgcgaattgatctgccaggctcttcacagtcgtcggagaaactgcagattctccacccatgtgggcttcacgcagtggcgtcagatcaggggcagcctcgtgcgatggcggcacgcggtgatgacttcgtacagttgagatttcgatggtaaagcacgcatttgtttacgcctggagcctcgggcgacagaaatcggccgcgctaattgcacgcctctatggctggag

SEQ ID NO: 39072 - DNA, 3099 bp, Oryza sativa
  Clone ID: PAT_MRT4530_42647C.1
atgccgctcaggttggatatcaagaggaagctcgcgcagaggtcggagagggtcaagtccgtggatctgcatccgaccgagccatggattttgtcgagtctgtattcagggagcgtctgcatctggaactaccagacgcaggtttgcaaactgtatagagtaataaaacaggaggaggagacgatggtgaaatcatttgaagtcacagagttaccagttcggtcatctaaatttatcgcacggaaacaatggatagttgctggtgccgatgatatgttcatacgtgtgtacaattacaatacgatggataaggtcaaggtttttgaagctcatacggattacatcaggtgtgtggctgttcacccaacccagccttttgtgctgtcatcatctgatgacatgctgatcaagctttgggattgggataagggttggatgtgcactcaaatcttcgaggggcattctcactatgttatgcaagtcacatttaacccgaaagataccaatacttttgctagtgcttcccttgatcgcacagtaaaggtatggagtcttggttcccctgatcctaatttcacattagatggccattcaaaaggtgtcaattgtgttgattactttactggtggtgatcgcccatacttaattacaggctctgatgatcaaaccgcgaaggtttgggactatcaaacgaagagctgtgttcaaacgcttgaaggacatgcacataatgtctctgctgtttgtttccatccggagttacctataacacttactggctccgaggatgggacagttcgcttgtggcactctactacctacaggcttgagaacactcttaactatggccttgagcgagtgtgggctttaggatacatgaagggttcaagaagggttgtgatcggatatgatgaagggacaataatgataaaaattggtcgtgaagttcctgttgctagcatggacagcagtggaaaaatcatatggtcaaaacataatgaaatccaaactgttaatatcaagactattggtgcagacaatgagattgcagatggtgagcgcttacccttagctgtgaaggagttgggaacctgtgatctttatccacaaagcttaaggcacaatccgaatgggagatttgttgttgtatgtggagatggagaatacataatctacactgcattagcatggagaaatagatcattcgggtctgcacttgaatttgtttggtcagttgatggagaatatgctgtcagagaaagcacgtcgaggataaagatatacagtaaaaatttccaggagagaaagagtataagaccaccattttctgcagaacgtatatttggtggagtattgctggctatgtgtacaaatgattttatttgcttccatgactgggcagagggcaggatgatacgcagaattgatgtcaatgtgaaaaatctctattgggccgatagtggtgatttagtgacaattgcaagtgacacctcattctacattttgaagtacaatagggatgtagtttcttctcatttggatggagggggttcagttggcgaggaaggtgtggaagatgcctttgaactacttcatgagatcaatgaacgcatccgaactggcctatgggttggtgattgttttatctacaacaattcttcgtcacggcttaattactgtgtaggaggagaggcaattgccattgaggcacaaagtgagtccaagtggaggcagttaggagagttagctatgtcaaccggaaagcttgatatggcagaggagtgtcttctacatgctatggacctcagtggtttattacttctgtattcatcccttggtgatgctgaagggctaacaaaattaacatctatggctaaagaacaagggaagaacaatgttgctttcctttgtttcttcatgctaggaaaacttgaagaatgccttcagttgttaatcgaaagtaatcgtataccagaagcagcattgatgtcgagatcttatcttccgagcaaagtccctgagattgtaacattatggaaaaaggatctccaaaaggtaaaccccaaagcagcagaatcattggcagatcctgacgagtacccaaacttgtttgaagactggcaaattgctctcaatgtagaagctaatgtcgcgcccaaaaggggtatttatccaccagctgaggagtacattatccatgctgagaggcccaatgagactctggtggaagctttcaaaagtatgcatatacatctagaggaggtgctgccagatgaaaatggagatgacactcacgaggctattgaggaaaatggagtagaagagagccaagaagatgctgttgaggttgatgttgaagctgatggttcgactgatggtgctgtccttgtgaacggaaatgataccgaggaacagtgggggcgcgacacgacagcttatcatcgtctagagaagttgtttgcttggactgggcttaaaactgatgttaactttattaagcagtgtcaagtatgtcagcatgccaagagtgaacattgcaagttgccaggcttgctggtacctcttcatgttcccaaagaggcttggatggatatctcaatggactttgtggagggtttgcctaaatctgatggctattcagtaattctggtagttgtgaatcggttcactaaatatgcttatttcattcctttgaggcttctcctcacaagtggcatcattggctccatcttgccgaatattgatataacacttcttctcacacctccatgggctgttcaccatataaagcattctttgtcatcgatggtcaatcgtccatatcccaaattggcgttcaagttctttgggccttccaagattctagagaaggttggcactgctgcttatcgtcttggtttgcctgatcacagtttggtgcatccggttttccatgtgtctcagttgaagccccatgtgccggctcacacacctgttttcggtagtctgcctactcttgtggttctggatgcagttgaagttgtacctgcagagatccttaatcgtcggcttgttaagaaggggaatgctgctcgaatgctgctcatgtgcaagtgttga

SEQ ID NO: 39073 - DNA, 1781 bp, Oryza sativa
  Clone ID: PAT_MRT4530_42648C.1
tcgcccacgcgttcgtccacgcgtccgcccacgcgtccgagtttcttctcatttggatggagggggttcagttggcgaggaaggtgtggaagatgcctttgaactacttcatgagatcaatgaacgcatccgaactggcctatgggttggtgattgttttatctacaacaattcttcgtcacggcttaattactgtgtaggaggagaggtcacaaccttatttcacttggatcggcaaatgtatttactgggatatcttgctaaccaaagccgtgtctatcttattgacaagcaatttaatgttgtggggtatactttactccttaccatgattgagtataaaacacttgtaatgcgtggagacttcgatcgtgcaaacgctcttttaccatctataccaaaagaacaacatgacagtgtggcacgtttcttggaatcacggggcatgttggaagaagcccttgagatagcaacagactctaattacagatttgacttggccgtgcagcttggtcggcttgaagttgcaaaggcaattgccattgaggcacaaagtgagtccaagtggaggcagttaggagagttagctatgtcaaccggaaagcttgatatggcagaggagtgtcttctacatgctatggacctcagtggtttattacttctgtattcatcccttggtgatgctgaagggctaacaaaattaacatctatggctaaagaacaagggaagaacaatgttgctttcctttgtttcttcatgctaggaaaacttgaagaatgccttcagttgttaatcgaaagtaatcgtataccagaagcagcattgatgtcgagatcttatcttccgagcaaagtccctgagattgtaacattatggaaaaaggatctccaaaaggtaaaccccaaagcagcagaatcattggcagatcctgacgagtacccatacttgtttgaagactggcaaattgctctcaatgtagaagctaatgttgcgcccaaaaggggtatttatgcaccagctaaggagtacattatccatgctgagaggcctaacgagactctggtggaagctttcaaaaatatgcgtatacatcaagaggaggtgctgccagatgaaaatggagatgacactcacgaggctatcgaggaaaatggagtagaagagagccaagaagatgctgttgaggttgatgttgaagctgatggttcgactgacggtactgtccttgtgaacggaaatgataccgaggaacagtggggtacgaacaatgaagaatcattagcataaaagctgtagttgagcaagttattgactcctgaccaatagtgaatcagcgggacagcaacctgatacactgattcagcttgtaaaggttgctgactcctactgaaactatgtgaaggccgttttcctccacttgtataatcattgggcgtgctttaagatcggcatatccgacgataaaacccacagaaattagtcatcgctttgtccttgtttgagatagaaaattttgtacctttttacacacataggtccttactgtggattctcagggggatgttcccttctcgttgaggttgaatttgattagctaaagaggatccatattttacacaagagtacatagggtaaaagtatgcttgctggatccagaatgtttctttgatgcaatctgcaagacaacactttgtgcgagctatgtatcatttcatttgtgctattccttgcgagcgttattagtgaataataaaagtttagatacaagagtgattctttt

SEQ ID NO: 39074 - DNA, 458 bp, Oryza sativa
  Clone ID: PAT_MRT4530_42649C.1
gcctgcaggtcgactttagaggatccccctgccaacgactccgatccaaccggagctctggaccatgtttttcgacgggtcgctgatgaagacgggggccggcgcgggcttgctcttcatctcgcccctcggaaagcacttacgctacgtagttgcgcctccatttcccggcgtccaacaatgtggccgagtacgaagctctggtcaacggattgcggatcgccatcgagctaggggtcagacgcctcgacgcccgcagtgattcgtagctcgtcatcgaccaagtcatgaagaactcccactgccgcgacccgaagatggaggcctactgtgacgaggttcggcgcctggaagacaagttcttagggctcgagctcaaccacatcggtcggagctacaacgaaaccgtatacgagctggctaagatagtctctgggcgaacgacagtccctccggac

SEQ ID NO: 39075 - DNA, 2785 bp, Oryza sativa
  Clone ID: PAT_MRT4530_4264C.1
gcctccagggccggcagtgccggccgcccccctccccccccgcatgcctctccctctgcgccctccgcgtgagcggcagcaagtgttcactgcgttcttcttctcgatttatctttcttggtttcttgatctgtagcttattagcggccatgtgcggcggagcaatcatctccgggttcatcccgccgtcggccgctgcggcggcggcggctgcggcggccaagaagcagcagggcaggagggtcacggccgacgtgctgtggccggggatgctgcggaaggggaaggcggcggcggcggaggaggactttgaggccgacttccgcgagttcgagcgtggcatgagcgacgacgaggcggaggggggcggcggcgaggaggaggaggacgacgacgacgtggtcgtggtggtccccccgccggcggcggcgaggttcgtcgtccgtgccgcggccaaggcggcgcccccaactgcagatgggatgttgactacaaagcttgtccaacatgatggacctactgctagatcagcaaagcacaagaggaagaatcagtacagggggatccgccagcgtccctggggcaaatgggcagctgaaatccgagaccccagcaagggtgtccgtgtttggcttggaacatataacactgctgaggaggcagctagggcatatgacgctgaagcccgcaagatccgtggcaagaaagccaaggtcaactttcctgatgaaccagctgttgctcagaagctctccctgaagcaaaacgctgccaagcaagagaaactagctccacctctgaagacctgtggcgatgatgctttctttcagctaaacagttcagacaatgatttgtttgcaatgcttgcaaaggtgcctgcaaagccggcagagcctgttgatctcatgcctccagtcaaacctcttgcttccactgagacattcgagatgaacatgctctctgatacgagcagcaactcatttggctcttcagactttggttgggaggatgacaccctgaccccagactacacttcagtcttcgttcctaatgctgccatgccagcatatggtgaacctgcttacctgacaggtggagcgccaaagagaatgaggaacaactatggtatcgccgtgccccagggaaatggcatgcctaatctcgcacaaaacatgcccaccttcgatcccgagatgaagtatttgccattaccttatgttgagagcagctcagatgaatcaatggacaaccttctgcaaaatgatgctacacaagacggggcaagcaacgagggcatctggagccttgatgagctgctcatggcagctggtgcctactgaggagacgaaatgttctggtcagtgtggtctgtcactagcaaaccatgttgaatgtgtatggccaagatgaagagctggtgatgtctgctatgttttgtagagggatgctaccaaagtaatgctagaatattacaagctgctatcagctgtactctctatgacaatgtttatactatgtttgctgtatggtgtggtctatgatttgaagtatgttggagactgattcaaataactgccttggccatgtgtgtgctgtaatgtgcttattaagttatatagttgtgctcatattgcgtatctaaaaaaaaaaaaaaaactagagactagatctcccccccggcccagttctgcctgcccgggctctcaacagcccctccgtcgctcccgagatctagtgtttgccagtccctttcgttgagagcagctcagatgaatcaatggacaaccttctgcaaaatgatgctacacaagacggggcaagcaacgagggcatctggagccttgatgagctgctcatggcagctggtgcctactgaggagacgaaatgttctggtcagtgtggtctgtcactagcaaaccatgttgaatgtgtatggccaagatgaagagctggtgatgtctgctatgttttgtagagggatgctaccaaagtaatgctagaatattacaagctgctatcagctgtactctatataacttaataagcacattacagcacacacatggccaaggcagttatttgaatcagtctccaacatacttcaaatcatagaccacaccatacagcaaacatagtataaacattgtcatagagagtacagctgatagcagcttgtaatattctagcattactttggtagcatccctctacaaaacatagcagacatcaccagctcttcatcttggccatacacattcaacctgacaagaaaaccatatcccattttacaacatatgtaatctgtacatgaaaatgtatctacaagaaatcaaaatagtaggtagtgtggagtgccttacatggtttgctagtgacagaccacactgaccagaacatttcgtctcctcagtaggcaccagctgccatgagcagctcatcaaggctccagatgccctcgttgcttgccccgtcttgtgtagcatcattttgcagaaggttgtccattgattcatctgagctgctctcaacataaggtaatggcaaatacttcatctcgggatcgaaggtgggcatgttttgtgcgagattaggcatgccatttccctggggcacggcgataccatgagttgttcctcattctctttggcgctccacctgtcaggtaagcaggttcaccatatgctggcatggcagcattaggaacgaagactgaaagtgtagtctggggtcaggggtgtcatcctcccaaccaaagtctgaagagccaaatgagttgctgctcgt

SEQ ID NO: 39076 - DNA, 282 bp, Oryza sativa
  Clone ID: PAT_MRT4530_42650C.1
atgaggatgtccaagttgtcaatggctactgctgtgatcttgctcctggtagtgatggccatggaggttgagggcattcgattggatgcagaaactcgcgcagcaaccagcaaccaaatggtcaataaatcgacagagaatgtgccaaaggattccggtgactcactaggcgaggcgaagagaagcattgctgggaatgaagttagggctgtagcacacaagttacctgagttccatgaagactactatggtcccagtgaccatacacctagacaccactga

SEQ ID NO: 39077 - DNA, 663 bp, Oryza sativa
  Clone ID: PAT_MRT4530_42651C.1
ctagtggatccccgggctgcaggatccatcgacttatccgcacccatcacccagcctcctctccacgcaaacgcaacccaacccaaacccccctataaaatcccttctcccacacaccggccgggacaagccacccacagacacgtactacgacaccgagtttgagctttgagctttgaggagtgtgtctgagagtttggtcatggcggacatcgcgttgctggtgacggaggagttcgagaggaagctcaagaggggggcgccgggcgaggagggcgcggcggcggagtccaggaggaacttcggcgccgtcatcaaggtgtgcagctcgtgggtcgacgccgccgccgccgccgccgccgccggggtgacggtcaacgtcgcgctgctcaacgtcgaccccaagtccgggcccgccgtcgccgccatggacggcgccttctccgcctagtcgcttcacagttttttcttttttgttcttcttcttttttactcaaaaaaaaagataagttaattaggaggaggaactagtctattatgtatctctcctcctttgatacagctcggtcaccgtgttgatgtaaatatagccgcttaatttttgtcttttgatttgaaacaagctcatcattcatccaaaaaaaaaaaaaaaaaaaagcggcc

SEQ ID NO: 39078 - DNA, 304 bp, Oryza sativa
  Clone ID: PAT_MRT4530_42652C.1
aaattcacaactagattttccatataagaggcgcataaggctaaacggaacgaggtacaatattcacaccaaaccatgtacaccaatgctgacctactactgactaaacactagcgttaacaactggacacaacattacacggctgcttcctgaccagtctttgattgtacaacctaataaatggtgccaaggattgctaaacctctcttctatactacaggttcaacattatcattatacaaatggatttatattttaacagctaatattgctctgaacaacaagcacatgcaaggcttaaaa

SEQ ID NO: 39079 - DNA, 333 bp, Oryza sativa
  Clone ID: PAT_MRT4530_42653C.1
ggcgttcgtacacatccaactggagaagatccctgttgtctattcctaaagaggtataccatgaaagcaaacagtgacaagtgtgatcgtgagactgcaggaccggatggggtgcatgaaaattacataacaaacatgatgatgattgaagcatttggagtgatgagggcagcatgcaagtcgaaggtcgcatatgaaagagctatggttattttgaaagagttgcgtaggcaggttgaggaggtaccacaagatattcaagttgttgtttgtgttctgtctctcaaccgctcaagacaaggaaggacagtgtctcgtgggaatcaggggtaa

SEQ ID NO: 39080 - DNA, 1032 bp, Oryza sativa
  Clone ID: PAT_MRT4530_42654C.1
ctgcaggatcgaggtcagcagcagcagcaggttgtcgttgtcgtcgtcgtcgccgccgccgccgccgccgccatggtgccagctaggagccgcctgttccaccatgacagcagcagcagcagcaagaggggcggcggcaactcgtcgtcgtcctgtactccccaatactgcatcgccacccagctcgacgccgccgccgccgccgcgccggcgcgtagacgtcaccaccaccaccaccagctagccatggcgccgcccgaagacgacgcggccgccggcacgagctctcgtggcggcggtgcaggagacgacgacgacggcgacaaggactggctccagctcggcctcgccgccgcggcgccgaccgccaccgctccggcggcggcggcggcgccgtcgtcgtctacgcccacggcgccggagctggacgtgttcgccgccaagcagtacaacgggaggccgccgctgttcccgctgccgatcttgaggagctaccaccaccaccaccaccaccagtacggccacggcggcggccggtgtccgccgccgtcgttcttcccgttcgcgcggccgttgaggagctccggcgatctccccggcgtgatgagggtcatcagcccgccgcgaagagcggcggctgctgatgctgccggcttgtggctgacacttcaggcatcccctgatcaatttcgagagcccattttgccccagataccaaagagctaccttagaatcaaggatagcaacatgaaggtggaagtggtgatgaagtacttggccggcaagctaggactcacacaatctcatcttcaggtgcaactgacatgcagagggcagcttcttcctcccttcttgctggtcaaaaatgtcagagacagcatctggtgctcatcactgcgaccaagctgcagggaagacgacgacggcgacggcgaggatgatcttgttgagctgcaccggcgatcgccggcggcggcggctactactgaccacgtcatggcactcgtttacagcacaagtagttcctgccat

SEQ ID NO: 39081 - DNA, 400 bp, Oryza sativa
  Clone ID: PAT_MRT4530_42655C.1
ttggttttttttttttttttttttttttttttttttttttttttttttttttttttttaagaaaaactttttttggtgggggtaacaatagaatttttttttaaacacaatttggcccacaaaacaacaacaaaaaaatttccccatgatgaaattgggggggggaatattactaattctacatggataaacccggtggggaggaaattatttatatcctataaaataaggttaattattggtgggcaaccagaagggggtggtgaccatgaagcccttttttttgaactttccctcggcacccgggggcccgttgaagttgcccattttcaccatggggggggggaacttgacctggaacacctttttgacgggggaggggagcttggcgaccccgggg

SEQ ID NO: 39082 - DNA, 223 bp, Oryza sativa
  Clone ID: PAT_MRT4530_42656C.1
ggcatcagtctcaagcttgtggtaagaagaaagataaattgaagataacttggttactggcactactgatttcttcaatttatctttcttcttatcacttgatgcctcaggcttgtggtaacatgcatcagtctcaagcttgtacacacgagcatcatgtggctctccagactgtggtgccaaaagcaacccatggtcaaaaagatgtacttcaagaagtgat

SEQ ID NO: 39083 - DNA, 438 bp, Oryza sativa
  Clone ID: PAT_MRT4530_42657C.1
tggcacgaggcgcctcttgcgctcgcgtgcgccgtcgtcgccgcagctccctctcctctactgtgctgggcgccgccgctccctcccaatgacccgccggatctcctagtgaggaggccgggaccgccggatccggtgaccccggtctcctcgccggcggatccggcgcccagacgcccacctcctccgctcgcaagcgccgtcgccgccgcagctcccttctcctctaccgtgctgccaccgccgctccctctctgcggtgtcaaatatggctcggggaccgtctgattcatcaatcttggcctcccctccagttgaatcggtcgcccggatggagtcaatagggtgccgccgctgccctcttctcctgtccctctccggccgccgccactgccatcttctcctctccctctccatgagagcctcgctcagtgccat

SEQ ID NO: 39084 - DNA, 771 bp, Oryza sativa
  Clone ID: PAT_MRT4530_42658C.1
atgccttcggagcttggtctattgaaaaatttgcaaggtcttgatttctcacaaaacaagctaactggtgagattcccatctcaattggaggatgccagagtttggaattccttcttgtttcacaaaatttccttcatggttcaattccttctacaatgaacaagttgacaggccttcaagagctagatctttcaagcaacaacatttcggggatcattccagtgtttcttggcagctttattggtctcacgtatctgaacctctccttcaacaacttgataggtgaagttccagatgatgggatatttcgtaatgcaactgcattctcaattgttggaaataagctaagcattgccaccgatgtaggatctgcagtggagtatcttcatgattacaagccagttccaatagttcattgtgatcttaagcctagcaatattcttctagacagtgatatgatggctcatgtgggtgactttggactggcaaggttcacaaatcaaggagataacaatgcatctcaagtctcatccagctgggccgcatttagagggaccattggatatgctgctccaggctacgcccgtacgaagcatgtcagcatgacaattgacaatgacaagcgctgcagctgcccgagccctgggaacaaagaaaggctcggcatttcatcgaacatcttagcggccaggcggcggatggcaatggcgtcggcgcgggtggcggatctggcggtgccgccctcgggagggccggatccaccgccatag

SEQ ID NO: 39085 - DNA, 2990 bp, Oryza sativa
  Clone ID: PAT_MRT4530_42659C.1
cttcttgcagctgctttgctatctaacgccccaagcaccaccgatgcctccatgctcaaagctccaactgcaaacactgcctccaacagctcagatcgccaagtgctcctctcattcaagtcactcataacaaaagacccctctggagcgctcacctcatggggaaacaggtcactgcaccactgcagatggcaaggtgtgatgtgcgggaagcgtgggcgtcgtcgtggtcgcgccatcgccatcgaccttaacaatctcgggctggctggtagcatctccccttccatttctaatcttacgtacctcaggaagctccacttgccacagaaccatctcgttggaaccatcccgccatcacttggtggactcccttatctcagtacttttattttagcaaggaacaaacttgtagggaacatccctccatcattagggaacctttcttccctcacagagttaaactttgcaaggaattatcttactggaatcatcccccattccttaggcaatatttatggtctgcatagtctccgtcttacggagaacatgctcacaggcaccattccttcgtccctaggcaaacttattaatcttgtttatattggtttgcagttcaacaaccttataggggagatccctctattgctatttaacctctcatctcttcagaagctggatctgcaaaataataagttaagtggcagcttgcagaattattttggagataagttccctctactccagggacttgccttgaatgacaacaaatttcatggtcccattcctttatccctttccaactgttcaatgcttgaactaattcaactagatagtaactcattctcaggaacaattccttcaaatctcggaaacctcaagagattgtccaaactgcgtctcgattacaataaattagaggcaaactacaactctgactgggatttcttgaatgccttgacaaactgcacccaactataagttctgcagttaagtttcaataggcttaggggtgtgctaccacactcactttctaatctttcaatcagcttagaacaccttgcgattctcaacaatgaagtaggaggaaatatacctgaaggaattgggaggctttctaatttgatggcactttacatgggtcctaatctcctcactggttccatacctgcttctctcggaaaactatcaaaattgaatgtgatatcactagctcaaaatagactatcaggagagatcccaccaactcttggaaatctcacacagttgagtgaactctatctatctatgaatgcatttactggggaaataccttcagctcttggaaaatgccctttaggtgtattagctcttgcttacaacaaacttagtggaaatataccaaaagaaattttctcgtctagtagactaagatccattagcttgctgagcaacatgttagtagggcccatgccttcggagcttggtctattgaaaaatttgcaaggtcttgatttctcacaaaacaagctaactggtgagattcccatctcaattggaggatgccagagtttggaattccttcttgtttcacaaaatttccttcatggttcaattccttctacaatgaacaagttgacaggccttcaagagctagatctttcaagcaacaacatttcggggatcattccagtgtttcttggcagctttattggtctcacgtatctgaacctctccttcaacaacttgataggtgaagttccagatgatgggatatttcgtaatgcaactgcattctcaattgttggaaatgtgggcctatgtgggggcattccagtattaagtttgccatcatgtacaaaccaacaagcaagagagcataaattcccaaaactagctgtagccatgtcagtgtccataacatgcttgtttcttgtcatcggcataggtttgatctccgttttatgtaagaaacataaatccagcagtggaccgacatctaccagagctgtcaggaatcaactgccaagagtttcttatactgagctatctatgggaacaaatgggttctcctcttcaaatctcattggtgaaggaagatttggttcagtgtacaaggcaaatatgagtttcgatcaatatagtgttgttgcagtaaaggtactcaagctccaagagaggggagcatcacatagttttcttgcggaatgtgaggcattaagatacctacggcatcgcaatcttgtgaagatattaacagcttgctcatcaattgatcctagggggcatgattttaaagcacttatctttgagtatctaccaaatggaagccttgaaaaatggttgcatactcatatagatgagcaaagtgatcaaagtgtcctaaatatttaccagaagctaagcattgccaccgatgtaggatctgcagtggagtatcttcatgattacaagccagttccaatagttcattgtgatcttaagcctagcaatattcttctagacagtgatatgatggctcatgtgggtgactttggactggcaaggttcacaaatcaaggagataacaatgcatctcaagtctcatccagctgggccgcatttagagggaccattggatatgctgctccagaatatggaattggcaatgaagttactacaagtggagatgtttatagctatgggataatcttactagaaatgtttacaggaagaaggcctaccgaacaaaattttgaggagaatactaaccttcacaggtttgttgaggaagcgctgcctgatagtgtagaggatgttgtggaccagaatctcatattaccaagggaagacacagagatggatcacaacacactcctaaacaaggaagcagcacttgcatgcataacttctattttgagggttggtatcctctgttcaaaacaattgcctacagaacgggtgcaaatacgagatgctgtaatagaacttcacaaaatcaaagaaaaattctttccatgaagaatccattt

SEQ ID NO: 39086 - DNA, 726 bp, Oryza sativa
  Clone ID: PAT_MRT4530_4265C.1
atggcgggtgctgtgaagaggatggtggataattcgtaccacgacgtgatggaatccattcaggcggaggagtcggcggcggagtcggcgcgcaaccgtctgctcgccgtctcgaccctgctggagcagcagcgcggagccctggaggtggtgagcggcaggatggcgagctgggcgattcgggaggtggagatgagcgccatcaccgccgagctcctgctcctcgacgacgtggcggccggggcgtgcgacgcggcggcgaggctgcgcggcatcaagaccacgctcgagctcgtcaagctcatcaaggctgacgacgtcaccctcaccctcgccaccgacgacttggaacactatgccctgaagcagcccggcgacgccaccttcgcccccgccccgtcccccgaggagctggatgaggccatgaagcacgcggaagccgcgcaggagcatgtcctccggtgctgcgcccgcgtgcgcgccgtggtccgctgcttccagggggtggagagggtgggcgtggccggagcggaacaggggggcgtgatcgcggagggcgagctcggggtggcccacgagtcgctggacgccgcggtgggcgagctcctcaaggcggaggcagcggcggcggcgtcgacggcaaacgcccggaatgtcagcgcgcggaagcagaacgccaccgtacctgatccccccatcccagtgattgatatcgattctgattga

SEQ ID NO: 39087 - DNA, 223 bp, Oryza sativa
  Clone ID: PAT_MRT4530_42660C.1
gtatattggcgcatgctgtggtgaatgcaaagttgttacattaaagggggactcgacgtcgaatgacggtaagggggttgaccatgaatcaggtatgctgttttagggttcacctgccctgctgtttgcgacaaattcgcgacatactatacaggagtctctgaccacaaacgtcctatttatgatcctgtagtactcatacctcctgtctgagcctactcaa

SEQ ID NO: 39088 - DNA, 395 bp, Oryza sativa
  Clone ID: PAT_MRT4530_42661C.1
ggtttatattaagctagtcgtaatttttatacttttggcataatggttgtcggaaaaatttaagtatttaaatttcccgaagtctgttgatctaacttggtaggttggatactgtttcattagtatctttttatgctaagtttgaggagaaattttatccgtaacagatgatatctggttccgtcagaatagtttagcacagcgactgctggtaatggtcggcacccggataaactggtgccgatttgaattatcctaatattaatttttaaagtatggctttaaagcagcctaatttagttttttcgttatagataaagtgttaaaatttaacttgggatatttttttctgccgttttgggcttattatggtccaattatttaattgttgaatt

SEQ ID NO: 39089 - DNA, 102 bp, Oryza sativa
  Clone ID: PAT_MRT4530_42662C.1
atgagctatctgtcagcagagaaccttgctggagcttcgccggagccgacacgacacggcccgatatctcactgggccgtgcggcccgtgcctggctcctag

SEQ ID NO: 39090 - DNA, 276 bp, Oryza sativa
  Clone ID: PAT_MRT4530_42663C.1
ttttcatcaatcacgtgatgacacactcttagattagcttagctaagctgagctagagctattccacgagcaggaataacctggtcgcgagaacgaccatcgctggcctgtacgctggcggtggtggcggcgatcctcggaggcagccgcgacgcggcccacggcggcggcggcggcggcagcagctggctgctgcatgacagagataatcagcctggcattgtgcctgggctacatgtcccggaactcgacagcatcctagccgtcctgctgcac

SEQ ID NO: 39091 - DNA, 1317 bp, Oryza sativa
  Clone ID: PAT_MRT4530_42664C.1
atggccgcctccccgatgctgagcacctcctgtccgccccctatgaccgccggctacctcctccttggcctccacgaggacggccgcctccccgccctccttgataccgagcgcctcctcccctccctcaacgacaactgccgccaactcctcggtctccacgacgacggccgcctccttgccctcctcgatgctgagcacctcctccttgccctctacgaccgttggccaccgccgacccgccatccactaccaccggccgccgcctccaccagtagtttcttcgctgcagaaatgtctaagcaacatgatatgtccatatcgggcggtacaagtggagctacatctgggcagaaccctcggacgcaaaaccacctaccgaccacccggcaagttatcaccgttgtggatgaaagtgagaaggtgtgggaggagttcttcgggctcaaaagcattcaagagttcgggaatgagcacccacaccgacccggcacaacggggtacatcgagaaggaggaaatatgggctcaagaggatgatgctactgctgcagcaaatgtccctatccctttcactgacatctctgaagtactagctcgaaactgggctagacccagtggtaaggtcaaccaggacgacaccattacatttccaaaacaaaatgatgccactgtctatcagcaactaaaaaggaaaatctcaatagaagagatggatgcttgcatgaaggagccgttcaaggaggtcattcaagagctgaagcaggacatggacgctagggacgtagcactgtgtatcctagtggttagggtcacaccaacctttttgtctgaagtcgcaaagggcatggcttacataccctctagcatagaaagggtgcacaacgtagacctcatggctggatatgcgaagctgattcgatccaacattcgatccatacatgaaagcatggacagctgcgcctgcgacagcgagcatcagaatgttgaggaggttttcttcttagggtactttgctggcaaaccagcgaaacccaacgacaaagaacaacaggccggtgatgaggagacgcaagctgttgatgcacaaacacctggcgattacttcttgggccctccagcaaaccttcaacagcagccagcagcgaagcaatccgccgatcagaacagatcaagcactacactggtcaaggtcacctgtgacgggcccaaaccctcacctttgacggttttgggcttggtcagtgatcagtggtcactggtaagtccagtcacctttgacgggtggccggccgtcagtggtgacatccacctctga

SEQ ID NO: 39092 - DNA, 704 bp, Oryza sativa
  Clone ID: PAT_MRT4530_42665C.1
atggcgagcggcggagggaaggcgaaggcgtcgtcgtgggcggcggcgatgagcgtgggcacggtggaggcgctcaaggaccaggccggactgtgccgctggaactacgcgttccggacgctccagcagcgcggcaggcagcaggccgtggccgggacgagcggcgccaagagcggcggcggcgcgcgtgcgctgcagcctgcagcggcggcggcggcgaggaggaaagcccagcagcaagaggaggagcggagggcggtcagggtgttgctgagagcggcggcgcaggccatgagggccgcgaggcagccggcgcctgcggtggccaagccggtgccagcggcgaagccatcggcggtggcgccaggcacggctcagcggcagcaggcgaggcggctctccggtggcgtggctgagccggcggagaaggcggccgtggcggagaggatgaggcggcggcgcagggagaagtccgagaatgtgatgcagctcgtgtgctggggacccagttagccacgatgcttctgttgctgctgtagtgctgtgacatcagttgagcagagtgactagtgtgatttgtgccttatgttcgtttccttttgtaagatggtagaatctgtgaaattttgacggtattgtattctgcaagatgctatgaaatagtgaagtactgttccttttctgaaaaaaaaaaaaaaaaaaaa

SEQ ID NO: 39093 - DNA, 874 bp, Oryza sativa
  Clone ID: PAT_MRT4530_42666C.1
gattcggcacgagctcgtgccgaattcggcacgagctggaatcgaattgcgtttttgagtttatctctccaactaaccctcggtttttccggctcaaatcctctcggttggagtccgatctcttcaatccaagcctataaatagcatcccctagtcgccctctttcgtttgccccatctcccgagctctctcgtgcctcgtagtgccgccgccgcgccacccaaaccgccgccgtcgccggccggcgaacagccgcctcgcgccgtcgttttagccgtcgccgccgcctcctcacgccgccgtcgggtgcgcgtggaagaggggaagctccgccgcccttcgccgtcgccaccggtcgccggagagccgccgccgccgtccaccgaaccgccgccgccgcacaagctcgtcgccggtcgccatccgtggtcgttcgtcgcattggttagtaccggtgagatcgcgttgttctcctctacgcgtaggtgccctccaaaagtccggccgagtcccctagcgccggcgaggtcgtcgccgatgacttttgtatagcatgattcattacggggcaccagactgtgaagcggcgagaagtccatgggggtcgctggggagtccattgcctttggttttgagggggagattatgatccaggaacggtgcactgtggtgagttgtgttgtgcgaggggtattgtcacagttcctttccgaggtaccgtggtggtgctaaggcgcatggtgacatgttgtgggattgcgtcttgtgggtacagtggtacacctctgatcaaagtaaaactattcgaatagccgtgtccgcggttatgggtgagttgagcaatgtttttcgtgattagtcccacattactcat

SEQ ID NO: 39094 - DNA, 1431 bp, Oryza sativa
  Clone ID: PAT_MRT4530_42667C.1
atggcgcacctccgccagctccacgccgcgctcgtcaagtccggcctcgccagggaccccatcgccgccagccgcgccgtcgccttctgtgccggcgacggacgcgacgccgcctacgccgcccgcctcgtcaggcaccacccgaggcccaacgcgttcatgtggaacaccgccatacgcgcgctggccgacggcccggggcccggcgcggccgtggcgctgttcgtcgacatgctcgggtcgccgacgccgcccgagcggcgcacgttcccgtcgctgttcgcggcgtacgcgcgcctcggccgcgccggcgacggggccgggctccacggcatggtggtcaaactcggcctcggcggggacgcgtacgtgcgcaactccgtgatcgccatgtacgcgtcgcgcggcgccgcggacgaggcgatagcgctgctcgcgcggtgcgaggcgttcgacgccgtggcgtgcaacagcgcgatcgtggcgctggcgagggccgggcgcgtcgacgaggcgcgggcggtgttcgacggcatgccggcccggaccgtcgcgacgtggagcgccatggtgagcgcctactcccgcgactcgaggtgccacgacgccgtggagctcttctcggcgatgcaggcggagggcgtggagccgaacgccaacgtgctcgtcagcgtcctcggctgctgcgccagcctcggcgcgctggagcagggcgcgtgggtgcacgcctacatagacaagcacgacgtcgccatgaacgcgctcgtggtcaccgccctggtggacatgtactgcaagtgcggcgacatacgcaaggctcgcgaggtgttcgacgcgtcgagatcgcggggccaggccaagctctcgtcctggaactccatgatgcttgggcacgcagtgcacgggcaatggcgagaagcggccgccttgttctccgagctgaggcctcacggcctacgccccgacaacgtcaccttcatcgcgatcctgatggcgtacggccactccggcatggccgacgaggcgaaggcggtgctcgcgtcgatggcgagcgagcacggcgtcgtcccgggggtcgagcactacggctgcctcgtcgacgcgctcgccagggcggggaggctccgggaggccgagggcgcgatcgcggcgatgccggtggcgcccgacgcggccgtctggggcgcgctgctgtccgggtgccggctgcacggcgacgccgaggcggcggcgcgcgcggcgagggaggccgtgcggtgcgacccgcgcgacagcggcgcgtacgtgctcgcggcgagcgcgctggcgcgcggcggcgaggcgcggcgcggcgccgcggtgagggggaggatgagggaggaaggcgtgggcaaggtgcccggatgtagcatgatcgaggtggatggtgttgtgcacgaattcgtcagctaa

SEQ ID NO: 39095 - DNA, 475 bp, Oryza sativa
  Clone ID: PAT_MRT4530_42668C.1
cccacgcgtccgcggacgcgtgggaaaaaaaacatatacacttctagtgattgtctgattgatcatcaatggctagcaaggtcgtcttcttcgcggcggcgctcatggcggccatggtggccatctccggcgcgcagctgagcgagtcggagatgaggttcagggacaggcagtgcccggcggaaggtccagacaagccgcttgacccctgcccgcaggtgcttcacccgcagcttacccgcccggagaaggttcaacccatggttcggcggccgggcgcccttgggctggcgatgcaatgctgccaacaactgcaagacctgagccgcgagtgccgcttcgccgccattcggccgatggtgaggagcttccaggagagcatgccgatgccccttgagcaaggcttgtcgtcgtcgtcgtcggagtactaccgcggcgaggggtcgtcgtcggagcacgggtactaccgcgaggg

SEQ ID NO: 39096 - DNA, 273 bp, Oryza sativa
  Clone ID: PAT_MRT4530_42669C.1
atggcggagcgatctaggcgtcgattgtgcgaggtcgagagggggagcaattgggggaaggagaacagcggcggcagtcgagggatcctggacgacgtcggatgcgacgacggcgatggggatcgggttgagggcaagccggcgacggggatcggtggcggcgagacgactgatgcgacgacggcggagcggcggcagtcgagggcggcggcggcggcagtggcgtcgcatgaaagggagcgattagggttggggaggggaggcggcgcgtga

SEQ ID NO: 39097 - DNA, 784 bp, Oryza sativa
  unsure (1)..(784): unsure at all n locations
  Clone ID: PAT_MRT4530_4266C.1
ggccctaaaaaaaagattttaactttccaacccccggagtttaactttggttctcttgaaggcgccccccccaaatttagtttgttttagtgtcagtatattgaatattttgtnttttgttttttttagagttnttaaactttgttttatttttaaaattcccacgcgtccgcccacgcgtccgggccgccctttttttttttttttttttttttttttctaccggcagaaaaaagatttgcataacagcaaatcatgttaataagagcgtatgtgcttctgattgcagcaacatcccattgttacagtccattaggacaacgtcatgcagagcaacatgacacattgacatgtatgccaattgctagatttcatctgctaccccattttctggctaaggcagcatcaatacaccagcatcctcctgctctacctctagcaatgaaattagtcaaccactaacttagtcacatatgctgccaccgggagcggtttccttgactgttctctcacagcttgcttcttagttcttacccgcgtcactgttacctaggtgcagagcgaagtcttcatgatcgtcacaaaatgttttccggagtctcagtgcaatcatgttgtggattactcaggaaggcgaacatctgcatgttggtccttcaaaattgaccaccatgatttagctgggatgggatatgattcattgggcatatgaatctgtggagataagttcctcaagaacccacgcgtccgctagttgcggatcgcgagttgaattatcctgagc

SEQ ID NO: 39098 - DNA, 376 bp, Oryza sativa
  Clone ID: PAT_MRT4530_42670C.1
aggatatgtgcagaatttgtctttatcgtggacgcggccgggaactctattatattgtatattttatttaagggaaatacagtgagaggctgtaatctgtcagatctgagacacgaaggtcttttttcattggggggaggaaacatacgacctagctgcgctgcgccacgaattgtgcatatgggcttagacttaccggaaggactgccgttgttttttttggaatggcctggcactgacgcttggagtgttaatatccttcaggtgaagacccccctgaggggccacatatcataactaattacagggataagtcaacagaaggaattaaaactagcttgtgtaacgacatggattgttggagactttactaacc

SEQ ID NO: 39099 - DNA, 2817 bp, Oryza sativa
  Clone ID: PAT_MRT4530_42671C.1
tcactttttcctagcattgtcccaagtccatcggagccatgctttacgtttttttttttttttttttttttttattgttaaggaacgcagcatcaacgcgtgctcattttttttccttctttccaaagtgtacacaaaattttggttctacctggaactgtgatgaacacaaaccatcccagagtatgcctggaatgaatcaggcactgaaaaattggggcgtttagtaagcacgttatgcccaccactataaagctcaggtaaatatacatgagaatcaaggctcaaggaggtaacccctccagaactgcaagtagccctcttgctctagcagtaaatcaatccctaatccgtcgccgaagctagtcttctcggctaaagttaaaacccattgggcttattcccggatttcgattattttttgctgctgccccaagtcctggttgaaggaggcttccaaagcctcggaccatcgcttttactatttaggctatttcgtagctcatattgtctcttactgattcccaattagtcttgaacttgttaactatcatagtacttgcctgattgttctctgaaattgcgatataaattctgccaacctatgttggtacgacccttcttgttgtgattgcgctttgtcttctcagcaatgcataagtcgaggaatatctttgtgagggctttgtcccaataggtgcgaccaccagccataagtcgctcttgtgaccttacaagtgccaaccgctccgtggtgccatatcgtctcaggttatgtgccagcgcttctggttgcggtcctggaactgtgatgaacacaaaccatcccagagtatgcctggaatgaatcaggcactgggtcatgggctttactagttgagatatttcgtgtctcacatcaggttgtgctgattcctttatatcctgcaacttttgatatatctgggtcattgcatccttaattctttgaacatccataagttcatctcgtgtgcgtcgagggatttgaccaagcagactatcttgaggattcttaagattaagtcttcttgaacgtgaaattccttcattcaattcattcagaaccctccagtcacaagtaatttggatatcaacatggtcctcaaatgcagctttcatcatcaacttcttaagagccacatcagactgaataaccggatagttcaacccattaacttttatagaagatatttggcccaacaaatgatcaaatgcatcatctgtactcagcctgcaattacgagcatgtcttccatcattgttgccacctaaagatctcagagcatttgcttgttgggaatcaaaatattctcgaggatcctttatacaaagtggtgcgtatgggaggctccgtggagcttgtagatcctctatctcagtcatgcgggccacttttaccaacctctcatgattggtatcatcagaaatagaacttgaaggtggttctttcttggaccttgcaattgcttcagcaacagtcttcgtatcagttaattccacgtctgaagatcttccttcaagcacaacagcagcatggcgattcagatcctgcgaaagtgttctcctggccaattcaccatcattatcaatcgtctctttactgccatcacgaataatgccatggtccggaagatggatgtagtcatctccagcatctgcctccatatctaatgttggatcgactcgttttatcttcaaccttgcctcctttgctagtatatcgtcattcttcagaaaaatggctaactcttcatcttcagcagcctcagcagttgcgaaatttctaaagtacatgcgaaacaaagaatgaaggtataatacaaatgggtaagatcttgccttttttggaacaaaatctaaaaacgctcgatgcacagctggcttttctgcaaatatctgatgaattatctcggtagtgagactaaaagtaaccttatttgtctgtgagaggagtaggaaaaagaaagaaataacatcaatatcaccagctatcaccaaagtgaatgtccgaccatcagccgatggcctaacatcagctagcatggcacttttgaaacctggcctttgttttgatcctttatttgcttcgtcctcaagtaaattctttcttgttgcccaaaattcagattcttgcagaatattgccaagaacaaacttcatatgtaacttctgcaattcactatcttcttgcagcaatttcatccgacgttgcatttctgcagcactaagctgttcttcaccagttgaagtaactgaattttcagggggcacatttggtttaggcggtatcgtaccttgttgcttacctaaaactttagctacaaagtcacgagataggtcgcggttagtaacattgtcaaactcaaacatgtagcctccacccttgtcagagtcttttgaaagattcagtaatggtggagctggtttgctaccatctactttgttgaacttgtggcctttgatgctccggaaatcaacattgagcttcatcgctgaccgtggatcatggggagtgaaggtgaacttatcctcgttcatgcgcaggacgccggtggtgccggggtccttgagcgtggtcttgtacttggcgccgatcgtcatggaccccatcgccgtcgccccccacgcctcaccattgcgaccctcgcccccatctctgccatcctctgcaccgcccttcgacctcgacggtgttcgcgccatggccgacggcggattgctacctttccgcccgttgccgccccgctcctgctgttgccccactccccccgccactgtcccaccggctttcgacat

SEQ ID NO: 39100 - DNA, 788 bp, Oryza sativa
  unsure (1)..(788): unsure at all n locations
  Clone ID: PAT_MRT4530_42672C.1
cagaaatgcaacgtcggatgaaattgctgcaagaagatagtgaattgcagaagttacatatgaagtttgttcttggcaatattctgcaagaatctgaattttgggcaacaagaaagaatttacttgaggacgaagcaaataaaggatcaaaacaaaggccaggtttcaaaagtgccatgctagctgatgttaggccatcggctgatggtcggacaaataaggttacttttagtctcactaccgagataattcatcagatatttgcagaaaagccagctgtgcatcgagcgtttttagattttgttccaaaaaagatgtcagaaaaagatttttggacaaaatattttagagctgagtatcttcttaggataaaaaatactgtggcagcaactgctgaggctgctgaagatgaagagttagccatttttctgaagaatgacgatatactagcaaaggaggcaaggttgaagataaaacgagtcgatccaacattagatatggaggcagatgctggagatgactacatccatcttccggaccatggcattattcgtgatggcagtaaagagacgattgataatgatggtgaattggccaggagaacactttcgcaggatctgaatcgccatgctgctgttgtgcttgaaggaagatcttcagacgtggaattaactgatacgaagactgttgctgaagcatttgcaaggtccaagatagaaccacctttcaagttctatttctgatgataccanatcatgagaggttggtaaaagtggcccgcatgactg

SEQ ID NO: 39101 - DNA, 492 bp, Oryza sativa
  Clone ID: PAT_MRT4530_42673C.1
atggcattaatggaaaacctaactacctgcatggtatgggcttaggttctgaatgaattgaatgaaggaatttcacgttcaagaagacttaatcttaagaatcctcaagatagtctgcttggtcaaatccctcgacgcacacgagatgaacttatggatcactgggcagctatccaggaattattgcagcatttttggtcatcatatccaataacaacttcagttctttataataaggttcaaagaattaaggatgcaatgacccagatatatcaaaagttgcaggatataaaggaatcagcacaacctgatgtgagacacgaaatatctcaactagtaaagcccatgacccaggctttggatgctgccttcaaccatgacttggagcagcagcaaaaatcatcgaaatccgggaataagcccaatgggttttaactttagccgagaagactagctttcgcgacggattagggattgatttactgctagagc

SEQ ID NO: 39102 - DNA, 261 bp, Oryza sativa
  Clone ID: PAT_MRT4530_42674C.1
atgaacagaccatcaattataaatgtcctaatagttcatgaagtacagaagtttctagttcatacaaatttcagttcatgtagggaaaataacgaacctcgaaaaatcagtcctagaatccaaagcgcagccgccgtcacacggagcgtggcacaccgcaaccgcggacaccgagcagcaggcgacggctgggagaggggcgtgcagcgccggcgatgggctgcgtcgagtaatctgaccgcacgcacgcacgcacgcacc

SEQ ID NO: 39103 - DNA, 3082 bp, Oryza sativa
  Clone ID: PAT_MRT4530_42675C.1
atggcttccaatcatcattcgcaatcaattttctcggccgtgctttgcagcttcggcaactgtttgcaactgaatattgcgtatgctttcaaacctgaagaggttcttgtcaagctcactgaattcaatagaaggttggaggctaggagtgatgacataaaactaatgatcagtatggctgggagcaaacaacaaacctgtaagcatgaagtgctagattggcttcaaacagttgagctggcccgaactgaagttgatgcaatactgcaagattatagcaaaagatccaaacacctgatctcaaatttcaacatcagcaggagagcctctgacaaactggaggaattggttgacctgtatgacagaggttcttttgaagttgtatctgttgatggacctctaccttccattgaggagaagcctatcagggaaaaattggttggaatgcatttaaatgtgatgaaagttctgagctatctacttgatgcaaaaatcaggttaattggcatatggggcatggggggagtaggaaagacaatcttcttgaaggtcatcaataaccagtttcttggtgttgttgacaatatgccctttgatcatattatgtgtgttgcagcagccaggggttgcgtcctggaaaatcttcagatgaacatagcagagaagctgggattgctctcgaagcagggagatagcatagaatctcgtgccgcaaccatcttcaaccatctgaagaacaagaactttttgctgctcctggatgacctttgggagcacgttgatcttctagaggttggcattccacctccaaatgaatcgaagatccagaaagtagtctttgctactcgctctgaggaaatttgttgtgtgatggaagccgataaaagaatcaaactggaatgtttgcagcctgatgaggcatgggagctgttcaaatacagtgctacagaagaaacaatatgtgcagatatgccgatagaaaatgtcgcgaaaagagtttgtgcaaaatgccgtggtttgcctttggcactaatcactgttgggaggtccatgcgtgcaaagagaacgtggcgcgagtgggagaatgccctgtcaacttttgatgagagcactcagcttttggaagcttcagagatgaaggtcattaaccctattctgagcaccctgaggatttcctatgacaatttggagaatgatcagctgaaagaatgttttctggtttgcttgctatggcctgaaggctattcaatttggacagttgatcttgtgaattgttggattggtttgggtctcgtccctgtcggtagaacaatcaatgatagccataacattggattatcacgaattgagaagttgaaaagattgtgcttactggaggaaggtgatatcaaacaatcagaggtacgactccatgatattatccgtgatatggccctctggattgcctcggactataagggcaagaaggatagctggctactgaaggctgggcaccgattaagaaatgtgttaagctgtgaagttgatttcaagagatggaagggtgccacaagaatatcactgatgtgcaacttcttagattctctgccatcagagccgatcagttctgacctatctgtgttagttctgcagcaaaatttccatttaaaggatatcccaccatccctttgtgcaagcatggctgctctcaggtatttggaccttagctggacacagattgaacagctgcccagagaagtttgttcattagtaaaccttcagtgcttaaaccttgctgattcacacatagcatgtctgccggaaaatttcggtgacctgaagaacttacggttcttgaacctcagctacactaaccatcttaggaacatacccagtggtgttatatctagtctgtccatgctgaaaatattgtacttataccagagtaagtactcaggctttgaattggagttgagcaaaaacattacgggcagaaatgatgaattcagtttaggagagctgagatgctttcacacagggctatccctgggtattactgtgagaagtgttggtgctcttcgcacactatcgctgcttcctgatgcctacgtacaccttcttggcgtagaacaactggaaggggagtccactgtgagcctgaagctgcagagtaccgtcacggtggtaaacttcaggatgtgcctcggtgtagaagaattgtcaatcgaacttgacaatggccaagatccagagaaatccattccgcagttggagtacctcaccttctggcgcttgcccaagttgtcttccgtgaagattggtgtggagctcctctacatccgaatgctatgtatcgttgagaacaatgggcttggcgacatcacctgggtgctcaaacttccgcagctggagcatcttgatctgtcattctgcagcaagcttaactcggtcttagccaacgcagaaaatggagagagaagagatgccagcagagtccattgcctgtcaagactcaggatattacagttaaaccacctgccgagcttggaatcaatctgcacatttaagctggtctgcccttgtttggaatacatagatgtgtttggctgcccattgctgaaggagctcccgttccagttccagccagacaacggtggctttgctcggttgaagcagatccgtggagaagaacaatggtggaacagtctgcggtgggacggtgatgccacccgtaatatgttgttgccattttacaaggtgtttgacaagaacctagagacttttgagccagctcttggcaccaatccgttcgtccaagcttcagggtcattcttcgcacatcgcaaaccaatgatgaggacggctattcagttctcgtcatatctctcgctgctctttggagcacaggtggcatcgaccaattaacaggtctgtcggttttttatttaagaatcgaatcaaatacatcgtctggctaaatttctaataactcctcctcttgaaatggtggaccagcacccacttgaatgtatttccaatgtactactattgctagaattgcaaatatcctaactagctctagtaaaagtaggtattgttttgc

SEQ ID NO: 39104 - DNA, 424 bp, Oryza sativa
  Clone ID: PAT_MRT4530_42676C.1
aagggggggtaaaaataattaactccaagaaaaaaaagcacaaaaaaaaaaagggcaagaggggtgaacaaaaaaaagaaaaaaatgcagcttccttaggatggcgcgggaaaactgattggggtttataagggcggggtgaaatatttttactaccagggggggaagcatttttatgcgggaaagtattttatgaaaaaatagacaggttaaaaaaaaagatcttaaaaatgttaaaaaaacacttggtaaagatgtaaaacctgggttagataaaaaacaaaaaaagggggccgaaaaaatcttttccggcgaggggctaacaaacaatgttaacggcaaacccatttgtttttagaggggagaaaaaaaaccattcaggaaaaaaaaaaaaccgggtgagttttttaaaaaaaaagaaaaa

SEQ ID NO: 39105 - DNA, 474 bp, Oryza sativa
  Clone ID: PAT_MRT4530_42677C.1
atggtcacacctgcgcctttgagaggatgggatttctccctgggggattccatccgtgatgaggcgtggcggtgttttggttctccggtgcatttctcttctcacttcagttcttctccgtttcgtttggtggtggatgttccaagatctacttttcggttgacaccgtcttcggtggcgctttacctgagggccactattcatggttctccatcgggttttcaagttcaatctctaactgattggagtttctcgtttgtggtgatgggatggaggagagtggtaggagctcggggagaagggagtgggaggcggggcccgctcagccgccgcacattcctccccacctcatgtcaactccatcctccccgagcagacaccagcgaggacaaccccacgctttcccccgccgaggacatgctcgagcgcaccaagctcgcccaggttccactcacttcttcaggcttcggctaa

SEQ ID NO: 39106 - DNA, 151 bp, Oryza sativa
  unsure (1)..(151): unsure at all n locations
  Clone ID: PAT_MRT4530_42678C.1
gaaggggnggtcttgtctttggggctgacactattggngcacctnanatacatnnaaagcttagcaagtggactgaaatnaanggcgattncttcaaaccatcanccnattnggaaganagagcnaaaagangcctaccattggaactctc

SEQ ID NO: 39107 - DNA, 252 bp, Oryza sativa
  Clone ID: PAT_MRT4530_42679C.1
atgggctcccgcgccggccgcgtgccaactaggcggaggccacttgggcgagagaggcaggcggggcgcaccgcgcacgcatcgtcggggcaagttaaccccccaaataaaatcgaggacaagatcgatacgagcgacccacccccacccaccaacccacaggcagctcggcacccgcgtccataccgtaaccgcaggcagtcaacaacgtcgtacagggccaagttggggaaggtgccgaggaaatgcgcc

SEQ ID NO: 39108 - DNA, 3717 bp, Oryza sativa
  Clone ID: PAT_MRT4530_4267C.1
ttgtctcctctcgccacttcacttgattcgctggcgactgaccctcttcctctccactactaagggcatgtgaatgtgtcagagatgatggcgcctcctctcactgttggattggctctcactgactctaaatccagcacctacgccctccaatgggctttgtccaggtttaagtttaccaaagatgacgacgcccccatcttccttcttattcatgtcctcactaaactcttgacagtacccacacccatggggaaccatatcccaattgataaagtccgaaccgatgttgcctgatgcctacttcaaggatgtacaccaccaggcacaacaaatgctcctcctctacaaaaacatgtgccatcaaaacaaggtgaaagctcaagtattgcttatccagggcaacgacgtgtcacaaactgtgtccactgttgtttctgactatcaaataaagatcctcatcgtcggtgtcactgctaggactaggaagccatttggaaataggacatcctccaaaatttgcaagaatgtcccaagcttttgcacagcttatcttgtatcaaaagatggattgtcttcgctttattcttcttcattagaaagtgacttagcgtcgagctccaagagtgatgatctttcagatgaaatgtcttcaagctcagtaacttccaataatagttcagaccagagcccgtttgattctccaaggctgctaggctccaacttaccatcagagaaccctaaaaatagttcccctgcacaccgtaaccgttcacttactctatacgattatctcaatggaagcacttcaatatatcctgacaaggatagaagagttaactcttccactggtacggaaagctccaaacctagtgaactgaaggggtcaaatgaggtgctaagacaagaaagcttgctgcagggaatgctttcagacaacaaggaccatatcagtacagagcttgaaaagctaaggcttgaactgaggcttatacaggggaaacataaacttgttcaggatgagtccgatgatgcatcacgccaggcaagtaaagtggatttgatatgctatcaaagaatggctgaattagctgcaaagcgcatggaagaggaagctcaactaagagagatacaatctaggctggataaggccaacgacaacgtagagaagcagaaggcgcatcgatatgctgcagagcaggcgctgaaccatgtgcaggatcttgtaagaggggaggttatgcagaaaaatatgctgcaggtgaaagcatcccgtgatgctgataagaagttgagactggagaagctctttgtgcttcagggcaactcatactcaacgtttacatgggaggagattgataacgctacatcatcattcgcggacaatctcaagattggaagtggagctaacggaacagtatataaggggtatctcaatcactcagctgtggcaataaaggtcctccattctgatgacaattccagtaacaagcatttcaggcaagagcttgaggttctggggaagatacatcacccgcatctggtgatgctcctgggagcgtgtgtggagagggggtgcctggtgtacgagtacatggagaatggcagcctggaggagcggctgcggtgcaaaagcggtacggcggcgctgccgtggtgtgaccggctgcgcatcgcctgggaggttgcctctgcccttgtgttcctccacagcagcaaaccaaacccaatcattcaccgggacctcaagcctgagaacatcctcctggacggcaacctggtgagcaaggttggtgatgtggggctgtcaacactggtgtcaagtggtagtggtggcagtagcagtaccatgtacaagaagacggctctggctgggacgctgttctacatagacccagagtaccagaggagcgggcaggtgtcggtgaagtcggacacgtacgcgcttggcatggtgatgctgcagctgctcacggcgagggcacccatcgggctggcggaggtggtggagcgagcggtggaggacggcaagttgagggacatcctggatgagaatgcagggtggacttgggccatggaagaggcgcaggagatggctgacctagcgctcaggtgcctggagatgagaggcaaggaccgtcctgacctcaagaccagggtcgccgtcgacctggaccgcctcaaacgccgggcactgccaacgcagccgccgccggagcacttcatctgccccatactcaagagggttatgcaagagccgtgcatcgcgtcggacggctactcgtacgagcgccacgccattgagatgtgggtgtgcgacaaggatgtgtctccggtcaccaatgttcggatgccaaacaagacacttgtgcccaaccgctctctgctcaccgccatcactgcctggaagtcccagggtggccgcaaacccacaaataaatttgttactacttctccgaatcatttgtgatttttttttttaagatcagctcaattttgtcttcatatataggagtacttgttacttgaactcctagtttggtgaatgtatacatgatgaggaatacatatacttgcacagggaatgaaacgcgtatcctgcactgtacacctgtatctttttacaatcatcatcagagccaagaaagaggctgcaacatgatactagtactagtagctagttgagcacaaacgcttccccaccgatggtgttggtgatggcacgccaagtcgcagcaatccaagcctttccattgtcctttcccttcaagtagggcacgatgtacttcatcatgtcagtcttggaaatacccaggtgcccccctggcacggacacgaatttcactctcccctcatcatccagcgtcttgagaccaatccagtcctccatgtacagctttgtcttctgagggggcaggacaggatcgaaacctccatctggatagtaaccaaaccatgctgtttcccgaggtatcaagacagcgtcatcctgaaacatgattaataccaaattctctaagctgctaaacctttccttgtaggtggcatttctttcacctggtaactcattgttaagctttggaagaaatctacaaccctttaaataatctgaaatatcagttgggattttcatgtaaccactaggtgcaagatgtgcctggacatagtctgagtagatctccattttaatcagggaatcagcaagaatgcaaaaaataccagaaccacaaagtggcactgaagcagtaccagcatgagggccaccgagtgaaatgaaattcttgaccggtggcccatcatcacaaaactcaacaactgctcgaccaatcaggttcccctgtgaaagaccaactatattgtaaccattggagagttccttcatttcttttaccttactgcaaacaatatcagcctgtttctgaagaggcattaaccaagagtcccatgttccacttccgatttcaaggcagtagccatgggaggcggaccagtcggcgagaaggcgggtgaacttggcgacaccatggttggcgcactggtctccgatcccgtgcaggacgatgaagggcacggcggaggctggtggcgcgaggacgaagacggcgacgccgacgaagacgaagacgagggaataagcggccatctactactaatctttctttctttcttgtactcctcttcctcctcctcgcccaaccccccaacccccaacttctc

SEQ ID NO: 39109 - DNA, 471 bp, Oryza sativa
  Clone ID: PAT_MRT4530_42680C.1
tatttccactcgtctcaattagtctccaccaattctctctttctctctcaattagtctacgacatttcgttctgtcctcgatcgaatcaggaggttcgctgaagaagagaggagagagatcgaggttggatatttgatatttctttcagatcagtaggtggcttgtcgctggagcttgacaatggacgtggtcggcggctgctagtaaccctaggacgtggaggcggctgactgcgaccagcacgagtcgtcgatggagatcggttggcccaccgacgtccgtcacgttgaccacgtcaccttcgaccgggtccatggcttccagggcctacaccgccagctccagtccgaggtcgtcggcaacgcccacagcgcatgcaagactgtgttcggcgtgtcaaccgtgtcgatgcattgctcggacgacgcgcggtggaacagcgtaccgagcattctcctgctgatgcagcg

SEQ ID NO: 39110 - DNA, 1527 bp, Oryza sativa
  Clone ID: PAT_MRT4530_42681C.1
atgtgcacagcagatggatcggttactttattggctaaacgaaagggttcaccctgccaacaagaagaagatgataaccaagatgccaaaagaatgagaaatccacgggtctcccttccagaggatatctggtatcatatacattccttattgccactgcgagatgccgctcgtgctgcatgcgtgtctagcacatttctatattcttggagatgtcgtcccaacctcatcttcagtaagaaaacactggggttgaatggcaattggagggaaaatgttagggaactcgtcaacaaagttgatcacattatgaaaaaccactcaggcattggcttgaggacattcgggcttcaatcttataatttgatcaacacctattatcttgaccgttggctcaatattgctattacaccagcaattgaggaactcagtcttacgcagtttccagagaacaatacaaagtactacaatttcccttgctcaattttattcaataggggtggaaactcgattaagcatatttgtcttagccactgtgccttccgtcctactggcggacttaatttcttgcgaagactacatctgggtgaagttcatattactggggacgaattagagtgtcttctttccaattcttttgctttagagcagttgacactcaaatattgcaaagagctcaactacctcaggataccttgccagctacaacagcttaaggacctagaagtgtatgaacgcaaagcattgcaaatgatggaagttaaagctccaaatctttcaaccttccattatgacggtaatctagcacgactatcagatggaggtttactggcagtgaagaaactacgcatatcatccttttatcagtataataatgttcattatgccagtgccaatctttcatccattgtgccaactattgaaactctcataatatcttcatttggtgagaagttcaatacagtagttgcacctttcaaattcctccacctcaagagcttgaagatttctcttatcggattcaatggggccttttccccagcatatgattatctttctctagcttattttattggcgcgtctcctgtcttggagactttcactttgattgtatcacagattcgcatggagcatgatgtgatttctgaaaattcctcacatctgaggcagatgccaagatccagccatggcaacataaagaatgtgaatatcattggcttttgctctgcaaagagcatgatcgagttaacttgtcatattcttgagaatgcaacatcacttgaatgtcttaccctagacacaatacatgatgattatgttcaccctgatagattatctgttcacgaagttggtttctgtggccgtataggtagccctatgattatggaagccgaaaacgcgctcttggctatcaaaagatacattgtggggaaagtcccctccacagttaagttagttgttctgaagccctgcggctggtgccatgctactgaaggtttgggagtaaaagatcatcgtgttgcttaa

SEQ ID NO: 39111 - DNA, 600 bp, Oryza sativa
  Clone ID: PAT_MRT4530_42682C.1
atggtcgcgaaggtgtacggagtggcggcgtcgccgtacgtggcgacggtgctggtgtgcctggaggaggccggcgccagctacgagctcgtcgccgtcgacatggccgccggcgagaacaggtcccgccaccacctcgcccggagcccctttggcaagatccctgcctttgaggacggagaagtcactctctttgagtcgcgtgcaattcaacgctacgtgcttcgcaattacaacaaaccggatctcttaagagaaggcaaccttgaggagtcggcaatggtggacatgtggatggaggtggaggcgcaccactacgaccctgccatcttccacattatccgggagtgcgtcatcaagccgatgatcggcggcggcgcccgtgaccaggccatcgtcgacgagaacgtcgagaagctgaggaaggtgctggaggtgtacgagcggaggttgtcggagtcggagtacctcgccggagatttcgtcagcgtcgccgacctgaaccacttcccctacacctactacctcatgaccaccgagtacgccacgctggtggagtcgtgcacgaacgtcaaagctgttgagattatgggcatataa

SEQ ID NO: 39112 - DNA, 1149 bp, Oryza sativa
  Clone ID: PAT_MRT4530_42683C.1
atgttcgtcgtcgaggaccggggcggcgccgtcgccttgatggtggcctccctcctcttcctgggcacctggcctgctctcctgactctcctggagcgtagaggacggctgcctcagcacacatacctggactactctgtcacaaatctccttgctgctgctgtgattgccatcacatttgggcaggttggagagaccaggcctagcatgccaagcttcttcactcagctcactcaggataactggccttcagtcctatttgcgatggccggtggcattgctctcagcatcggacatttgatctcgcagtatgcgtgggcatttgtcggtctgtctgtgacaaacatcatctgctcaagtctggctgtagttctaggaacaaccatgaactacttcctcgatggccgaataaatagggcagaaatccttttcccgggtgtagcatgcttcctcgtcgctatcttcctcggctctgctgtccactcttccaatgccaaggatgaggaggagaagctaagcatgagtagaggcatagagctcagcagtgatgttgctgaccaaggtgtgaagttgctgccaaatcaagaagaactggagaatggcgaagacgacgatttcgataccggcaccgcagagttcatcgttcaggttgagaagaggcgatccatcaaggtgtttggctccagcaggtggctaggactgggaatggtgctcctcgccggagtctgcttctccctcttctcgccggcgatcaacctggccaccaacgaccagtggcgcaccctgagagacagcgtcccccacctgacggtctacaccgccttcttctacttctccgtctcgtgtttcgccgtcggtatcggcctcaacgcccggctcctctaccgcccggtggccggtgtaccgccgtcgaccatcggagcttatgccggagactggaacggcaggcactgggcgctcctggcagggctgctctgtgggtttggcaatgggttccagttcatgggtgggcaggctgctggatatgcagctgctgatgctgtccagtggtacttctcatggcttcagcagcacataggaagacagggtagtccaacacagaaggatttcactccaggaagatatcacagatgcaacattcaccattaa

SEQ ID NO: 39113 - DNA, 637 bp, Oryza sativa
  Clone ID: PAT_MRT4530_42684C.1
cccgggctgcaggttatatttttttttttttgactcatgacgcccttggtgcactacatctatagggatatcaacaagaatttcacaaccgacattctttatgttgcaatttacagcgattatgatttcataacaaccttgcatatatattacacaaggtaaaaaaatgtaaaggttcatccgcaagcacaagtcttatgtcccgcgatctggatgcaaatgcttcagcgaacttcctgaagcacacagacctaccaaagatcatgaagcatcgctggatctcaggtggctccgaacaaacggcgtttctctctggacctgtcttcacagtgtatccaattcttcaacgaacatggagtgggctcattgagagccagatcctgacgcacaagtcgtggaagaagtttcatttacaacagcagcatggttgggggataccgtcctttgattatttgcgtctgaaggggagcaagcactagctgcaggaacagcagatggtccagtatcgtcctttgtttctagccgttccatcatgcgagataccgagcaatcccagcgttgacctccctccttacttcagtgcaagacctgatatagtgttactccgagaaaaacatctttcttcatcacgggtctg

SEQ ID NO: 39114 - DNA, 457 bp, Oryza sativa
  Clone ID: PAT_MRT4530_42685C.1
atgttcgtcgtcgaggaccggggcggcgccgtcgccttgatggtggcctccctcctcttcctgggcacctggcctgctctcctgactctcctggagcgtagaggacggctgcctcagcacacatacctggactactctgtcacaaatctccttgctgctgctgtgattccatcacatttgggcaggttggagagaccaggcctgcatgccaagcttcttcactcagctcactcagaattgcttcaagttgacagtgtgactttggaatttggatggtatctgtggacgcaaaacaagcatgagagacttgtcccaactgataactggccttcagtcctatttgcgatggccggtggcattgctctcagcatcggacatttgatctcgcagtatgcgtgggcatttgtcggtctgtctgtgacaaacatcatctgctcaagtctggctgtagttctag

SEQ ID NO: 39115 - DNA, 312 bp, Oryza sativa
  Clone ID: PAT_MRT4530_42686C.1
ttatttcgctcgtctcgcattatgccatacctcccccttcttccgcctattcttactatgtaagctgcgttttgctttttctgcactgtccatcagggggttcgccgaaagtcgttcatccggccccctttcgggagctggcgaagtcaaaatgagaaatttgtggcagtgaagggtctgccgaaggtgcgatgtccatttcggcctgtttatcgcgaaatggagataaacggtcgcagttataaggttttcaaggttgccaactggctgcgggcgcaccccgggcgaacttttcagcttttcgtcgttcat

SEQ ID NO: 39116 - DNA, 339 bp, Oryza sativa
  Clone ID: PAT_MRT4530_42687C.1
atgtgggccgcccggcacggcacggcccaggcccggtcgtgcctgggccgaggcttgtcgggccagcacggcccgaccgatgcatcgggccatgccatgccagcccactccctatattttgtctgccgggcctggcttgccggcccatcgtgccaggctggcccgaccgtgccgggccagcccagcgtgccgatggggaggcccaggcacagcccggcggtcgggccggccggcacgggcccgatccaagtcaggccgtgccgtgctttgggccgggccaaaaagccgtgccatgggccgggccttcaggcctcgggccttatggccatctatattagt

SEQ ID NO: 39117 - DNA, 513 bp, Oryza sativa
  Clone ID: PAT_MRT4530_42688C.1
atgtcgtcgaagaagcgtattgcaaatgtatctgttagaggatgcgagcggctggcccgatctggtgtcacagttgcagcgcacgtcgttggcgaccacgtgtgggagttcggtgaagacgcagcagcaagagagaagccaagagctaaggagatcaagacagacacaacattcatcaccccgcacatcatatcaaagccaaagagaaaccaaagagctggggagatcgagatacacacaaagagcgatgtcatgccgtacgaaccccagcgcaactgcaggctcctggcgcggcggcgacgactggaaggtctacttctacgtatcccctaccgccgcacgctggagacgccgcacgggctggggcacgccttcgaggctagctgcatcgccggcgtccgggaggagccatggctcaaggagcagaacttcagcaactttcatgatagggacaagatgcgcctggaagttctctccgctgctctgcaatgtgtgcgtgcttgtatggcttag

SEQ ID NO: 39118 - DNA, 2337 bp, Oryza sativa
  Clone ID: PAT_MRT4530_42689C.1
atgagcggcgccgaggaggaggaggaggaggaggaggtgttctatgaggcgcgggaccgcgtgctctcctcctcctcctgctcctccacctcggcctcggacgacgacgaccacccgcggcgaggtcgggatgcggcggctgctgctgctgcggcggcggcggcggcgctcgacgtgtggacgtcggagccagcgcccgtgcaggaacgacgccggaggcttctccagatgatggggctctccggtgacccctctctggcgcgcctcgagatgggtcgatcggcctcctacgacgggcccatccggccggagacggtgtcgcccatctcccgatccagatcggatggcagcgtgccggcctccgccaccaagcccccgctcgcggcccggtcgcgccaaacatcgtccgactcctccgaggccacgccagggggagatgacgcggaccccaggcctgttcgagtatagcagctattatcctggtgaagatgctgcctgtactctgtagtcgctgcccctgcggcagagatgatttttttgtgtatagctaggtggatacgtgggctatttgcacagcggttcgtccaggagctcatgcgccgccagaacgtggcaagctccggttcgagcaacggagcgtccgctctcatccagaggtccagctctgattcaagcaacggcgcgacgcgccacaggcggcgcggcagctggctccggagcatccgcaacgtcgctggctccatggtggtcggctcccgcgaccgccgaagcagcgacgagaaggacacctcctcggaaaagggagggcgtcggtccagctcagccacagacgacagccaggaaagtgccagcgccgtgcgccgtggcccggagcgtgtcaaggtacggcagtacgggaagacatgcaaggagctcagtgggctgttcatgaaccaggatatacaggcgcacaacgggtccatctggagcataaagtttagtcacgacgggcggtacctcgcgagtgctggggaggattgcgtgatccatgtctgggaggtgtcggagcttgagaggaaacgggagggaaatggggtgtgcaatcaacttgttgccgtcgtgtgcaatggttcgccggagccgatattggcattggcaagtgttgatggaagctgttgggagaagaagcatcgggctagaatcttggaaactcggaagtctgcgagctctgaccggttgatgtttccagagcatgtgttcgcactatcagaaaaaccggtcaaaacttttgaggggcattcggaggatgtgcttgatctctgctggtctaaatctcagtacttactttcatcttcaatggataaaacagtgaagttatggcatatgtcaagaacttcatgtttgaaaacattttcacatagtgactatgtgacatgcatccaattcaaccctgttgatgatagatacttcattagtggttctctggatgaaaaggttcgcatatggagcattccgggacgtgaaattgttgattggaatgatctgcatgaaatggtcactgctgcttgctatacacctgatggacagagagcattagtcggttcccacaagggcagctgtcatatttatgatacatctggtatatctcaccctctcatgatcctcatatcttatgagtgtatttcttgttgcactggaatccaggtgtatagagttatgctaggaagtcataataggttttcgaaataccaacagccaaatatcagcttgcctgtcttcgaacgggagggcagaagcaaggccgttgtgtctgtcacaaattcgtatgaacacttccactgccaggatgtgactgtagctgttgctttgccatctgctggatcagcaatgacgtccagaacaaattccaggaagaccgaggagcaggatagcataccgcagcagcacactcaacctgacaaacagcaagattcctctgatttccaatgcctaagcggcaacggcctaagcactagttcaaaccacagtggtgacagaacatctgcaacttggcctgaagagttgatgacaccaactaggaggatacgtgggcaatttgcacagcggtctgggattggatctggttacttgttaccaaggtgcacaaagctccgttcttcgactaacttactacggcctgggcacacaaggtgtgtagaccgtagctgcaagaaaacgccatccagtcatatacgccccctgcgtctcaaggagtcgcgtaccacggaccacgggtctaaaaagaagccgtccctcattttcgggaagtattcacgtaataatgaatcaaaagcagcaggcatgagatgtcgaaactaa

SEQ ID NO: 39119 - DNA, 270 bp, Oryza sativa
  Clone ID: PAT_MRT4530_4268C.1
atggcgcaggccacttcatgttccccagcgtgtgaaactgttaatgttagtactgcatttcctttacttggttgtaggattcatgtggtattgcctcgtgatgaagcaacatttcggtttgtcaatgaagccaacaagaccaagagcggtagttctctgtgtcacaaggacctagcatacatattcagacaggtggtctacggcgtggcagcggtgcggtcacaagttccaccacgggtaatttgccctcaatctgaggtattgccatga

SEQ ID NO: 39120 - DNA, 432 bp, Oryza sativa
  Clone ID: PAT_MRT4530_42690C.1
gcccaagatcctcgagctcctctgcctttggctgcgtcgctgacttgctggcatgggaggctcaccatcgtgggtgagttgacggagaataagactggcggtgaattaggatcggagaggactggggtatcggtcactgccatgcgggctaactagtccaaggtgcaaaggttggtaagaaaacccaatcttaattgaaaacatcttcaattgcatagtccaatatgcaatttaggtaataaaaattagtccaaagttcaattcactcttttaattatgatcgtaccatttaaaagtcccgctattggctagtatgctggaaaaccaaccagatgccagctcattttcttctgcaagacctcccctcttctccctttgcattttttttacattttttatgggtgctttcattgtcttctctattcactaatg

SEQ ID NO: 39121 - DNA, 183 bp, Oryza sativa
  Clone ID: PAT_MRT4530_42691C.1
atgccactcacacttgccactgcctgctgcatcctctgcacattggccttctcccatgccacggttgcatatgtccagttgaatgtagaggccagccatgaaacaaaagtggtcagcaccctcaagtatgaggcagacgaagcagacaagaagggcctgcaccttcttggtgaagaggaatag

SEQ ID NO: 39122 - DNA, 600 bp, Oryza sativa
  Clone ID: PAT_MRT4530_42692C.1
gggcagcagcagcagcagcagcagcagatttatatgcacatcatcagaagcatccggaaaatttacagaatcagctttgcgagttcgttcagatctttgcgcacaaaagctgagccgtcatggtcaagccagcgagcaccacacacactagagaggcgtcatggtcaagccagtgaaaccacacacacacacactacgagcacacagcgccccatcagctacaggacttgtgtccaccggagttgagctcagaacaagaacgccgtcggcgcgaacgccggcaacaccgtgggtgccccgtagtgccggaagtcgtcgtactccgaccggaccacgcgccgcggcggcggcggcgccgccgccttccccttcgccttcgccttcgtcctcgccgccggcttcgccttcgcggcggcggacgacgccaccgcggcgtcctcggagatcgccccgagcgtcggcttccacgccggccccgacggcctcctccgccgcttctccgcgggcggcgccaccgccgccggctcctcctccgccgcctgatccaccggcgccgacgacagccgccggcagcgcctcacgaaggcgaacagcttcatg

SEQ ID NO: 39123 - DNA, 393 bp, Oryza sativa
  Clone ID: PAT_MRT4530_42693C.1
atggagtcgagcaagagggcggtgatacaccactctcgcaaccacaaccgccgcgcttctcctagatcaggtggttcaaccaatcaaaccaatcaaaccgcgaaccgaggctacgaccggttcgatgtccggtccggtcctaataactatgcctggaaggtgaatcgatactcggtaacatgtagctccaccactggtgacgacggtggaggacagatcccaaagcacagaagggcagtgaccaaatctagagcacagagctacggtgccatcgagagccaaaaaggacaacagcaacaaagagttgagaaggtcggcaacatgcatatatcgaagaacaaaaaagaaaggaatggagctaggggaaggacagaggagtatttgttcacctga

SEQ ID NO: 39124 - DNA, 498 bp, Oryza sativa
  Clone ID: PAT_MRT4530_42694C.1
gggctgcaggattcggcacgaggagcgtgcctgacttgtggccctcctgacttgctttttcttttctacccaccatacaataggtttatgttttgatggatggttttaatgtcagtttttttttgtcttctttggtgtgtctctgttatgtgggtctatgcatcctctctattgtttaatatcgtgtgatttgttcatcggtgctagccgtctccttctcggcgtggaagaccgcgccaaccgtgggaggcagcttgccagggcgctgctcgctcagtggatgtgcgcttagtgggtgcggtgcaatgtgattcgtttatttctctgccctatgtcacagcgctgtgggtgctcatcgtccatgcaccctctgtctctgcactgtggtccagccctgtttgtttcgtgtgattggatcacgggtgttggtccatccagattatctgtgccatttggtttcactcgattcttttggttggatggcatctctttgtttca

SEQ ID NO: 39125 - DNA, 456 bp, Oryza sativa
  Clone ID: PAT_MRT4530_42695C.1
aagttaccatataagtaagtatatattgatacatctttataggcgacataaataccatacatgatccataaacagaaggttccaattacgacctaacttaatcctggggttacttcatgtaagaagtgattaacaaagcagatgatggacaaacaccgtaggagcccacctcttgctgccacagacaccacaagtagtatcaggtgcccaatactatagcatattgcataaaccctaaaccctaaacctatttacatggcagccatgggagagtcaatcattaagcagaagtaggccattactcattaagcctagcttctgatggtcctgtcacattgccaaaatgataccgatcatatgcttcttaacacccctcttgtgtcatcaagttccagggcaattacctctccagtgcccaagcttgccgcagttgtagcaaggagagttaagtgggct

SEQ ID NO: 39126 - DNA, 444 bp, Oryza sativa
  unsure (1)..(444): unsure at all n locations
  Clone ID: PAT_MRT4530_42696C.1
ggaatcggcacgaggaggatttaacagttgaactagtgttcctacagtaggtgcacacttgaactaaatattgtttattttttaatttaacattacgcagacgttgataacaactatttngggtgtgttcggaatccccctttcccaactcacccctctctttttccgcacgcacgcttttcaaactgctaaacggtgtgttttttttttaaaaaagaagtttctatacgaaagttgcttaaaaaaatcatattgatccatttttgaaaaaaaaagctaatagttaattaatcacgtgctaatggactgctgcgttttccgtgcggagagtttagttccaaactcccccctccagcgaacacagcctgtcttgttccgtgggtggtacctgtgttattaattagctcattgactttaaataaagtaatgagaccatgttacctg

SEQ ID NO: 39127 - DNA, 216 bp, Oryza sativa
  Clone ID: PAT_MRT4530_42697C.1
ttggtttttttaaatggtgggggtttattccccacaaaaatcggagagaatatccatgtacataaggagtactacaaatgctcaagaacggatagggctatacaggaaccgatctttcaaaagatgttaaacctatacagggacgtcagctcagggctaccggacaccccaatggaacgatagaagcatcccaaacaagctggactggaacatacc

SEQ ID NO: 39128 - DNA, 338 bp, Oryza sativa
  Clone ID: PAT_MRT4530_42698C.1
cccacgcgtccgacttatatgtaagattcaggcgcactgagaggaagaacgggtgtagctctgactggtcaatccccaaaggcagaaacgctgatcataggagttcgggttctgctctgcctgtatcaccccagtagacaatcatgtgattcctcagcgtttgggttggcttcaagatctagcacatgcaagtgtagccgtttgaaggcacaatgatgttcgggaccctatactacctgccaccgatcaccgtggcggaccttctgaagcatgtcgagtacctgctccgtttccgggggggcgccttggcttaagaacattaaggacgggttcatcta

SEQ ID NO: 39129 - DNA, 653 bp, Oryza sativa
  unsure (1)..(653): unsure at all n locations
  Clone ID: PAT_MRT4530_42699C.1
cgtttttaacttggnacctctaaacggccggggggggggggggttttttttaatttttttttgaattatttccttcattgaggtatattacatcgtaatgcaagcaagcccttttaagctttttgctagcttatatcatctgcatcgtttgctgactgaagcaatcaatctaaaccttctgggggggggggggtaaactcctctaccactatggtcccagacgcttagtcgaaggggttggtgcgggttccccagtnggtgaggaacaagctgagaccgacagtctctaggacgcgggcaacagcgccgacggcgatggtgtccatggggcgctttttgttgacgacctgggagacgatggagggagcggcggtagccattttttttttgaacctagtnaagcagcacccttgtgggtaatatttcctgtttctttttttatagcaccgacacctttttccttttttccaggtccctggataaaactaccctacgatgccgcacctgttgcgggctcctttgttttccggggtcttcttcttgtatttagccttttttgctcttgtttttttcttttatttttgtccgtttttgttttttttattttttcctctttttttttttttctctcctctttctttttcactaggttt

SEQ ID NO: 39130 - DNA, 2909 bp, Oryza sativa
  Clone ID: PAT_MRT4530_4269C.1
atggcgggctccggtggcgaggcgatggcgagctctgggcttgacctgggcgagtacctcgatcggccggacgctatccaccggcgagcggcgtcggtcgccatcgtgaggtccggtggtggcgatgggccgaggattgtggatggagggagggatgatcggagggcgcggtcgtcgcgccggctctcgctgtcgtcgtggaggaggccggccggcggcgagacgtcggtggagtcgaggaggtatggttttacggcggcggcggcggccgaggttggggggaagacgagggcggcggcgatatgggagtggaagccggtgcgcgtgctctctcgcatcgggaagcgccggtgcgggtgcctcctgtccgtcgaggtggccggcgtccgcggcgttccggcctccatggacggcctccgcctcgccgtcacggtgcgcaaggcggagacgaaggacggcgcggtgcagacgatgccggcgacggtgcgcggcggctgcgccgacttcgtcgagacgctcttcgtcaggtgcaacatctacttcgccggcggcgccggcaccgggaagccgctgaagctcgagccgcggcggttcgtcgtgtccgtcgtccccgccgaggcgcccggcgtccgtctcggggcgcatgccgtcgacgtcagctccctcgtgctcgactccctccagaagagctccgagggccgccgtgtccggtggttcgacacggccgtcaccctctccggcaaggccaccggcggcgagctgctgctcaagctggggttccagctcatggacgacgccggcctctgcctctacacccaggcggcaacggagaaggtcgacgtcgtcgacgacgtgtcgccggctcttgccagagctcacaacaagaactcgttcagcgtcgcgaggacgtcggggcccaagctttcagcatccgacgcggccatctcgccctccatgagagcctacaagcagctcatcgataggctcagcgtcgacgagcatggagatcctgtgacgtcgctgatccctcggaagctcgccgacgacgaactttccggcgacgtcggcctcccggagtacgaggtggttgacaagggcgtcgagaccgtcaaagaggtcgtccactaccatgctcaccgcgacgtgctcaaagagctcgactccattgccgagcagatcgaggccatcgaggcgctgatgacgaacggcggcaagaagtcgccgccgtcgccgaagaaggtggatcagaagcagtgcctcgacgcggatgaggagatggtgacggtggagtttctacggaagctcgaggtagtcgacgataagggcaggaagctgaagcagcccatgacgccgagaagcgagtcggagaagaaggcggcggcggcggcgccgccggtggtgccggacttggggccgggccttgggacggcggtgcaaacgcgcgacggcggattcttggtgtccatgaacccgttcgacttgcctcttgagaaaggagatgcacccccgaagctcgccatgcaggtgtcgaggccgttcgtgctgccgagctccatggccgcgactgggttcgacgtcctccagaagatggcggcggcgggcggcgccgacgaggtccgggacaaggtggcgaggctcggcggcatggacaacctcacggggaagacgcccgagcaggtgggcttcgagggcatcgcggaggcggtcatcggcgggcggcgcaccgagggcgcgagctcgagcgccgcccggtccgtccggctcgtccggaagctcgccgccgccgtgtccgatggccggagcgagcgcgtcgccaccggcatctggaccgcggcggacgacccggagacgctggaggaggtgatcgccttctccctgcagaagctggaggccatggccgtggacgcgctcatgatccaggccgagatggccgacgaggacgcgccgttcgaggtggcgccggccgcgggcgacgccaccaccgtgttcgacgcgctggtgtcgcccgacgagtggtcggagtcacgcggctccgacggccgcgtcacggtggtggcggccatccagctgcgcgacccgtcgcggcgctacgaggcggtgggcgcgccgatggtggccgtcgtgcagtcggcgaggctgctcggcgcggcggggaacagcggcgggaggttcaaggtgaggagcctgcacgtcggcggcgtgcagctgcggtgcccggtgggaggcggcgccggcggcggccgcgcgagctggggcgcggagaggcagaagctgacggcaatgcagtgggcgctcgcgcacgggccggcgcgcgccgcgggcaggagagcgcggacgccgacgacgacgacgacgccgtcgtctcaggcgaggcagcggccggacgtcgtgtggagcttgtcgtcgcgggtgctcgccgggatgtggctcaagacggtgcgcaacccggacgtcagagttggcgccaccgccgccggcggcggcggcggcggcaactgagacggcgccggccggccgggatggcacgttacacaatttgtaggtttgcatgatatgtatgcaaactccagtactccccgtactggtacattacataagtattagcataaaatcgttttatctgaagtctgtttgaaacgcaggaattttatagactttttagaaatgagataaaattcctgcatttgaaacaggcctcgtgttgtatgtgtaggcagtgtagccaagttgtcagtgtgttactgtgcagaatcatgcgttcgcttgccttgtttggtactacaatgttatcattttaattcattcttaactacatatgagagtaaaaaaaaaatcaaaactactaccactggacataaaaaaaaaaaaaaaaaaaaaaaaaaaaaaactcgagactagttctctccctc

SEQ ID NO: 39131 - DNA, 334 bp, Oryza sativa
  unsure (1)..(334): unsure at all n locations
  Clone ID: PAT_MRT4530_426C.1
tgtctcaaacaaaacctaatnttgtacccaantttatctctaggatnaagatatttattgggacaaagggagtggganagacagaagctatacttagtnatttaaacagaagggnataanatagtcgtgcagtgttcgtcaaacaatgtacacatcattttagcacaaaagctgcncgtngaagctataaccactatccgaaaatatacctatcttgctggttcaaattagtagctatattttanatccgagggagtaaatttccactgcatgttctcgaatatattttcatgagatcgagctggctttctatttaaaaaaaaaatnnaaaaaa

SEQ ID NO: 39132 - DNA, 1728 bp, Oryza sativa
  Clone ID: PAT_MRT4530_42700C.1
ccgggctgcaggaattcggcacgagggcggcgcgccgccgttctgacgctccacggccacatgaactgccgccacctcgccctccggctccgccacctccgccgccttctcgcggtcgcacccctttcctcgctcgcggccgcgcactccgctaaccgctcctccccacggctaaaccccacttcggtgccgccaccgccgcggcagctgcatctcccgaccctccaggctcgacggctctgctccaccacgcacgtcgtcctccccacaaacctccaggacgagcggttcgcggctctctcggataggatctacgacgccgtgattgagaccgcggcgggttccagcgagggcacggaggcggcccttgacgcgctgggcgccgagctgaccaccccgctcgtcgccgacgtgctgcatcgcctccgttacgacgagaagctggccttccggttcttcgtctgggcgtctcaccaggacggctacgagcacgaggccgcgacgtacaacgacgtcatcgacatcctctccggcacgcggtacaaggcccgccagttcggcgtcctctgcgacgtgctcgaccacatgaagcgccgccgcacaaggtccgtgccggtcgacgacttgctgggtatcctgcgcgcatacacggagaagcacctcacgcatctcaggaagctggctaagaagcggcgggtgcggatgcgcacgccgccggagaccgacgctctgaacgtgctgctggacgccttctgcaagtgcgggatggtccgggaggcggaggtggtgttcagccgcgtgaagaggaagctgctggggaatgccgagacatacagtatcctgttcttcgggtggtgccgggcaagggaccccaagagggccatgaaggtgctcgaggaaatgattcagatgaagcacacccctgagaacttcacttacaatgctgccattgactcattttgcagtgctggtttggtctcagaggcaagggatttgtttgagttcatgagaacagaggggtctacaatttcatcgcccacggctaagacatactcgattatgattgcggcgctagcaaaggctggtcagatggaggagtgctttgaactgatttcagaaatgagaaagtgcggctgtatgcctgatgtgtcgacatataaagacttgattgaaggcatgttgttggtggataaactggatgctgcttattgtgttttagatgagatggcaaaggctggctttccccctgacattgtcacttacaattgctttctgaaggtgctttgtggtcttcaaaaggctgatgacgcgcttgaactctgtgaaaggatgatagaggcgcattgtgagcctagtgttcatacatataatatgctgatggtgatgttctttgagatgagagagccagatagggcaatcaatatttggatcgagatggacaagagaggatgccatcgcgctgttgatacctacgaaacaatgattgatgggctgtttgattctggaagaacggaagatgcgaccgctcttctagatgaggtaataaaccgtggcatgaaactttcgtacaagaagtttgatgctatcatgttgcggctatcagctgtaggcaaccttggcgcgatacatcggttgtcagagcatatgaggagattttacaatgttgcaatgtctaggcgttttgcaatcacacagaagaagaagagcataggtctgagaaggaaatga

SEQ ID NO: 39133 - DNA, 429 bp, Oryza sativa
  Clone ID: PAT_MRT4530_42701C.1
atgtggcgccgaggtggcggccacgctggcgagcgagaggaggaagacggcctgcggcggggattaacggcggacggcggcgcgcgtcgacggagcggcgcgaggcgcgaagggagaaagggagaccaccggaggggaggaaaggaggcatggattccattcctcggctcagatgcggccggggctggacggaggcgacggattgcggcggcgcacgccggcggggagaagaaggggaaatcgcgccgggagggaatggggtcaattcgcggcgtcgggagcatctccgggaccaagggaactcgccatggtggtcggatggagcagagcagcgccgtggaggtccggcgacgagaggcggcctccgggagcggctgtcgacggcggcgagctcacagcgagcagcggcgacgcttgggcggtgactag

SEQ ID NO: 39134 - DNA, 576 bp, Oryza sativa
  Clone ID: PAT_MRT4530_42702C.1
atggcattagtgaacgataaagatagtgaagatgatgtcaatgcacctgcctgtgcacgacgagccgctcctctggtcatcggggcgccatggggtttcgtccttcaacttgcaagaagactaggggaatgcgaaccccgcgacttccgagcgaggaagatggcgataatttctttttgcgcattatctctgttgtttagtaagaatactcgtatatatatagtcttattatgctacttgcggaaaaattacaggccactaatcgtaaccaaagagagcaaacgaaccaaatgctgcagaattacagcgagcctagcaagccggcatggcgatgagttggtttgcctttgccgagctaggctagctagctctgccctcgatcgtgtcgtcttcaagattcttaaaaccagtgattttgtgttaatggtactgaagagatgcatttgtgttatcaatccagtccatatatcaagaactcatggaagctcaatgtatagcacgctgcccgacgccgtgccgtaccggagtaccgagaggctagccggcggcattgtcatcgactgcacgatcggtgga

SEQ ID NO: 39135 - DNA, 373 bp, Oryza sativa
  Clone ID: PAT_MRT4530_42703C.1
tttttgggacaattgaaactcacgagtggatcaatagcacgatgtttgaaatatatccgaatgcaccaatcctgtttttacattacaagcacgcttacccaaggaaaaactgaggcaggacgaacgaacatgagtacacagaaaacacagcattagccctggcagatggtctatttcatgcctgatagatggaacattgacctttatgccagtaaagtagcggggggcgatgccggacactgaaaacgcgcactaaaagaaggcgaaccgcacactttgttccgtgccgggaatacttcctattttggaagaatcgtagtgacgagctctcagagtggtgccagaattctttttgacaatcagggcaaattca

SEQ ID NO: 39136 - DNA, 3078 bp, Oryza sativa
  Clone ID: PAT_MRT4530_42704C.1
tcaccgccagtgggttggtggcaggtggaccggaggcggatgttcgtatgtgggcgtcttgctcggatgctccactagtttcttgtatttctccatcactatctggacggatgttgtcaaggtgggcatcttgcttggatgttttgacacataatcccacaattcactcttgtcgatgccacagtgtgagaagagtgcccagatgatggtgataaactccatgttggacctgagatgcttggcatggacttgtgcatcggagctaggtgaaagatgcacaagcaagcgagcccacaccttggctaggatctcccactgcttctttttgtcttcatcgtggagcttcttggctagccttgcaccttctcgcaatatctggctaccctcctcttctgtgcctggaagatacgcctcctccaactgggatggtattgtcgcgatgagcttgtcatagatgctcttgagtgaggtacaaccatggagcatctgacgagcacactgaattgtttgttggaagtccttcttgataacccaaatgctcccgggcagcaggtcaggctttgcgaccagcaggtacgcacagtaccgcgacaaccaattcgctaccatgtaggtctcccataggtcaccatccagcaacttatccacaaggtatcctctgtaaggattgcgcctacggcgatagcatgacaaggcagagtgcaggaatccagggctgccattgcaatgatcatgttcttgggcaagcttgatctcacataagcttgttgcaatgtgccagatcagaataacatgggagcatctgggtgccccactttggatgatctcggaccagtactgctcctccgcttctgctggtttgttggcgtcgtgctgcactgttgcaaagaagtctcttggtagggaatggttgtcgtcgacgctgctagaaaaatcgtggtgtagatctagtccttggagttcttgagagagtacggtagtacgtactttctcaggcgtagtcagggaggtggcaaagtttgtgccatcgtccttacttgcgatcattcccatagtaagtgagtgcaacagcctacgcttccacgcactgtatttgtatgattgcaggaaggcatactggcctctacatccaccacttctcacctcttgcgaatttattaacttatcaagagggcctctaaatgcaccacctctcacctcttgcgaatttaacctaccaagaaaccacctaacaagcctcaatctctttctcctgtttctgcaatgaaccaaccagcacacagcagacaagctcgtccagtttacaaagttgatgcccattccataatcatccacatttactacgatgaggatggcagccccagcgatgttcagatcggtagcagataaattatgcctgttttgggacaggtgccttgctgcccaaaagagatcactggaaagccataagcccacaggtaacttgatcataagctgcgcaaaagcaaacctgagtgagagaaacccttccgagaagatcatcgggtaattgctgaagaggcagtccttgaaaaacttaacatccctatacaggactttgaatagtcggtcgagacgttccttataactgccaatcagtagcttccggttaatggaatctatgcctgcatgtaatcttgctccttccagcctacaccgtagtaaccgagacaatgcaaaggacaggcacacatccttcaatacttcagcttgcttcttcacgatgttgtcctccttaaggcattgacaaatgttttgtaatgtaactagagacctcaatttattaatatttacatgtctcgtagggctaattctgcaggagcattgttcttgctctgactctccaaagaccaagtatttgcacccttccatggcgccatttgggcttgaattgttgtcaacaaagttgctctggcgtgggttgggacccatgtacgcctgaagaagctctgaactccggctatgccataaggtcttggatgcttgatggcgtatcacaatcctgtacatgcacttgacgaccaaaatgctccagtagatccagaaagggacacgcccaatctcgcagccgtgtgttacattcatatacgccacgatcaaaagtttggccacatttcccagctccgcctgcatgtcgtacttcccgtggaggcctaccaagatagaacggaagccgactagagcaagagcccacactggaaacagcgcatattttacaggagaggcttgcatggcccctagaacatacatcagtatgccatcagacacagcatacaagaagctcttcatggccggatcgatagtattgtttaagtcatctattaagccaaactgcaccaacgggcacacaacaatgagggttggcactatgactcggaagcgaagcaagatgtatttctcttgaccccatttgaagaagaaatctgagatcacagcaccagcgtctaacatctttacttttgccccaccaccgtgccgcggctccctcgtgctagctctgtcacgatatgggcctaacagggttcctgggcggagcatcaagggcatgcctaggcccaaatggctggaagggaagctgatataagaggcaacaagtgttcgatgaaaccgagccggctgggatgtggtgcaagtgctgcactccatgtccaagtgagccacctcatctaccctgtttctaccgacgtgatgcaccaagtcttcaacccctatggagtagtggcggtgcagatgcttatggttgatgcatggcgtgtggaggcaatcatttggtttcgggcgacctgcgacgtggggagggctcagtttgacctccacggccacaacatctatgatgggggctgcgtgctggatgtgcaacatgtgccgaccatgctcggagacagagccgacactgcgcctaccaagtgtttgacactggtaccaagatgtgccaccacaaagtctaatgccgagagcactcctaccacaccagaacatgtgttcccaaccactgagtccatctacagccccaaccacatcagcggccacaacgacttcggcttctctcatcgaggccat

SEQ ID NO: 39137 - DNA, 516 bp, Oryza sativa
  Clone ID: PAT_MRT4530_42705C.1
atgtgccaacacgcccaagccaagctcacagaatcagacttgaaggaactatgccacaccttacgagaggtgttggaaagaataatgaatgtagagggggcagaactagagatcctcattggcctatgtgcacagatatgcaaagtcattcctgaagaatttgtccaagaactggagggtggacagattaagaaaagatttatgaagagactagttgacgcactgaatgcaaatatgaacccaggtggtcattgttctggaatcaggagggtgataattgagttatccatatacatgatggagtgcaattctcactatgccaattgcttcaatgaattacggatgatggaagcactatcgatggtagaagagatgccctcaagggctgagaactatacgattttcttgggtgacgtgggtttcatggaatatagtatacctctcattgctcttgtggacagagcaaaagaactgatgggtcaacagtgtttgcaaggagtcagtagtgccaactga

SEQ ID NO: 39138 - DNA, 471 bp, Oryza sativa
  Clone ID: PAT_MRT4530_42706C.1
atggagcccgcggcggcgcgggcgcggctgctgctgcgggcggtcgcgtggctcttctccctcctcgccctcgtcgtcatggcgtccaacaagcacggccacggcggcgcccaggacttcgacaactacccggaatacacctactgcctcggcatctcgatcatcgccgtgctgtacaccacggcgcaggtcacgcgcgacgttcaccggctcagctggggacgggacgtcatcgcggggaggaaggcggcggccgtcgttgacttcgccggagatcaggtcgtcgcttacctgttgatgtcggcgttgtcggcggcggcgccggtgacggactacatgcgtcaggccgccgacaacctgttcaccgactccgcggcggcggccatcagcatggcgttcctcgccttcttggccgccggcctttccgctctcgtctccggttacaaccttgccatggaagttcttgtatag

SEQ ID NO: 39139 - DNA, 717 bp, Oryza sativa
  Clone ID: PAT_MRT4530_42707C.1
attcccccccccccaaaaaaaaaaaacttgggtttcggcggtctaaccggcatctcaccagcggtcagaccggcggcatcgcggcggtccgactggcggtactagggcggtcagaccggcggcggcgacaggagctggcgattgatctcggcggttcgactggtgttacaaccttggtcagaccgacgatattcaggcagtcagaccggcgctactacttcggtcagaccgcgatccattgatttcgaggagttttttccatggctacttctaataagtttacaactaagcctcatattttcgatggaacagatttttctcattggtgtagtaggatgcaatcttacattatggctgagaattataatatttggagaaaagtttctctttcttatgtgattcttgaaactattaatattgctgctgaaaaaactacttttgaactaaattgcaaagctcgcaatattcttttgagtgggatttctcgttcggattatgatcgtattgctcatcttcaaactgctcatgagatttgggttgctttgaataatttttatgaaggtactaataacattaaagaacttcgtcgtgatttttttaaaaagaagtacattaaatttgagatgaaatctggagaagctttgaataactgtcttctcccatggagagacgtcataaggtgaagtcaagggaaggattcgaggcgagatttgaata

SEQ ID NO: 39140 - DNA, 201 bp, Oryza sativa
  Clone ID: PAT_MRT4530_42708C.1
atgatctgggttggccaatctgaagggaatcctattggtttcgccaatgatgaactcgcgtactcggccgacggcgcggcagacgggctggcggaggacgacatcgccgcgggcggagatctggccggagatggagtcgcttggggatcgccttgtgcgtcggagaaatcgccggagagagaaaggacaaagttggcttag

SEQ ID NO: 39141 - DNA, 363 bp, Oryza sativa
  Clone ID: PAT_MRT4530_42709C.1
atgtggaaccggattcacttgtcaaccactgctattgtggtccatgagatcaacggagaggggctagaagcttttggcacttgcacacttgttcccttcacttgccaagcttcgaatgctgtccatacaggtggcgtccatctttttggccgtttgatctgcaccccgtcgtcaaggtgctacaggtgcatacacatcgtgccaaaaggaaagctgcatagctgcatggcacttctgcgagaaattccaatttgcacggttctccttgccggcgagcacgtactccctccgtatgtttggattaacgatggttatccgaaagactccaagttcaacccttcatatacacgcatgtttgaataa

SEQ ID NO: 39142 - DNA, 340 bp, Oryza sativa
  unsure (1)..(340): unsure at all n locations
  Clone ID: PAT_MRT4530_4270C.1
tttgcctacngccacaccgcanttcnggcaagaagtatccgtgctggananaggaaccgccgagggggntccaggtcaatnnncccatctggattcatntccatnttaaccaccgcncgaccncntcncataganangtganaanaanccntgctttttcctncggnannccnccggcggaaanaaacnggannnagtcncttcgggggngttcgntaaggagggganaatttcnanatactnnggaancngagggggtcnccgcagangggccgggttccacnnactngggtccgggngganntttttatggncccccccccgcgaaaacggactgttt

SEQ ID NO: 39143 - DNA, 388 bp, Oryza sativa
  Clone ID: PAT_MRT4530_42710C.1
ggcggtggctacggaggaggtggcggcgtcaaaaacttgttcttttttaaaaaaacctgcattttgccccccaaaaatcattttcattattatcccccctcaccacatttaataaactatcacatttatctaccataaatcaacgcattagaacgagctgctggcaatatgcgatgagccggggttggtagcagaaggagagggcggcggcagaacatgagacatttacggcccacgttagtcagtagaatcgtggactgtgtcaaaacgaggtgtttgaatgcactcatgaacaaaagtgacaaggagaggaatccagatgtactgaacatctagtctacagtgagcaacataaggcccaggatcgatttcaaagtggtacccctat

SEQ ID NO: 39144 - DNA, 535 bp, Oryza sativa
  Clone ID: PAT_MRT4530_42711C.1
gcacgaggacccctctttttgagtcatcgaccaaatttgatagtggtactgggtggccgtcatattatcaacccattggagataatgtaaagtgcaagcttgatatgtccatcatattcatgcctcggactgaggtgctgtgtgctgtctgtgacgctcatctggggcacgtgtttgatgatgggccacgaccaacagggaaaagatactgtatcaataggtatatgtgagattttcttcacttgttatcaattgttcataggcctcatttgaaatctgaacagaaacattgtctcccatatctacgaaattattttttttgaggggtatctacgaaattaactgtttgcttaattttcccactaacatttttcccattgttcaactccggtaagtcccagattagtttctaagtaaacttccgtgcatatatacatagtagtaccatagctaatatctgtctcatatgtgttgcattgcaccgaaggacctttctatacatgttcttttggttgatacatgactgcagagttgc

SEQ ID NO: 39145 - DNA, 3048 bp, Oryza sativa
  Clone ID: PAT_MRT4530_42712C.1
atcccccgcccccctcgcttcggccgccccccccccccgcccccccctcgccatctctctctcctccgatctgcgcagccagccggagccaccgccgcctctctgtcgccgcctcgcatgtcgagagccgtggcgcgccgatcgttgccgccgttcttgaggctgcgctccgcggtgtgcgacgacggatactggatcggtaggttggaccacaaggattggctttcccccaacgaattgctcaagatcttcgcgaacatcagggatcctagccttattaccagttccttcaagagagcttgtgatagaagggattacaagcccaatgaggcactctatagcatgatgatcgacaggctagcatcctgcaggaggttcagtgatgtggaggagttgctggccagggcaagagctgagaggttcaggttttctgatgagttcttctacaggctgatcaagatgtacggcaatgtggcgaaccatcccgagaaagcaatcgagactctctttgcgatgcccgggtataactgttggccgtcgaccaagacttttaactatgttcttcacatgcttgtgtgtaagaggcagtacgaagttgtccatgaggtctacttgagcgcgtcaaggttgggagtgacattggaacacctgctgcttcaatattcttgtcaagggcttgtgtcagttcggcaaatttggcgatgcgatttcgctgttgtatgagatgccgaagcaaggttgcgtgcctaatgtgacgacctactctacattgatgaatttcctctgtcaacatggtcaggtggacaaagcattcgagctttgtgagagaatgcagaaggaggatattgttgcagatgcagttgtctacaatattttgatcgctggtctttgcagagaacaaagggtaacagaggcattcaatttgtttaagtcaatggttcctaagggatgctatcccaattcagggacatatcaggtacttcttgatggtcttttgagctcaggaaagtttgtagaggcaaagggccttgttagcatgatgagggcagaacgtatgaggcccggtttctcatcattcaagttactgatagatggactctgtagtgtaaactgtttagacgacgcgcatcttgtcttgaagcaaatggtggagcaagcttggtactattggggtcttataatggccaagaccttttcactagggcttacacctatcttcctgccttcctgggtttcactgacatctgagaccctcacagtcttgttgaactatgtccagactccacagatccctgggcttatgcagactgcagagaagctgggacatgtgtccatgctgatgaactggtgctcagtttgcaaatgccaacaagaacagccgagagacctgtgtttattggaggcagcaccacacataattgcactgacgaatcggtcggcaagtacagagttggaggcaggaaattctgaatttacacccgaatttgccggtatggacttcggtgattctagacgcaagcctaatgtcgtcgggaagttcaccgtagctgttgcactcacggtcatgtgcatcattgtgttgaaacagtcgcctggttttaccagtacaagtgtgttctctcgccatgaaattggtgtgactcatgtgttggtgactggaggagctggatacattgggtcacatgctactcttcgtctacttagggacaactaccgagttaccattgtggataacctttctagagggaacatgggagctgtcagagtccttcaacgtttgtttccagagcctgggaggcttcagtttatttatgctgatttaggcgatgcgaaagctgtatcctttttctctacaatccaggttaacaaaatattttcagaaaatgcattcgatgctgttatgcactttgctgccgttgcttacgttggtgagagcacgttggagccactgaggtactaccacaacataacatcaaatacattgacagtgcttgaggcaatggcagcatataatgtaaaaactctgatatactcaagtacttgtgcaacatatggtgaacctgacacaatgcctatcacagaagcaacccctcagaatcctatcaatccatatgggaaggcaaaaaagatggcagaggacatcattttagatttctctaagagatcagaaatggcagtcatgatcttaagatacttcaacgtcattggatcagacccaggggggcggttaggggaagctccacgaccagagctgcgtgagcatggacggatttctggtgcttgctttgatgcagcactgggaatcattccaggtttgaaggttcggggaactgattaccctacagctgatggaacttgcataagggactatattgatgtcacggatctcgttgatgctcatgtgaaagctcttgataaagctcagcctggcaaagttggaatctacaatgttggcacaggacatggtagatcagtgaaggagtttgtagaagcatgtaagagcgcaacaggagctagcatcaaggtttcattccttacccggagaccaggagactatgctgaagtttacagtgacccatccaaaatccatgacgagctgaactggacagcccgttacattgatcttcgcgaaagcctttcaactgcatggaaatggcagaaagcacacccgaatgggtatggatcggcctgattcagggtttaatagattcagacttaaggtacacagattctcaggtccatgtgcagaaatcatatatccttcagaaaattggttcttcagcacaaacatagtgccaggcacagaagtgttctgaatttttttggcagcatttggaagaagatacagaaagaatggcccctctattcctggcttaggatcatacatatagttttttttttccttgacattttttttaatcttttctactcgttaaagcataatataataaccaatagaaaatgtgttgtagacaaggtagataactatcatgtatgaacgttcatggtgttgaatgaaaggatatatgaataagtagatgtttgctt

SEQ ID NO: 39146 - DNA, 879 bp, Oryza sativa
  Clone ID: PAT_MRT4530_42713C.1
atggcgagggcccccacaatggtgatccaagaggactacatcgacatggacctcaccccgaccaccacgccgctgcccccctcctccccccgcctctgcggcggcggcggattccgggagttcgagttccacagctcgggcgccgtggtcagcaaggcgttcgcgtcgccggccgacgagctgttctacaagggcaatctcctccccctccacctgccgccgcggctgcagctcgtgcagaagctgctccaggagcagcaggtgcaggtgcaggggaccaagaaggaggttgaagacgacgacatggttgacatgagcaaggtgtgtgctgccaagaagtactcgtggtccaagaggttgaagctgatgaagaggtggacgtcgagggagtacatcaagtccctcttcttggccaccgccaagccgaccggcatcgccgtcgtcggcggcggcaatggtggcggcgtgatggatcaggaagagctctgcggccaccgcaagtccttctccggcatcatccggcgggtgcggctggtggcgacgaaggcggcgtcggcgtcggcgccggggacctcgccgctgtgctcgacctcgtcgtcgtcgtcgtccacgccgtcctgcggcaacgcgagcaggttcttcccggcggcgccggcgctgaagcggagtagcagcgccgggtcgtcggaggagggcgccatccagggcgccattgcgcactgcaagaggtcgcagcaccagcacctacagcagcagaggagaagcgtcagcgacgtggtgttctactcggtaaccaacacgcccagggtgtcatctgtcgccgccgccgccggcggcgaggtcgcccagggggagaggcaggagatgtgcaggggatga

SEQ ID NO: 39147 - DNA, 203 bp, Oryza sativa
  Clone ID: PAT_MRT4530_42714C.1
aaatcaatctacaggtacctacataaaaaaccatggacgaaggggcatacaaggagctgagcatgaattgattggttgccaaaataatcccccagtgaagtgagtgagatcgatgatggatggaaccaatcaaaggacaaaaagcagcggcggcagcagcagcagggtcaaagctttaactaatctgagaaatctgatgagag

SEQ ID NO: 39148 - DNA, 216 bp, Oryza sativa
  Clone ID: PAT_MRT4530_42715C.1
atggagaggtcagctggagatggcaaggaagcggtgggagacggcatggtagaggcgggagggttccactcatgcatggagaagaccatcatgctgcgcatagcgcagaagattgttaattggggccccattttctacgattgccctgaccacgaggaggacaataatgggaacttctgtaaacaccgtgctactgtgttctccgatgtctcctag

SEQ ID NO: 39149 - DNA, 330 bp, Oryza sativa
  Clone ID: PAT_MRT4530_42716C.1
tgacagaaaacacgaggcctgggagatctgcttaactccagtgcatgtccaaagctcgccttcgggtgtactagcatgccagttgatttgatcatgtaatcaacaagaaatagaagcaaagaaaccgcggttaaatctataaatgatagccgatcggctaggactctatccatgtgcggcaatcatcttaaagcacctcaatctaacccgacatcacacatcaagttgtattgtcgggatcgggtacatcagcttacctagcccaactcagactcagccgatctggacttcagccgattcctgttctgttttcgaactcgatctccgcct

SEQ ID NO: 39150 - DNA, 287 bp, Oryza sativa
  Clone ID: PAT_MRT4530_42717C.1
gcgaggggaacatcggagttcatcatttattcaccacacatttgcttccaaacaaaaggaaaacccttattttttttgtaaccccaccacatacatgcacaggtaggttcagtagcctagcttgtagcccgatcttgccagccagttgcagacaccacctcccccgttagggatgttcacgtttcaaaaccccgggagggtcgcccccgagcgcttcaagtacccttttcggcaggcgcggaacacctcggacattgggtgccctacatcgggggcgccaagcttcc

SEQ ID NO: 39151 - DNA, 735 bp, Oryza sativa
  Clone ID: PAT_MRT4530_42718C.1
atggggaaggggcgggacgggtggagagcacctcggcgagggcggctgagagcgggacgcgcaccacgccgctcgcctgtcctgccgctcgtcatcttcgtcttcgtctccaacctgcgccggaggaggaggagagcacaacggcaatggggaaggggtaggacgggacgcgcatcccaccgccgctcgccggtaccgctgctcgttgtcttcgtcttcgtctccaacctgtgccgagggaggaagggggcacgatggcgatggggaaggggcgggacgggtggagagctcctcggcgagggcggcggcaagcgggacgtgcatcccgccactcgctcaccgctcgtcgtcttcgtctgggctctagcctgcaccggaggaggagcctgcgccagagaagaaagtgggcgcgacggcgatgaggaaggggcaggagggcatgagagctcctcggcaagggcagcggcgagcagaacgcccatcccgcagcttgctggtcccacctctcgctcgccgctcgtcgtctttgtcttcgtctccagcctgtgccggaggagacagagggaacgatgcgatggggaaggggcggagcaggaggagagctcgtcggtgagggcggcggcaagcgggatgcgcatcccgccgcttgctggtcccaccgctcgccagtacggccgctcgctcgccacgcatcttgctcgtcttcgtctctctagctggcatggattcaattaa

SEQ ID NO: 39152 - DNA, 530 bp, Oryza sativa
  Clone ID: PAT_MRT4530_42719C.1
tcactcgccttcgccaggcgtgctgcggcgcggccgctctgggtgcagctcctgctgtcggtggctcagtgcaccgccaccgccgtcgtctcctgttcgggatccgcgccggccgtcctccgccgcctcgtcgctcgccttcgccaggcgcgcggcggcgcggccgctccgggcgcagctcctgccgtcggcggttcggcaagtccctggcttcgtcgtgggcacactgctgcggcggcggcggcgggtaggagccaccgaggccgacgaggccgtgtagactgcgactgaggtgagaggggcttgcttccccatcccctcggagggtgatttgtgcattttgttgcacaccacatgtttttttttgttgcatatagtgtgtccgtgatgttgcaatccgtaattttctggatgtttcttaaatcaatactggatgatgttgcatttggtctaaaaaaaaaaaaaaaaaggggccgctcgcgatctagaacctagttctagatcgcgagcggcccctttttttctttttt

SEQ ID NO: 39153 - DNA, 1303 bp, Oryza sativa
  Clone ID: PAT_MRT4530_4271C.1
aaactagtggatccccgggctgcaggcttcggaagggttcgtcagatcactaatggaggtttgcgccgcccgcgccccaggcaagattatccttgccggcgagcacgccgtcgtccatggctcagccgccgtcgccgccgccatcgacctctacacgcgctgctccctctgcctcatgcccctcgctgacgacgaggcggccgccacgttggagctggacctcaaggatcctggcctcaccttctcgtggccgtgcgggcgcctccgcgaggtgctgctgacagatgaggcggcgggggcacgggaggcgaggccatgctccccggaccggctggcctccattgccaggctcttggaggagcacgagatccctgaggccaagatctggctctccgccggtctctctgccttcctcttcctctacacctccatattggggtgtagacccgggaaggtgacggtgagctcggacctgcccatggggtcggggcttgggtcatcggccgccttctgcgtgtcgatgtcgggggtgttgctgacagctgccggcgtggttactgcagtcggcggcatcagcggcgagggcatggggtgggagttggtcgggaaggatgatcttgagctagttaaccggtgggctttccagggggagaagattatccatgggaagccttctggcatcgacaatgctgtcagcactttcggaagcatgatcaaattcaagaaaggggaattgacaaaccttaaatctagcaacccagtgaaaatgcttattacggatacaagagttggtaggaacacaaaggctctggttgctggtgtctctgaaagagcctccaggcattcagatgctatggcttctgtattcaacgcagtgaactccattagtgaagaggtgtcaagcattgttgagttagcagctaatgatgagatagctatcacctcaaaggaggaaaagctggcggaactcatggagatgaaccaagtgctatccaacttagttctggagaaagtcattgcagagctggagtcgcatagttttcgctgctttaaagttgagcttctatttggatgtttggacaatgaggtcgacgctggcaaggccgtgctcacggcgtcgcttcctggtacctccaatttcttctctggcccttacctcatctcttttgccaaagatttccttccaatcggcaacccttcttttgcagtgccaacaaggacgcccccatgtggttccctgcttgcagttggggctttcctgcatttaatcaagcctaggatacctttcaaatgtttaccttga

SEQ ID NO: 39154 - DNA, 438 bp, Oryza sativa
  Clone ID: PAT_MRT4530_42720C.1
atggctgagctcaatctcgagctcaccggcgacaaacgatggctcgtttggggtggacatcggagtaacgccggcggcgagtccgaaaggaggatgttttcgggtggtgatgcatgtgcttctacaatcatgtattggttaattgggtgcatgcatattgatggcaacggcgacgatgtcgctgcggcggtgcgcagctccagagctccggtgtgcacggcagcgttcccgccgattggctgcaccagagaggatgaaatcaaaaggagaaatattcggcatggtgaggagagtatggaacgcaagagaagaggaaacgaccgcggctcatcaacgattgcggccatcgtcttcttcgcagccggcgatggagaaccagtggagaagagcagcgaggatgctctccctcggatggatcggcactggaatggtgggtga

SEQ ID NO: 39155 - DNA, 291 bp, Oryza sativa
  Clone ID: PAT_MRT4530_42721C.1
gagaaaagcaaaagttgttttattttttgctaacccaacaagaaactttttttgaaaaggaagacctgggggaaggggaaaaagggtaaccgttaaaaaaagccccgcctgaataaaggtaagaaagggggggcccattttttttttaaagccataggggaaaaaaacctggaatgccggctccatggggcaaccgccgttttgaaacaaaaaaaggggggaacgggtgggaacggacttggtggttctccctacagggggagtatttataggggcagggggtcccgcgct

SEQ ID NO: 39156 - DNA, 1998 bp, Oryza sativa
  Clone ID: PAT_MRT4530_42722C.1
ctctcctctctacccaaaccctccctttcctcccccaattctccatttctcctagctcgccggaaaccctaagcgggccacctcgcgccgcggcgggccggcgagcgatcgcattgggcggcggcggcgatggcgacccacgcccccaagggctacctctgcgcggggagctcgtcgttcgatgatcccgacgtggtcgaggtgacgccggcggcggccgcggcaggggggtggagctccggccaccagaagcggaagcggagtcaggttgttcctcatgaagtaattgaactggatgctgatgatgatcctgatggagttgtgattattggtgaaaaatcatcagttgataagaataagcaagctgttggatatcctatagactggctaaagcatgcaaagagtagtttggctggtgaaattgctggcccaagttcctacccatcaaaaaatcctgatatattacttggtggcctgaaaatatttcaagagaacccattttacaacaacattgatgactatgcttatgaggcatttgaagaagattatggttatgatgaagatgagtatgatgattacgattatgatagtacactttatgaaagtgaatataacttcactttggcttccaagtttgatggtttggatatcccacctggtgtggaggctcctttaccatggttgcagacgactgcggcagagatggcaaataagaccaaacctgtgaacatgatggatgataaaattgatgaaaaatacagtgcatttaagcaattcgatactgttgatgatcacagtgatcattattattcgaagccagatttaagaaaggttcaggtagtgaaaaagccttcaaaagaatgggcaaagcgtattcagcacgagtggaaagttctagaaaaagatttaccagataccatattcgtgagggcatatgaggatagaatggacctgcttagagctgttattacgggaccagcaggcactccctatcatgatggtctcttcttctttgacatttacttccctcctcattatccgagtgtacctccactggtgaactatcggtctggtgggttgcggcttaatccaaacttgtatgcttgcgggaaggtgtgccttagcctgttgaacacctggtctggtagtggatgtgagaggtggagtccttcaaactcaacaatgctacaagtcctggtctcagttcaggctttggtgttgaatgccaaaccttatttcaatgagcctggatatgccatgcatgctaatacacctcatggcgagaagagttcattaacttataatgaagatactttcctgctatcctgcaggacaatgctatattctctgcgaaatccaccaaagcattttgaggattttatcgccggtcatttccgcaagtatggccagagcatcctgatagcttgcagagcctatctggacggtgcccaagttggatgtcttgttggaaatggtgtgcaggatgtcgatgagggcgacaagagctgctcggcgaggtttaagagcgcgctgaagagattatttgaggaacttctgatggaattcactgtcaagggagcagagtgtgacaaattcctagctgagaaggccaaagccgcggcttctagagctccagcagacaccacattgaggctataagttgatagcctcgcgtggtcgatagacgggagtaataatttcgctattgaaataggatcctcaactcattatgcccccggattctaaccgtttcctggaagtagcctatgtaaatagccttgtagttgccccggtaaacataaacgacatatccgtgtttgtatttaggggctatatatcttttttccccatagcatgagggtgtcgtctacctgcggagccttaatccgctgtgtatgtgattgacgccacaccatcttggccttctgaagaatatcatattgaactcttatcagcagatccctgcttctacgctggaattcagctagaatgctagat

SEQ ID NO: 39157 - DNA, 882 bp, Oryza sativa
  Clone ID: PAT_MRT4530_42723C.1
atcggatttcacttgccccatcttcatctctcacctctgtctctctctccacgcatctctcaatcactgcaaagcaggagcgccgattcagtggcttcaaccataaatttttgctgcccataacagccataagctccctgatattacccaggtttgcttcccatcatttttgtcaattaatttggctcctgttgctagcagcacatcagtcctggaagcattggcaacagtacgccgctatggttgctgtaatcacagaagtcaagcacgcatgcatgagcagaaaatggaagagacgaagctagagggtttgggactgattccagaatcatcggccaattcaatttcagtagcttgtgctttagaaatcttccgttgtgaagacattagatgacttgtctctggtagttggagcatgtggttgtgttcaatagataaatcatgcaaggtgtaaagaccagaatccctatctaaggtaattcccattcgggcatcacaacctgttcttgtctcagctcggggaagttttgtcaagtgatctctcttgtcctgtgctcggtagccctgattggaacatacaaatctacatgatgtaactaccttgtcaattttacttgtgttctcatacttcttcctagcattgaatcctacttgacctccatagaatacccaaaagttccaagcctcatcagcacaactaaaattcatgcctattcgaggtatccaagaaggtgtgttatttgtgtgtaatattgttttaatcataggagaactaattatatgtattacagatgaagatgataatatgacttacttatttggagtctctgttgttgttggggtacctcgatcttcagaattatccagtgaagacatttcttt

SEQ ID NO: 39158 - DNA, 693 bp, Oryza sativa
  Clone ID: PAT_MRT4530_42724C.1
atggccgctgcgccgtcgccgccgccgccgccggcctttcttccgccccacccccgtatcgtaaactacatctccactcgccagggggcattcgagctagcagctcaggcggcggcacatccggggacttccgtgatcgtcgtggtgaccggatccaatccactccaggacgcacgcaaactgtttgatggattggttgcccggcgagacgcactgggatggtgtgttctcgggctcgacaagttttcacagctgttggagagatacgacgtgctctgcgacgacaggaacaagttgagggagctggtgggcagcatctacgccgacatgctcatcggcggctcgtcggctccggaggtggcgctggagagccacgacgccgccgacgacgtacaaggcagggtgcgtcggctactgagcatcgcggatggggcggacgcggcaacacttcgcctgacgctgctcgacgacgccgacgaggctcgccgtctctgccgcgctgggttcctccaagggcgccgcgacctcgccgccctcaagcagctagtcgaggacttctggatcccatccatcaaccgccagcttgaaggtccagcgttcgtcgacggcgtccacctgccggaggagctcgtggacgaccttctcaaccagcgtcggcttcacccaccttcccaggaggaggcagaagattaa

SEQ ID NO: 39159 - DNA, 376 bp, Oryza sativa
  Clone ID: PAT_MRT4530_42725C.1
atgcaatcctatgggctcaagggtgctcaccgaaccttgaacgaggcgccggaaagtctggacagcggcagcggagaagaagatggtccggcgacgattgatggcaacggcgacgatgttgctgcggcggtgcgcagagcgcgctccagagctccggtgtgcatggcagcgttcccgccgattggctgcaccagagaggatgaaatcaaaaggagaaatattcggcatggtgaggagagtatggaacgcaagagaagaggaaacgaccgcggctcatcaacgattgcggccatcgtcttcttcgcagccggtgatggagaaccagtggagaagagcagcgaggatgctctccctcgtatggatcggcactggaatg

SEQ ID NO: 39160 - DNA, 1127 bp, Oryza sativa
  Clone ID: PAT_MRT4530_42726C.1
atgaataaatatattttttctagaatttatcctcttagtttaggtcttctaaaaattcaaacaaagttctattgagcccatcttccccaattttctcctctttggcttgaaccacaccctgtgcatcctccatccaacacagtgacagccgagagagagaccgagggcgccgacctacactggacggcgtcgatgcgtggcctcgacgtggcagcgccgaaccaaggcttcacctccacccagctgcatcgcctcctccccattaccactcctgagccgagcaaaccgagggggagagctccggcttttcttttccatctcgaccttgccgcctgccgtgaagacgacggccgtcaccatcgccattgtgcagcggtcgtttcctcttcttttgcgttccattatcgcctctccacgccgattccatccctctaagtttcatcccatttcatgcagtggtttggtgggaacgcaagcctcgccgacgatgctctggagcgcgcactgggcgccgccatcgggacatcgtcttcgttgccgtcgaaccggaggaagccgagccgagccaccgcaccatcaacatctcctcagtgtcctctcttaaatccctcatgaacccctggcagtggtgcagcgagcttggagatcggcatcgtcttccccaattccggccaataccacctatagcctcgccttgaacccctttacattttctccttatgttgcacaccgagatctgccgccgtttgccaccggcgagcttgagaacgagctcggccatggctagctctgtctgctcaaacactatacacctataacacgttataacttgtaaaatacataaagaattcatattaactctaaaaattatgaaaccaaatgtgttagtcttagaaaacacatatcttcacctcagcaaacataaacttaataagaatctgtacaaactctacagagttaaaactaatcgattagccgtgctcgtggttatgagcggcgtgtggatatgtattgagtatagacttgtatttattcttctaaatgctaaaatttaccttcaaattgtgatgagatttgagaatgatctccttgctgccatggaaggcaatgaggtgtatatttataca

SEQ ID NO: 39161 - DNA, 563 bp, Oryza sativa
  Clone ID: PAT_MRT4530_42727C.1
gcacgaggggtgggaacgcaagcctcgccgacgatgctctggagcgcgcactgggcgccgccatcgggatatcgtcttcgttgccgtcgaaccggaggaagccgagccgagccaccgcaccatcaacatctcctcagtgtcctctcttaaatccctcatgaacccctgccagtggtgcagcgagcttggagatcggcatcgtcttccccaattccgggggtcaagctccaccttcgatttctccctctccgatcatcagccatatcaagccggcgtcgtcattgcccgaggctccccgccgtcgctgagtcgttctgctcgtggtcatcgctatctggacctcgccaagtttcattggacgctcggtcttagatttagtctttgagtgatgcgggtgatcgattgcttcttctaggacttgaacttaatggggtaaacccctagtcggtgtgcttgaggattgggtagtcaagcttcccgctgttctatatctttatttcgccggtcggcctatgtaactatgaagtagttgtgatttagattattttcgtcttaagtgtatt

SEQ ID NO: 39162 - DNA, 411 bp, Oryza sativa
  Clone ID: PAT_MRT4530_42728C.1
atggcgcggcatgggaccatgtggtggtggaggacgacgatgacacaacaaatggcaacggtgaagatcgccagccttccattgatgctgccgctcctcctccggcacctcaagtatgaccagaataccaagcctgacccaaacctcacctgcatcgcggtggcgccacccaccgcgtggcgatggcgccacatgaagtgtcgcatggtccatggggctaatcggcgacgggatgccatctatgccatccagataccagtaacgcctaatggaaacgttgagcttacatgccacgacgctggccttcaccacggacacaagatactgggaagtctggaaagttttaaagatgtatttttttccctctcacttacacgatgtcacgtcaatcaactgtcaatgatgtcttaa

SEQ ID NO: 39163 - DNA, 231 bp, Oryza sativa
  Clone ID: PAT_MRT4530_42729C.1
atggcgacggcgaccggaggtgaagaagacggtagccgatctccgcacttgctgcgccattgcctaggatttttgagggtttttgaggaagacttcaaggagaagacgttggcgcgacggctcggcttgagtacaatagtcgtcttcttcgcggccggcggcaaggatgagggcgacggagaagttgagagcctcctccctcggtttcttcggcttagaggtggagaatga

SEQ ID NO: 39164 - DNA, 235 bp, Oryza sativa
  Clone ID: PAT_MRT4530_4272C.1
ttttttttttcatcttgtttttttacttgctaaagggtctgactcatcaggtctttatttacaggtttgtttttcactagaaacaaaaatgggggctccccttttatttttgttgttccaagagggaaacctttgattggtgcattttttggcttgataccccctaggtgacgtgcttttaaggggagaaacttcttacccttgtgacacaatttagaaaagcctctaccacgcc

SEQ ID NO: 39165 - DNA, 443 bp, Oryza sativa
  Clone ID: PAT_MRT4530_42730C.1
accaaacaaatggacaatgcgatagctaactacatagatggacgaccggcaatgaacgccgaacagcatgacggttctgaaggcacagaactacggatccatggagctacaaacaaccccatgtacggattatcatcactacgcaattatctcggctaatgaccatccacactgagattgaggacccgaaactttagtcatagtacgtgctcattctgtataaggccaaatgctcttgaaaaaatagttccccttgaaaacaaatactcttgacaaaaaaaaaaagaggtgacctcatgagggatcaccaaccgcaggcgggggtcatatgcgacaagaccataccgggggaaaagccggcgcctttggccgttttaacaagtgcacggtcgctttcaatggaagaacagcatacagagctttcccttttttcttgagaaaat

SEQ ID NO: 39166 - DNA, 600 bp, Oryza sativa
  unsure (1)..(600): unsure at all n locations
  Clone ID: PAT_MRT4530_42731C.1
agttacattggccaactggccaaataaatatatagaacagcggaagcttgtctactcaatccacaagcaccccgactaggggtttaccccattaagttcaagtcctagaagaagcagtcgattacccgcatcactnaaagactaagactaaaaccttgaatcaggaaaatgtcagcacctaaatcacttcttcaccgtttaagcaatcatcttgaacgaggcgccggaaagtctggacagcggcagcggagaagaagatggtccggcgacggtgtagagctccgggaagacggcaacggctcgatccacggaggaggcggaatcgacaatggcgacggcgaccggaggtggagaagacggtggacgatctccacactcgtagcaccattcttgaagattcttgaggggaaatggagaggaggttgaggtgaagctggtggcgtggtggctcgctccggcttgatctagattgatggcaacggcgacgatgttgctgcggcggtgcgcagagcgcgctccagagctccggtgtgcatggcagcgttcccgccgattggctgcaccagagaggatgaaatcaaaaggagaaatattcggcat

SEQ ID NO: 39167 - DNA, 908 bp, Oryza sativa
  Clone ID: PAT_MRT4530_42732C.1
gccatggccgagctcgttctcaagctcgccggtggcaaacggcggcagatctcggtgtgcaacataaggagaaaatgtaaaggggttcaaggcgaggctataggtggtattcttgcaagcattggtcatcggaattaatggcgacggcggcgcgagcggcggtggttcgagcgtccaatgaaacttggcgaggtccagatagcgatgaccacgagcagaacgactcagcgacggcggggagcctcgggcaatgacgacgccggcttgatatggctgatgatcggagagggagaaatcgaaggtggagcttgacggccggaattggggaagacgatgccgatctccaagctcgctgcaccactgccaggggttcatgagggatttaagagaggacactgaggagatgttgatggtgcggtggctcggctcggcttcctccggttcgacggcaacgaagacgatgtcccgatggcggcgcccagtgcgcgctccagagcatcgtcggcgaggcttgcgttcccaccaaaccactgcatgaaatgggatgaaacttagagggatggaatcggcgtggagaggcgataatggaacgcaaaagaagaggaaacgaccgctgcacaatggcgatggtgacggccgtcgtcttcacggcaggcggcaaggtcgagatggaaaagaaaagccggagctctccccctcggtttgctcggctcaggagtggtaatggggaggaggcgatgcagctgggtggaggtgaagccttggttcggcgctgccacgtcgaggccacgcatcgacgccgtccagtgtaggtcggcgccctcggtctctctctcggctgtcactgtgagacgtttacattttgtcctaggttataaatgaaaaggttttaatttgttctcaaattt

SEQ ID NO: 39168 - DNA, 869 bp, Oryza sativa
  Clone ID: PAT_MRT4530_42733C.1
actcatgtgaatctagttcccaggatgtgcactagattcacactttcatctcaagcatgattatacatagcaaacacaaataagatgaaagcgattataaactacatctactttagttacattggccaactggccaaataaatatatagaacagcggaagcttgtctaccgaatccacaagcacaccgactaggggtttaccccattaagctcaagtcctagaagaagcagtcgaatacccgcattactcaaagactaaatctaaaaccttgaatcaggaaaatgtcagcacctaaatcacttcttcaccgattaagcaatcatcaagatggtagacatggctggggtagctaggtttatgacggcggctcgtgtaacggctcggcggcggcaagaacctccgaatgaacggcgatggctcaatcagctccaagaacggagggggtggattcggcaacggcgatggtgaccagaggtggagaagacggtggacgatctccacactcgtagcaccatccttcgagattcttgaggggaaatggagaggaggtcgaggcgaagacgctggcgcgacagcttggcccggcttggtccagataagcgggaacggcgatgatgtcactgcggcggtgcacagagcgcgctctagagcgaccatgacatggcggcgttcccgctgctgtagaagatgaaatggaatgggatcaaaaccaaagttgttcgtcatggtgagatgagaatggaacgagtatgagttagagatgaagagagctcgacgacggttggcgatgtccctcttcttggcggccggcaacgaaagagaggtggagagggagagctggagcttcctccctcggttggatcggcac

SEQ ID NO: 39169 - DNA, 225 bp, Oryza sativa
  Clone ID: PAT_MRT4530_42734C.1
tccccgggctgcaggaattcggcacgaggaacaaacatcatttactgttcacatactacttttttttttgcatgtgactgttcagggggaggcaagaatatgacacgcatgcttcctattcagaattagttgacttatgtatttctagatcaattaattaggttctcaccttatgtttttactatgttttgtgtagtgaatcggttgcaatttttttcaagtgaa

SEQ ID NO: 39170 - DNA, 624 bp, Oryza sativa
  Clone ID: PAT_MRT4530_42735C.1
atggctggggtagctaggttgatgacggcggctcgtgtaacggctcggcggcggcaagaacctccgggtgaacggcgatggctcaatcagctccaagaactatcatgcatgtgtgtccatgaggttagagaggccccagggatgctactgatgcatggaattgggttggtactcaccggagggggtggattcggcaacggcgacggtgaccggaggtggagaagacggtggacgatctccacactcgtagcaccatccttcgagattcttgaggggaaatggagaggaggtcgaggcgaagacgctggcgcgacagcttggcccggcttggtccagataagcgggaacggcgatgatgtcactgcggcggtgcacagagcgcgctccagagctccggtgtgcacggcagcgttcccgtcgattggctgcaccagagaggatgaaatcaaaaggagaaatattcggcatggtgaggagagtatggaacgcaagagaagaggaaacgaccgcggctcatcaacgattgcggccatcgtcttcttcgcggccggcgatggagaaccagtggagaagagcagcgaggatgctctccctcggatggatcggcactggaatggtgggtga

SEQ ID NO: 39171 - DNA, 885 bp, Oryza sativa
  Clone ID: PAT_MRT4530_42736C.1
atggctatggtggccggcgacgaggcgatgtcagtgccatggcacgacgtcggcgtcgtcgtcgaccccgaggcggccgggacggcgccgttcgacgccggcgccggctatgtcccatcgtacggtcagtgccaatactactactactacgacgaccaccaccaccacccgtgcagcacggagctgatccacgcgggcgacgctggcagtgcggttgcggttgcgtacgacggcgtcgacggctgggttcacgccgccgccgcagccacctccccgtcctcgtcatctgcgctcaccttcgatggtcacggcgccgaggagcacagcgcagtgtcgtggatggacatggacatggacgcgcacggcgccgcgcctcccctaatcggctacggcccgacggcggcgacctcctccccctcctcctgcttcagctccggcggctccggcgacagcggcatggtgatggtgaccaccaccaccccgaggagcgccgccgcctctggttcgcagaggcgggcacgcccgccgccgtcgccgttgcagggatcagagctgcacgagtactccaagaagcagcgcgccaacaacaaggagacacagagctcagctgccaagagccggcgggagaggatcagcgagcggctgagggcgctgcaggagctggtgccgagcggcgggaaggtggacatggtgaccatgctggacagggccatcagctacgtcaagttcatgcagatgcagctcagggtgctggagaccgacgcgttctggccggcgtccgacggcgccacgccggacatctcccgggtcaaggacgcgctcgacgccatcatcctctcctcgtcctcgccctcgcaaaaggcttctcctcctcggtcgggctag

SEQ ID NO: 39172 - DNA, 465 bp, Oryza sativa
  Clone ID: PAT_MRT4530_42737C.1
atggcgttcccctccctctccgtctccggcattctcgcgcgccacccggtgctcttctacgcggccacctggacggccgtcgccaccgccgcggtgtccgtggccgcgttcgcgccggagctcgccttcgtctgggctgtcacgccgggcgccgcgccgctggcgtcgtcgacggccggctgcccgggcggcatcgtcctgccgctcgacgggccgccgtgggacgccgcctgcgtgcccgccgcgctgttcggcagggtcaccctcgacgtgctcgtgccgcccgtgttcgccgccgcggtggtgtccaccgctctctggttcaccaaggccgtcggcgtgtgggaggacgacgacgacgaagacgacagcgacgaagctacaatgttggacaaatgttcagtgaaggtttacactgacagcaaaattgacagtctttcatggccaagcctgttatgcaactaa

SEQ ID NO: 39173 - DNA, 1638 bp, Oryza sativa
  Clone ID: PAT_MRT4530_42738C.1
atggactccgccgccggcggtggcggcctcacggccatccgcctgccctaccgccacctccgcgacgccgagatggagctcgtcagcctcaacggcggcaccccccgcggaggctcccccaaggaccccgacgccacgcaccagcaggggccccccgccgcccgtaccaccaccaccaggaagctcgtcctcgcctgcatggtcgccgccggcgtgcagttcggctgggcgcttcagctctcgctcctcacgccctacatccagaccctaggaatagaccatgccatggcatcattcatttggctttgtggacctattactggttttgtggttcaaccatgtgttggtgtctggagtgacaaatgccgttcaaagtatggaagaaggagaccgttcattttggctggatgcttgatgatatgctttgctggtcctgctcgtgcccttttagctgacctttcaggtcctgatcagtgtaattctgcaaatgcaattttttgcacatggatggctgttggaaacgttcttggtttttcatctggtgctagtgggaattggcacaagtggtttccttttctaatgacaagagcatgctgtgaagcttgtagtaatttgaaagccgcttttctggttgcagttgtattccttttgttttgtatgtctgttaccctgtactttgctgaagagatcccgctggaaccaacagatgcacaacgattatctgattctgcgcctctcctgaatggttctagagatgataacaatgcatcaaatgaacctcgtaatggagcacttcctaatggtcatacagatggaagcaatgtcccagctaactccaacgctgaggactccaattcaaacagagagaatgtcgaagttttcaatgatggaccaggagcagttttggtgaatattttgactagcatgaggcatctacctcctggaatgtactctgttcttctagttatggctctaacatggttgtcgtggtttccctttttcctttttgatactgactggatgggacgtgaggtttaccatggggacccaaatggcaacttgagtgaaaggaaagcttatgacaacggtgtccgagaaggtgcatttggtttgctattgaattcagttgtccttggaattgggtccttccttgttgatccactatgccgactgatgggtgctagactggtttgggcaatcagcaacttcacagtgtttatctgcatgctggctacagcaatattaagttggatctcttttgatttgtactcaagtaaacttcaccacatcattggagcaaataaaacagtgaagaattcagccttgattgttttctccctacttggactgccactctcgatcacatatagcgttcctttttctgtgactgctgagctgactgctggaacaggaggtggacaaggtctggcaacaggagtcctgaaccttgcaatcgttgttccgcagatagtagtgtcactaggagcaggtccatgggatgctctctttgggggagggaacgtccctgctttcgccttggcttccgttttctcactaggagctggtgtcctcgcggtccttaagctacccaagctgccaaactcttacagatctgctgggttccatggatttggctga

SEQ ID NO: 39174 - DNA, 115 bp, Oryza sativa
  Clone ID: PAT_MRT4530_42739C.1
gaagaaccgcactaatatcagccagaagggcaatatcaatatcaacaaggcgaaggacaatatcaactttaaagaaatcaatatgaacaacagccgatacaacatcaacatatgg

SEQ ID NO: 39175 - DNA, 1678 bp, Oryza sativa
  Clone ID: PAT_MRT4530_42740C.1
aaacacaaccccatggttaacctgtaatcatgtactgatacaagccagtgtagatagtgaatacagaatacgtaaacagtgaaccatcgcaaataaaaaccacacacaagtattattcagtacagataaaatggcgcgcgcgctatacgcggatgctctatctgatcgctcgttcatcatggcttggcctccggctccgggaagtggaactcaggcttgggcaatggcggcagctcgaccttgggcaacgatggcagctcaggcttcgggagctccggcaccgcagggtgctcaggcaattcaggcttcggcaattccggcacctcggggtgtggcagttcaggcaccttcggaaactccggcacggcggcgccatgcggcagctcgggctttggcagctccggcacggcgaggtgcggcggcagctcgggcttcggaagctccgggtactcctccttgggcgcggccggcagctccggcttcagtggccggcgctttcttccggctatggtgaaaatgggatctcaccgttcggcaacggtggcatctggggtgcatccggctttggtggttgttcatagtactctggctgtggtggttgatcaggttttggcggcatgtcaggattgggtcttggcggttggtcaggctttgatggcccattaggattaggttgtggcggctggtcaggtttcggtggcccattaggattgggctgtggaggctggtcaggtttcggtggcccatcagggcaaggttggggtggttggtctggctttggtggcatatcgggattgggctgcggtggctggtcaggctttatcggcccattaggtataggttgtggtggttggttagggattgatggcccatttggattgggttgtgttgattggtccggcaccgaaggcgcataagaattgggtgacccatcaggtttaggcattggaagcatatcaggcttcggtggcccattaggaatgggttgtggtggttggtcaggctttggtggaacattaggattaggcagtggtggcccatcagatataggttgaggtggctggtcaggtcttgatggctcataagtattgggcaacccatcaggtttaggcatcggtggcatatcaggctttggcggcccattaggattgggttgtggtggttgattaggatttggcaatggtggcccatcaggtttaggttgtggtggctgatcaggacatggttgtaccgggggaatgggtggcccatcgggtttaggcatcggtggcacatcgggcttattcatcggtggcacatcaggattgggcagtggtggaacaccgggtgtgggctgcaggggaggctgatttggatttggcacaacatcaggtgttggcagcagcggtggcggctgatcaggctttgggtaatcgtagggtggaggcggcggcgcgcgcggccggagggtggtgcggccggcgacggcggctccccggtggcggcgcgcgggctcagggcgccgcgagctcgccggcctcctcgtccccctcgtgcggtcggtgatggcggacgagcgacgagaagcaggcggtggagatgaggaagggagaggaagggagagagagagaggaggctgacgtggtctccatgacatatggggcacacgtgggtcccacgctgagtcagccaccacgtg

SEQ ID NO: 39176 - DNA, 243 bp, Oryza sativa
  Clone ID: PAT_MRT4530_42741C.1
atgtcgaggccactatactcgatagctgttgctgtttgcatagtttttgtggttatgtcgaccatcccatcatgctatggagatgaggagacattcaccgatgaagtaccacactgcaagattgtagcatgcaccaacaaatgcagaacccatcaccatccgaaatacactgcgcggtgtattcacaacaccaaccccgagcagtgttgctgcaaaaaggatgacgcccgcgtgaccaaataa

SEQ ID NO: 39177 - DNA, 741 bp, Oryza sativa
  Clone ID: PAT_MRT4530_42742C.1
ggcaaggggaggcggagaaaaacacaaggctctcaaggagagagagaaaaccctagctagctaggcgccgtcgcaaccttgctcccgtccgtccgtacgtcggaacgcagctatggcggctgtggcgctgcgctctctcgcaaggaaggccatgcccgccccggccaccctccgccgggcgccgccgccatcgcgctccctccaccgccacagcctcgaggataagctgcgtggcacgacatctcccaagactacagctcctactgatcaaggtcgagtcagttattttgaagaaaatcctgagctttttgctgaattggtgaaacgagatgcagctcggaggatgttcaccaggttggtgctggcgggtgctgcttcagcgtacgctggtgcccttttcgttgtgtcgtctatgcgcgatagcgtgaaggaagagcttcgcaaaaacatctacgactaggagctctatcgccagctggtggctacatatttctgtctctgtgttatctatgactctgccctgcttatcatggcttgtttaatgtaacatggcatttcctactaatcatcgatgtgtaacgtaccatcgtactatagttgcactctataatagtttgtgatggttggttggtagtaacgccgttacttcatggtatttttggatagactggtgaatagccaatacggtttctatagttttgctctgtgatcagtttagtccctaaaaaaaaaaaaaaaaaa

SEQ ID NO: 39178 - DNA, 1329 bp, Oryza sativa
  Clone ID: PAT_MRT4530_42743C.1
atgtgtgtcgactaccgtgctctcaacgaggtcaccatcaagaacaagtactcgctaccccgcatctatgacctgtttgatcaattgaagggtgccacagtgtttctccaagatcgacctacgatccgggtatcaccagctacgaattcgcgaggaagatatccccaagacagccttcaccacccgataagggaacatcagttgtatgcagagttcagtaaatgtgagttttggttgtcaaaagtgaagtttttggaccacgttatctttccacaaggagtggcagtggaccccgccacggtcgaagcagtcaccaagtggaggcagcccatcacgcagatccatagtatccttgggctggcagggttttaccgccggttcatcgaaaatttcttaaagatcgcttggcccatgacccagttgttgaaaaaggaagaaaaattcatgtggaccctgcaatgtttattgcgacgcgtcccgtcagggtttgggttgcgtcctaatgcaggaaaggcatgtggtggcctacgcctcgcgacaactgcgactgcacgatggcaactaccccacccacaacctcgaattggccgccatattgcatgctctgaaaatatggcagcattatctcatcgggaaccgatatttttaaggagaaaacacacccggcatgcaaggaaacacacctccggccaatcagatgcaagcacatggattggagggcccacaagtcaggtgaaaccgcatggaatgggtcataactgtcataagcaccatcagggcccaccagtcagtgtccctgccaaaggagaggccaggaggtggggcccgtggtttggccgaaccaggggttcggctgaaccgccactggcacctttgatcctggccttccacgtgtacgctgtggatgacatcccaatgacggttgtgagcgttatacctgaagaaaccgtcatgcacacttgtcaagagaagagaagagatgctctttggatgcttaagcatctccacattcccaggggacatggaaaggttgaatcttcacatcatccaccaaggctctctgacaaccttggaggtgaagcctctgctactagatcggatccgagaggcaaaaaagaccgacccagacatgaaggaattgcagaagaacatgagaagagggaaagtgtgtggcttcatggaagacgaacatggcaccgtttggaatggcaaacaattatgtgtcccaaagacccgaagatcaaaaagctcatcctgctggaagcacacaagagccaatactccatccacccggggcagcaccaagatgtacctagacctaaaggctaa

SEQ ID NO: 39179 - DNA, 622 bp, Oryza sativa
  Clone ID: PAT_MRT4530_42744C.1
cagggaacatcagttgtatgcagagttcagtaaatgtgagttttggttgtcaaaagtgaagtttttggaccacgttatctttccacaaggagtggcagtggaccccgccacggtcgaagcagtcaccaagtggaggcagcccatcacgcagatccatagtatccttgggctggcagggttttaccgccggttcatcgaaaatttcttaaagatcgcttggcccatgacccagttgttgaaaaaggaagaaaaattcatgtggaccctgcaatgtgagaaggcatttcaattgctcaaaacgaagctggcatcttccccggtcttcgttctgctagatgttaacaaagactttcaggtttattgcgacgcgtcccgtcagggtttgggttgcgtcctaatgcaggaaaggcatgtggtggcctacgcctcgcgacaactgcgactgcacgatggcaactaccccacccacaacctcgaattggccgccatattgcatgctctgaaaatatggcagcattatctcatcgggaaccggtgcgaagtttacaccgaccacaagagcttgaagtacatcttcacccagccagacctgaatctccgacaaagaagatggttgctgacg

SEQ ID NO: 39180 - DNA, 2559 bp, Oryza sativa
  Clone ID: PAT_MRT4530_42745C.1
atgaagtacaggaagggggtcgccggcgagtccaacgatgacgacggctcgacgaaacgaggtcgtgacgctacaccgagcatccaggtggagatcgctgagtaccatggaggcggcggcggcggaggaggtcttggcaacgggggcggtggctcggcgtcgttcttcgagccgtggcgggaggccacgccgggaagcgggagcggacacgggagctcgggcaggggcggcggcgggcgcgagccgccggagaagcggctcacgctgttctccctccgcctcgccgtgctcgagaaggcggcgagcgggctcgggatgctcgacttcatgtgggcgacggtggtgctcctcggcggcttcgccagcgcgctcaaaatcaccgacttctggtgcgtcaccgtcatcctcgtcggcgagggcgcgcgcgtcttcggccgcagccacgagctggagtggcagcaccactccacgctcacctccaccgccggcagcgcgctgcgctccagctcacggctcttccgccgcctcgtgcacgcgctcgacgacccggccgccgccaccgtcaccggcggcgctcgcggccaggacgcgcgcgacagggcggcgcagttccagcgacagatcgtcgccttcatgaagcagcgcgcctggcacgcacccgacgtgtcgctgctcccttacaccggctgggtcttcgtctccaagaagatcgggaggctcctcaactggctgcaggtgctctccgccttcacctgcgtcgcgctctccgtgatgcggctatggcggcatgatttcggcgacgagcccaacaagcggccggcgctgctgctcttctacacgttggcgttgatcgaggcgctcctcttcctgctcgagaaggcgtactggacatggaagatctccgtgcggaagctgctcgagcaggtgagccgcgagtgcgagctcggtgcgtatggccacgtctcgctcacgcgcttcttctacgacgcctactcgcgctgcatcaacgggagcatcttcgacggcatcaagatggacctcgtcaccttcgccgaggagctcatcctgtccgagttcctagacgagcagctcatcggcgtgcgcatcctgcagcagttcgccgacgccaagggctccgcgcgcgacacgctgcgcaaggtcggcacgagcgcgcgctccatcgagcggctcgtcgagatgctcaactggaagcggcccgaggaggaggaggtgcgctggtgcgcggcccaggtggtgtccaagctcgccggcaagcgccagaacgcgctccgcgtgtcgggcatccccggcgccatcgagtccgtcatgtccctgctctacgccggctggagcgcgcccgtgtcggcgacgccgcacgacgtctcgccggcggcgcggaggagctacgaccacccgcagttcaaccttctcggcctgctcatcctcaagaggctcgccagggaccacgacaactgcggcaagatcggcaacacgcgtggcctcctcgccaagatcatcgagttcacgcacgcgtcgccggctctgctccgcaacacgctggcgccggagtcgcaggtgcgcgccgtgaagctcgcgctgaaggtcgtcaagattctggtgtccacgacgggcagcaccggcaagatgctccggcggggggtcgccgagaacgtgttcacggtgagcagcctgcgcgtcgtcctgcagcacgggcagcagcacagggctctgcagaagctggccacggacatcctgtcgggcctggccatggacgacaagggcaagcaggtgatcgtgggcaccggcggggtggtcaagcagctcctatcgatattcgtggatgccgagacagagctcggcggcgaggccggcgaggcgctggcgatgctggcgctggagagcgaggcgagctgcgcggcgatcctcaaacgggacgacgtgctcgaccacctcgtgtcggcgctcgagggcgacggcggggcgcgtcgtctgaacgcggcgagggtgctgcgcaacctgtgcgcgtacgccggcgagaagcatcgaccgcgcctctccgcggtgatcaaagcgatgcctgtggtactgaaggccaccatgaccggcagcgacaagatcctcgaggtgtccgtcggcctgacgacgcagatctgcaagttcatcgacggcgatcggttcgccgacgagctgcgcggcgccggcatcgacgagagagcctacgtggagcggctggcgagcatcctgcgggagcacaggtacccggtgatcagggtgccacggatgcggcggttcatcgtgcagcaggtcatctggctcatgacctcgtcctcctccgccgatggcggcggcggcggcggcggcggcgcgaactacgtatcgcttctccgggaggccgggatggagcggctgctggagtccatcgccgacaccacgtcggagctggagtgctaccacgtgttctccggcagcgtgggcatcagcaagcaccgggagagcttctcggctgccgtcgacgccgcgctggagctgctcggcggcgatggccggagctcgagctga

SEQ ID NO: 39181 - DNA, 153 bp, Oryza sativa
  Clone ID: PAT_MRT4530_42746C.1
atggccgtggacaagaccaagcgcatgtgtgtcgactaccgtgctctcaacgaggtcaccatcaagaacaagtactcgctaccccgcatctatgacctgtttgatcaattgaagggtgccacagtgtttctccaagatcgacctacgatccgg

SEQ ID NO: 39182 - DNA, 344 bp, Oryza sativa
  unsure (1)..(344): unsure at all n locations
  Clone ID: PAT_MRT4530_42747C.1
nctcctcctccgtgcccaccacctgttcgacggatcgacgtactcgccaccgcagccatgatccatctgctcttcacgctgctggcgcggngcgcgctggtgctcgtgctgctcttccgcacgncgttccgacgnctcgcgntgctcgccatcgaccgcgccaagggagcgcggccccgtcatggtcaagacgntcgtcgncaccatgctcgtcgtgctgggctccagcggctacagcatcgacaagatccggcgncgngtcggggatctcggccagtcacgcccaccgaccaggtgctcgncagccgccacntcctcgaggcatccctcatgggtactctctg

SEQ ID NO: 39183 - DNA, 509 bp, Oryza sativa
  Clone ID: PAT_MRT4530_42748C.1
acacgcgcacaggcacacaactagtttattaatccatccatcgagcgatcgatcacacaataattagtacactcacacggtgatcagtgatcgatgatgatatatatgatatgatcatcagaaaagaaatcacacctcgctgcactagaaaaatgtctttgatatataataagctataggtacaatatataacaatatatagatacataatatttatatatgctctctctctctctctcctaccacgccgtacgtccttttaattctttttttcctctctcttgtttcagatcgacacaacaactcgctcgaccactgcactataattcgatcgatcaacaccatcatcgtcgatcgatcgatcaacggctcagatcgatcgacggttagatcttgacctagtgtctagagcttgctcacatggccagctcagctagctattgtgtcgtcgtcgtcgtcttgtactctcgctggaaccctaactagtaattaattattgatcacgtacg

SEQ ID NO: 39184 - DNA, 221 bp, Oryza sativa
  Clone ID: PAT_MRT4530_42749C.1
gggctggtaaatttctgcagctaaaaaacagagaagaaataaaatacttcctccagtgaaaaattacagctctccatcactaacattttctcattttatagtttattttcgtttgtccatagcaaatttagtttacattcttctgtcagccaaagtcttcagtgaatcacggcttcatgtcgctgtacatccttgttcaacatttataagcaaaggggttg

SEQ ID NO: 39185 - DNA, 511 bp, Oryza sativa
  Clone ID: PAT_MRT4530_4274C.1
gctttttttttttttttttttttttttttttttatatttgtttttttttttttttgttttttttttatttttttttaaagtttttttttattttttttattttgtttggggggggaaagcttgttagaaattttattgtaaaagaaaatcggaaaacagggggatttcttttggggggacccccaccgagtttggattaaaagagccccaaaagaaggagttaaaaaagcacggcccagggaaaaaaaaaaatagaatttttggggaacaaccattttttcaaaaaggaggggccttttttgggggggccccaaatagaaaattttattaaaaaagggggacaaaaagggagaccccaacccccacccggaaaaaaaaaaaaaaggcccaaccccaaggaagggcccccagctttttttggtttccaggggggaaaaaaaaaaaaaaaacatctgcagggtgtggcgaaaaccccttttatcagaaaaaagccccttaaaatttttagggg

SEQ ID NO: 39186 - DNA, 423 bp, Oryza sativa
  Clone ID: PAT_MRT4530_42750C.1
atttgctccttttgtatgcatctgatgtggaatcacacaatagtggagttctctttcagtttattaatcatggtggtaaaccatatatagttttcaccagtgtacaatatagtgtgcaattcatcagtccaattgtatggccagtagctcatgtgtagctttaggggcaaatagtaaagtcagaatatataactagacatgcatgcagtgttgctccagtatatttcagagcttatatgtactgaacttttgtgcaatttagttatgatgatctgatctttttgtatattaccagctgcaatttttcgatatgagctttgtataatcttatgcacatattgctcagattatctttttgcacatatttgctttggatattcttttggatatgccagctgcttagttttatttggttagcagccc

SEQ ID NO: 39187 - DNA, 717 bp, Oryza sativa
  Clone ID: PAT_MRT4530_42751C.1
tgcgctcgctgatcgatcccggattggattggcttggttaaattaatcccagcagcacgcgagatcgagaggatcaaacctaccgatacaccataaaaaaacacaaaggatatcaagatcgatggagcttgatcgagcttctcctaaggagaggagaaaactcaaactgctcgtgtgagacagtgacagagtgagagtgagagtgtatcactgtacacaaggatggaagaaaaaaaaaactttagcctgcacattgcactcacactgcacttcccgggaaggagtcaagaagaagagagaagctgaagaacagtgctactaggaacagtagctgcagataaaaacgatgggagtaatgtctaatccgtctgccagttcaatgcaagcgaaggagagagcaaagaaagctgttgcttcagcagctgcaagtacccatggtccatggccttaactctgatttgatcaaaagctttctcctgctcaaagtgagtgtgtgtgtgtgcgcgcgcgcgcatgttgctactatggcggcgccggtgcatggctgccaaatgcatgtggctgctacactggttgcctgtaacctgtagtagtgagctactgccattgttgtagcctttgcaactttgcattgtattttcttgagtgtgtgtgagagagatggataattcagacagagtttgtagggcccgcggccccaaaaaaaaaaaaaaaaaa

SEQ ID NO: 39188 - DNA, 372 bp, Oryza sativa
  Clone ID: PAT_MRT4530_42752C.1
atggcgaggagagggccggcggcgatcccaatctatgaggtggagcctctcctcctcttgttcaacctcttcaccctcctcggcaccattggcagccgcgacaactttgtcgtcgatcagccggctactggcctcgacaaggccgtcatcgccttctccatcatcagcgagatcgtcaccggcaaggttgccctcacgcagctcaacatcgagaccagcatccccgtcactgagattgagtcgctcgtcctcttcaacgtgtcctccaccatcaccacgccggtcaccggccgccactcccccatctcccattggccgcctctcccacgctctccggctggccacgttggaagaaaagagaagaaagaatag

SEQ ID NO: 39189 - DNA, 183 bp, Oryza sativa
  Clone ID: PAT_MRT4530_42753C.1
gcacgaggcgccgcccgccctgaccgacgacgaaccggccgccgcccggcgagggagatgaagacggtgagcctcggcgccgccaggccttcgtctgtcaagttccgcatgccgacgagggataacctggtgccgatacgcgtcgacgtcgaggtggacggccagcgctacagggacgccttc

SEQ ID NO: 39190 - DNA, 1179 bp, Oryza sativa
  Clone ID: PAT_MRT4530_42754C.1
cccgcgtccggtcggagagccgagagcgtctcgccgcctaccgctcgctcatttgggcagaaaccctagccctaggcgagcccctaaaccccaacctcgcccgcgatttcctccccgagggcgtcgaggggaggtaggttggcgccatggatgcgatgaggaagcaactcgacgtgctcatgggggcaaaccgcaacggcgacgtgcgggaggtcagccgcaagtactacgaccgcgacgtctgccgcctcttcctcgccggcctctgcccccacgacctcttccagctcacgaaaatggatctcgggccttgccccaaagttcattcgctgcagctacggaaggattatgaagaagtaaaggcaaaaggaacagaaaattatgatagggaactcgaggaaatgatagacaggctcatcgtggagtgcgagaggaaaattcagagggcgctgaagcgtcttgctgatgaggatgccaaggctgctattgcaatatctgtttctgaggttactcagacagatgaggtgttgcagttgtcaaaggagatcaaggaaaaaatgaaagaagttgatacctatgattttgaagggaaaactgatgataaaatcaagaccatggaagtggtggaagaattaagatctaaaagggctgacatgcaggctacccttctgcttgatgcctttaacaaggacagagcttcattacctcagcctactccaacacctcaaatggcatcagtaccagcacctgctccccctgatgctcgcactcaagaaatgatcaacgaaaagataaagaaagctgaagagcttggtgaacaagggatggtagatgaagcacagaaagttatggaagaagcagaggctttgaaaaagttggcagcacggagggaaccaacttcggatcctactaaatatactgctgctgatgttcgaattactgatcactagttgcgtctctgtgacatatgtggagcatttctaagtgtctacgacaatgatcgacgccttgctgaccattttggaggaaagctacatttgggatacatgctgattcgtgagaaactgaaagaactacaggaggagagaagtaaaagaaggaaggcacctgaagatgacaggcgatcaagagaatacagcaaggaccgcaatggtcaggcatccagggatagagattcag

SEQ ID NO: 39191 - DNA, 501 bp, Oryza sativa
  Clone ID: PAT_MRT4530_42755C.1
cccttgcccccttccttaacctgggttcctttaattcggccgcccttggtttttttttttaccacaaaaccattaaaccttattctttttatggttcacccctctaaaaaacgagaaggtccaacacaagcaaattctgttggaactgcatctcggacaacatgggagaatcactttgggattttaaacaggccctttccacatggtttggaaaccaccattgcagcaatagtggtttcccttatacatacactctgggacacatgacaaatttattaactcttccaagaaagggaaacaaatatttcctcacactcttcatttcccccagttggcgttacggattcatcattcgtttctggacctcgccaagtttttttggaccctcaatgattgcttaaacggagaaaaaataaattacgtgctgacatttttcacctgcaaggattttgacttaaactttaagtgatgcaagtttcgactgcttcttctaggacttga

SEQ ID NO: 39192 - DNA, 860 bp, Oryza sativa
  Clone ID: PAT_MRT4530_42756C.1
atgaggaagcaactcgacgtgctcatgggggcaaaccgcaacggcgacgtgcgggaggtcagccgcaagtactacgaccgcgacgtctgccgcctcttcctcgccggcctctgcccccacgacctcttccagctcacgaaaatggatctcgggccttgccccaaagttcattcgctgcagctacggaaggagtatcctttgacttatggaacacttcatctttctccttttaaaatattccgcactctactttatgaagaagtaaaggcaaaaggaacagaaaattatgatagggaactcgaggaaatgatagacaggctcatcgtggagtgcgagaggaaaattcagagggcgctgaagcgtcttgctgatgaggatgccaaggctgctattgcaatatctgtttctgaggttactcagacagatgaggtgttgcagttgtcaaaggagatcaaggaaaaaatgaaagaagttgatacctatggtaacgatatttaaggaaacactgagggcaaaattcgggctactgaagaggttgacaagctcaaggaacagagggctgaagagcaggcaaagcatctacttgaagcttttaataaggaccgtgtctcactaatgacttcactccaaactgctaatcaatcaattccaccaccacctgttgctgctgctccagatgcacgcacacaagaaatgattgatgaaaaactcaaaaaggcagaagaactaggtgagaatggaatgatcgatgaagctcagaaacttttggatgaagcagaagctctaaagaaggtgatcgaccttggcttttaattttgttggtgcaactgattagaaatttaggaataaatgctctatgg

SEQ ID NO: 39193 - DNA, 288 bp, Oryza sativa
  Clone ID: PAT_MRT4530_42757C.1
atgggccgacgtgaacgccgccgatggaggcacccgcctgtcccccatggggggcagccagagccagaccgtggggaggtgatggagcccggggcctcacctgagccggtcgccggaggtgaggacgacgagcagccgtgggagggtggctgtcagaggcggatctcgccggaggagctcccggggcaggcggaggggagacggggaatgcggggagctcgagagcgcgtcggaagggattggggggaaaaaatggagggctcaaaccgcggaacgatcatgtgctag

SEQ ID NO: 39194 - DNA, 2205 bp, Oryza sativa
  Clone ID: PAT_MRT4530_42758C.1
gagcctacggcccacatggtcttgcaagaggcccatccgaataaaacaaccggacgtcgtcttccccatcctggttgggttggagtcggagagccgagagcgtctcgccgcctaccgctcgctcatttgggcagaaaccctagccctaggcgagcccctaaaccccaacctcgcccgcgatttcctccccgagggcgtcgaggggaggtaggttggcgccatggatacggcacggtgtgtgggggtgtgcttagccgtcttcttcttcttcctccggcaccgccgcccaccaaaccaaccaaccaaccagccccgcctcgagccaagcaaaaccctagcaaaggggaggggcagcgccggcgggggcgacgggagattgatccttgagatggggacggaaccactccgggcaatgctcgggctactgaaagctcgacaagctaaacgaacacagggccgccaagcaggctaagatctacttgaagctgttattaaggagaggttctcactcgtcattgaagtgatgagtaagcagctcgacatgctcatgggggctgacggtaccggtgccgttcgagagatcagccgcaagtactacgaacacgacaaatgcggcctagaactcgccgacctctgcccgcacgatgtggtccagatcactatgatggatgtagaggcactaccgaagcttcattcgcggcaactgcgtgatgactatgaagaagaaaatgtcaactcacgttcagattactgatcaaaaattgcgcctatattacagatagggctcattttggaagtgtgaaaggaagtgacaggcgtctggtaaacgtcttgaggaggaagatttcaagtcggctatatgcaagatccgtgagtgattatcacacagacagaaggagtgattcaattgtccaaagatataaaggagtaagtgtaagagaatgatcattttgaggttcatggaaactgacagagcataatagcaacgattgccatagatagatcgaggaacgctcatgaaaagggctggaattacaaggcgaagcagcaacttgaagcgtttcaataagaagagaatcttaggtcggaaaaggccccagaatcgatgggagatcccatagttatgattcatgcggctaccgaaggtaacgctcccctaatgaccgtaacagagaatatgatcgatacgcgcgttgcgaccgtcaggatcgatgcagcacacaatggtcgggagtttgagcagtgaaccggatcgtttggtgtttcaattcagaggttcatgtgggatagatgcttatttcctgcttatgttcatattaactatcaccagttacgcttgtgttgcatatgtggagcatttatgtgtgtattctacattgtgctgcgcttggctgaccattaaggaggaaaactacatttgggatatatgctgattcgtgagaaactaaaagaactacaggaggagagaagtaaaagaaggaaggcacctgaagatgacaggcgatcaagagaatacagcaaggaccgcaatggtcaggcatccagggatagagattcagaaagaaaggacagagttgaacctcgagaaagcagaagagaccatgatcgtgatcgggataggcgccacgatagggaccgccgccatgatcgcgatcgggatagagattatgaccgttcgcgtggccatgattcaaggagaagggaacgttctcgatccagggagcgcaggcgccacgatagatactgaatctggtgctccatgatggctgattttggagtattctggtttttctacatgatacttgtggtcctccgagatattgtgtttgttgagcttttactgaagaactctggagcatggatatatgccgtcagactgtgctgtatgcatttgtttctgacctactatggttggccagcatatactactttatatcatacttatggtgtaccaaagacgattttgtgttaatcaaaactagtttttcccaacaaaaaaaaaaaaaaaaaaaacgataccatgacagagaaagcgtgacgaccgtcggcatcgacgctagacacatggtcgagggttttagcatgaaccggatcgtttggtgtttcaattcagagatgtacaagctgtccgtgacagatgagtcttacttcaaagagactttatcactgacatgtgggacccataaaggtttgccagaatgctga

SEQ ID NO: 39195 - DNA, 675 bp, Oryza sativa
  Clone ID: PAT_MRT4530_42759C.1
atggagatcatcgaggtggtcgctggccaggtcgccgtcgcactgtcgcacgcgactctgctggaggggtcgcgggcgatgcgtgaggagaccctggtgccagagcagaggctcgtcatcgacaccatggcacgcacggacaacgttgtctccatgctcatcaacgacatcatggagatgtcggtcgacaaccgcgagcgcttgccgctcgagatgcggccgttccacctgcacgccatgataagggacaccgcctgcgtcgccaggtgcctgattggccgcaccgagctagggcatgtcacgctccgggtgcactccgccactgacgatgtgctggagggcagccgggactaccacgtgagctgtatatgtgggcaatccacacgtcgaccacacggtgaggacgaggatagggaagcgagggaagaggttctcaccacgggcacgacgcggcaagggaacaacgacggcgaccagcgacaaccttggcgtggtgacgacgaacggaggagggcgacagagatgaacggacgggcagcacttcatcttgacgggaacgacgaccggagggaggcgaggcgatggggcggcgttccaagagtcttcgggcagcgaggagacgtggtcgatgatgaaggtgacgagatgaagccgacagcagcgacggcgcagtga

SEQ ID NO: 39196 - DNA, 357 bp, Oryza sativa
  Clone ID: PAT_MRT4530_42760C.1
aacggacattggacgggtgctgtcgtagatccttcaaaaccatataattaaggcacggggtgaaaccttaatagatgtaaaccaaagccctgtttgaaaatgtgacgccctgcaatctgatacaggataactttacgaagaacgaggataccctgacggaatcaagctaacaggtggcaaagcaacggagacaatgactaccacacgaatgcctaagcggcctatcagtgctaaaacgtcctgcgccctactgagtagaaccaaccagcctgaagcgatatccatgtttgtcaagaccttcaggtcataagtgatgaccaccaggcagactttttgactggatagacataatctttg

SEQ ID NO: 39197 - DNA, 654 bp, Oryza sativa
  Clone ID: PAT_MRT4530_42761C.1
atgagcttgtttgggcggagctccaggagccagctgacgttcaggcccaagaagagctccccttccgggagcaagggcttgccgctgaagaagcacatcgacgccaccctgggcagcggaaacctgcgagaggcggtccgtctgccaattggagaagatctcaacgaatggctcgctgtcaacaccgtagacttcttcaaccaagtgaactttctgtacggaaccctgatggagttctgcacttcatctacctgcccgatcatgtctgccggaccaaagtacgagtacaggtgggctgatggaatgaaggtgaagaagccagttcaagtgtctgctccaaagtacgtggagtacctgatggattgggtggagagccagcttgatgatgaggccattttccctcaaaagattggggctcccttccctcaaaactttcgcgaggtgatcaggaccatcttcaagcggctcttcagggtgtactcccacatgtaccactcgcattttcagatgatcctcaagctcaaggaggaggcccatctcagcacttgcttcaagcactttgtgctcttcacttgggaattccatttgatcgacagggcagagctggctcctctcaacgagttgatcgagccgatagtgtttcggtatttttaa

SEQ ID NO: 39198 - DNA, 372 bp, Oryza sativa
  Clone ID: PAT_MRT4530_42762C.1
cgggctgcaggaattcggcacgaggctcggttttttttttttttttttttttttttttttttttttatttttttttttttgtcgggcaagatcattctggtggcaaacatcacaaaacatcctttttacaaagcacggtgagggatggtattctcacataacataagacatatttcagtatttttttaaaatcttaacagcatgcttacaggtaaccagggtaacactctaaaagttgatacagataagacgtaggtctatagatggtaaggtttccctatgagttcatgcgtgacaagtccaatactccaatagtacttatggctccaaagttcatcaaaaggtaaatcagaaaattccggtggtcattat

SEQ ID NO: 39199 - DNA, 285 bp, Oryza sativa
  Clone ID: PAT_MRT4530_42763C.1
atggctaagctcgtcgtcgtcctcaccttgctcgcgctgctcgcctccgttgcgtgccaaaccggcggctatggctacgattcgtcactggtctacaagaacgtgatgagccagcatgtgctgttcagatcggacgcggcgctgatgacggcggcggacaccatggggctcgtcctcgccagcgcctacttccccgggtggtggaacgccaagttcgcggaggcgaatttctcaatacctgtgaactacagacatgaactactaacggcgttttgcaagggttga

SEQ ID NO: 39200 - DNA, 299 bp, Oryza sativa
  Clone ID: PAT_MRT4530_42764C.1
gtgatggaggaggatgtccggctgggagccaacaagtggtctgagaggcagccgatcggcacggcgaggcatgtctccgactacattggctccagggcgccaccgtcggcgccgttgttcgagccagagtaacctatgtcatggtgtttctaccgcgcagggatcgcctaggtcatggcctactttctgttccttaacatcaacgttttcacggttatgtgagttaacaattaatcaattgagtgctactccgttactcttctttgacttgcactgttccctgaagattttaaaacgtt

SEQ ID NO: 39201 - DNA, 1674 bp, Oryza sativa
  Clone ID: PAT_MRT4530_42765C.1
atggcctgcaccaagggggtggttttcgacgtgaacctgctcgagaacagcacgctggaggacgggctcgccggctgggcggcggtcggcgagtgcacggcgctgtccgtgcacaatgaggagccggagaaggtgccgaccgagaccatcaacacggtggccgacgactacaagcccagcggccggtacatcctcgcggcgggccgcgccggcgaggaggacgggctgcgccgggcggtggccggcgcgctcaagccccgcgtcacgtaccgcgtggccgggtggatcagcctcggcgacggcgccgaggggagccacccggtgcgcgtcaacctccgcctcgacgacgacgacgagtgcgtcgtcgagggcggcgcggtgtgcgcccaggccggcaggtggacggagatcaagggcgcgttccggctcaaggcgagcccgtgcggcgcgacggtgttcgtccagggcgcgcccgacggcgtcgacgtgaaggtgatggatctccaaatcttcgccacggatcgcagggcacggttcaggaaactcaggaagaagactgacaaggtgcggaagcgggacgtcgttctcaagttcggtggggcggggagcatatcgggggcgtccgtacgcgtgatgcagatggacagcagcttcccgttcggggcgtgcatcaatggcggggtgatccagaacccggcgttcgtggacttcttcacgaagcacttcgactgggcggtgttcgagaacgagctcaagtggtactggacggaggcgcagcaggggcagctcaactacgccgacgccgacgcgctgctcgacttctgcgaccgctacggcaagccggtgcgcgggcactgcatcttctgggccgtcgacaacgtggtgcagcagtggatcaaggggctcgaccacgaccagctgacggccgccgtgcagggccgcctcaccggcctcctcacccgctacgccggcaggttcccgcactacgacgtcaacaacgagatgctccacggcagcttctaccaggaccgcctcggcgacgacatcaacgccttcatgttccgggagacggcgcgcctcgacccgggcgccacgctcttcgtcaacgactacaacgtcgagggcggcaacgaccccaacgccacgccggagaagtacatcgagcagatcaccgcgctgcagcagaagggcgcggccgtcggcggcatcggcctccagggccacgtcaccaaccccgtcggggaggtcatctgcgacgcgctcgacaagctcgccaccaccgacctccccgtctggctcaccgagctcgacgtctgcgagtctgacgtcgacctccgcgccgacgacctcgaggtggtgctccgggaggcgtacgcgcacccggccgtcgagggcgtcatgttctggggtttcatgcagggccacatgtggcgccaggacgcctgcctcgtcaactccgacggcaccgtcaacgacgccggcgagaggttcatagatctccggcgggagtggacgtcgcacgcgcgcggccacatcgacggcgacggccacttcaagttcaggggcttccacggcacgtacgtcgtgcagctcgcgacggcgacggggaagatgcacaagacgttcaccgtggagaagggggacacccctcttgtgctggatatggacgtctga

SEQ ID NO: 39202 - DNA, 376 bp, Oryza sativa
  Clone ID: PAT_MRT4530_42766C.1
atgagtgggggaacagagggacaaaccgcggaaccgggggatggggcagctcgccgagtaaaaccccggcgtcaaatgcgcccggggggggcccccccagcaccagcgcctcggcgaggaggagcaggagcaggagcagcggccgtctccctctcccgccgacagccatggcgcaggctcaaactccaccgaccgacgaaccagcaagagaagcaagcagaaggaaccaaagacgataaggtaaccaatcaatctatatcacccgactccgtcggatccagcgtcagcgtcgtgtgccctccgagggccgtggtggatggacgaacgttcgtccgtagtcttggcgggccggcgttgggttgtgcgccgtgcgcag

SEQ ID NO: 39203 - DNA, 453 bp, Oryza sativa
  Clone ID: PAT_MRT4530_42767C.1
atggccggcacttcttcatcctccaacacctcaaccgatggcggcgaacgcgcgctggtggatgcggcggtggtggcagccgcgggtggatccagcggcggcggctccctccgctccctctcgtctccctcccacggcagatccggcgccagtggcgctgttatcagtagccgcaagtggatccggcagcggtggtggagactacgggctgatccggcggcggcagctccctctgtcccttctcgcttccctcccacaacagatccggcggtggtggcaacgtcagcggcagccacaggtggatccggcggcggtggctccctctgtctcttctcgcctccctcccacagcagattcggtggtggcggcaatgtcagcggcagccacgagtggatctggtggcggccgagggtggatccagtggcggccgcgggggtggatccgttcccgtag

SEQ ID NO: 39204 - DNA, 352 bp, Oryza sativa
  Clone ID: PAT_MRT4530_42768C.1
ggtgaatgagacagttctgttaacggacgactgatgaagcctataactggtgggaaagaaacacttgggcaacaatatgacaacacaaagctagggaaatagcggagtggcaatagcgacaggggaagaggatcttaaatggagtttaggcaacatggcctacaagcagaccattgggactgaccgcaggcgctggttattgcagcggacgtggtgttccttgccatgcagatgccacacagcttgatggatttatgcaccatgaaaggaaaaggtttggatactgcagatacggtggttgaggaatacacgtggatgagacgtttggagaaccaaccatatgaaaccccca

SEQ ID NO: 39205 - DNA, 1768 bp, Oryza sativa
  Clone ID: PAT_MRT4530_42769C.1
ggcaaaaccagagcccgctcacctgctgagaaacaccgcgcagaggcagagacaaacaacgtacggccgtgtagaactgtagatcgtatcgtccgagtcccccaagagtttcaggccatcaacccgtagtttggcgctcccttggttttacctgcaagacaaaagagctagcgaccgaatcgttcgacggcagaggcgtcatgggggcgccgagcagggaggatgaggaggcgaagaagatggaggccggcggcgacaccgtcggccagaagctcgacgccggggctctcttcgtccttcagtccaaagggtcatggctgcactgcgggtaccacctgacgacgtccatcgtggcgccaccgctgctgagcctgccgttcgcgttcgcgtcgctggggtgggcggcggggctcatctgcctcgtcatcggcgccgccgtgaccttctactcgtacaacctcatctccctcgtcctcgagcaccacgcgcagcaaggacgccgccagctccgcttcagggacatggccaccgatattttagggcctggatggggacgcttctacatcgggccgatccagttcctggtctgcttcggggcagtcgtcgcgtgcactctcctagccggtcagagcatgaaggctatctacctgattgccaacccgggcggcacgatcaagctgtacgtgttcgtggcaatcttcggcgtcttcatgatgatcctggcgcagatgccgtcgttccactctctccgccacgttaacctcatctccctcgtgctgtgcctcgcctacagcttctgcgccgtcgccgcctgcatctaccttggaagctcaaagggagcgcccgagaaggactactcgatcgccggcgccaacacccgtgaccgcgtgttcggcgtgttcaacgccatcgccgtcatcgccacgacgtacggcaatggaatcatccccgagatacaggcgacggtggcggcgccggtgacggggaagatgttcaaggggctgtgcctgtgctacgccgtggtggtgacgacgttcttcagcgtggccatctcggggtactgggcgttcggcaaccagtcgcagggcactctcctgagcaacttcatggtgggcggcagggccgtcatccctgagtggctgctgctcatcatcgagctcttcacgctgctgcagctgtcggcggtggccgtggtgtacctgcagccgaccaacgaggtcctggagggcctcctgtccgaccccaaggccgggcagtacgccgcgaggaacgtcgcgccgcgggtgctctcccgcaccgccgccgtcgcgctgggcaccaccatcgcggccatggtgcccttcttcggcgacatgaacgcgctcatcggcgcattcggcttcctcccgctcgacttcgctgtgccggcggtgttctacaacgtgacgttcaagccgtccaagaagggcgccgtgttctggctcaacaccaccatcgccgtcgtgttctccgcgctcgctgtcgtcgcgtcagtcgccgcggtccggcagatcattctggacgccaatagctataaactgttcgcgaacgtgtgatgttattatgctttaactcttgacaaaggaacatcaatgcaggaagaagatttttttttccttttctttttcttttttttaaaaaaaaaaaaaaaaaaaattatgtttatattatatttattaatcatttattagcaactaaaaaaaaaaaaaaaaaaactcgagactagttctctccctcgtgccgattcctg

SEQ ID NO: 39206 - DNA, 429 bp, Oryza sativa
  unsure (1)..(429): unsure at all n locations
  Clone ID: PAT_MRT4530_4276C.1
cagcctgctgcttcggacgggcgggtcctctgccgccgnctcatcagctcgccgtgcggaggaacaaaagagcgtggtggtggccatggccgacctgctgggcgactttggcgcgcgcgaccccttcccggaagaagatcnanaacnacttcngccaaaanggtgctgggcaacctccacaccctccacaacatcctcatccccacgctctccgtgctctccntcngcgcgcctccccctcgnagcctaaccccntcncccgtcnacactgccgacgccccgcccgcctcctccacaaaggtggttngctggcgcctcctccgaccnanaccnacgggnatgncnttcngcacttgccttntngaaangtccngggancaaaaccngccggncaccnactncttnccccaggatctncgccccnggttg

SEQ ID NO: 39207 - DNA, 1608 bp, Oryza sativa
  Clone ID: PAT_MRT4530_42770C.1
atgcgctgtgctttcctccacaacgacaaagaagctcctgtcatcataagtgacaagctttctgaagacaagactcaacgtcttctatctatgttagaaaagcatcgtgccattcttggctattccctccaggatctcagagggattaatcccgcactttgcactcatcgtatccctattaagcctgagaacatgattaaggacattatggaagtcttcatggatgacttctctgtctatggaaagaccttcgttgattatgtctccaagtgggttgaggctatgccgtgcagtgccacggatgcgaatcatgctaagaagatgttcatagaaatcatcttcccaaggtttggtaccccaaggatggtcataagtgacggaggatcacacttcatcgacaaaaccttccgagacctcctacgagacatgggagccaaacacaatgttgctataccttaccatccacagaccagcagtcaagcagaaacatcgaacaaacaaatcatgaacattctgcagaagacgatcgtctacgggaagtcatgccgactccccgtagaacttgagcacagagcctactgggccatcagaaattggaacatggattttgagggagtaggagaatggaggaaaatgcagttagctgaactagaagaatggagagaaaaagcatatcacaactccaagatatacaaagagcggacaaagcgctggcatgataaacgaataaagaacaagaaattcaagccaggagacaaggtactgatgttcaactccagggttaagctattcggccatagaaaactacaaagcaaatgggaaggaccgttcgacgtcatcgacacctcttcgcacgaagcaatcacactccgcgacgactcaggggatgaggtgctccacaagtataccacacccaccgccactccatccaccactaagggggactgtttttgcaattggggagtgcgaagtcccggcggtgggtatggcaatagcttactctggcctttgacgacatcggagaaggagggggcagcagagtcccgtagccctccacctatgaaggtgaagcgtcattcgatgcctcctcctatcatgagggcgcccgggcaattcgaagataatgaagtaaaatcgcaggagccctcggtccataagctcgctgctcaagtgaacaaacttcgcaaggagaatattgagcttagggacagcaacgcggagctagaggtagagcttgctgagcttaggaataatgtagatacccttagtcgcgaccggcaaagtctgaccccgactccactacatattgtcgggtcttgggtttccttgttccggaaggggcgacggcagtggcaaggaagggcgatggcagcggtggggtggacggcggctggcagcggtggcgggcgatggtccggcggcgggctcttcgtctcccccgtggtggccggctgcggcaaagggcgacggcggccagatctgggggcgacggcagcagcggggaaggggcaacggctggctgcggtaaaggaggcggtcgtccgggggcacggcatcgacgacgaagactgcgatggcgatggcagaaggagccgccagcggcggtga

SEQ ID NO: 39208 - DNA, 692 bp, Oryza sativa
  unsure (1)..(692): unsure at all n locations
  Clone ID: PAT_MRT4530_42771C.1
ccggccgggaattcccaatctctattcctatcttgttgctctcttcctcctctagtcccaacacctccacctccccatacaccccatgtctcaagaaggagccgacctctctcaagatgtcgatgaaagcccatatcacaccgccgttgtcaccaccaataatctggtaaggtcgattaaagcagagaaatctaactctagctctagctccggcaagcctgtcgagacagacatcggtttaaaggtagcaagccctactatgtttgggttcaacacaaagatagagggaacgggaaagaacatggccgtcaagagagaggaaggagaaggtggtggtcgtcctggcgtcagcagtggtgtcagcacacgggataccaacggaaaaggcaagaacgctatggacatggagcacgcgttgcatatttggacggagagagaacggaggaagaagatgaagaacatgttcagcaccctacatggcctcctccccaagatcccaggcaagactgacaaggcctccattggttggggaggccattggctacatcaagacgttgngaggacgtcgtccagaagctggagaccatcaagaacggagcgcgtgcgcgcgcaccantggngcggcgggcgngcggcagccgccgtggcagccaacggcnggncggcgaggggtcctctcactctcactctca

SEQ ID NO: 39209 - DNA, 1053 bp, Oryza sativa
  Clone ID: PAT_MRT4530_42772C.1
atgtctcaagaaggagccgacctctctcaagatgtcgatgaaagcccatatcacaccgccgttgtcaccaccaataatctggtaaggtcgattaaagcagagaaatctaactctagctctagctccggcaagcctgtcgagacagacatcggtttaaaggtagcaagccctactatgtttgggttcaacacaaagatagagggaacgggaaagaacatggccgtcaagagagaggaaggagaaggtggtggtcgtcctggcgtcagcagtggtgtcagcacacgggataccaacggaaaaggcaagaacgctatggacatggagcacgcgttgcatatttggacggagagagagcggaggaagaagatgaagaacatgttcagcaccctacatggcctcctccccaagatcccaggcaaggttgcaaatgcaattgagatggtcgctttttccctgatgttcctggtgctgactgacaaggcctccattgttggggaggccattggctacatcaagacgttggaggacgtcgtccagaagctggagaccatcaagacggagcgcgtgcgcgcgcaccagtgggcggcggcggcggcagccgccgtggcagccaacggcggcggcgaggggtcctctcactctcactctcagccgccgcgccacgccaccgccgtcacagtcgccgtcgccgagcctgcgccggtggcggcggcggtgaacgcgcaggcgccgcagaagaaggcggcggcggcggcggcgccgacgctgcagacgtggtcggcgccgaacatcacgctgacgatggccggcgtggacgcgttcatcaacatgtgcctcccgcggcagagggcgtccttcaccacggtggcgttcgtcctggagaagcaccagatcgacgtcgtcacctccaccatctccgccgaccatgacaagagcttgttcagcgtccatgtccgcctcaacgaagcatcccttcagagcacagagggtctgacgcctgaagccaaatacaagctcgcagtgtcagagttgatggtcaggctcgccgaatga

SEQ ID NO: 39210 - DNA, 279 bp, Oryza sativa
  Clone ID: PAT_MRT4530_42773C.1
gcacagctcctctccgccgccatcattgccatcgcgtcgcccttcgccggccgccaacgccctcctcctctcccgcctccactgccggcctcgcaaagtgagagagagatgaggaagggagagaagatggtaaagagagaggaggctgacatggccatgttgacatatgggtcccttgtgggtcccatgctgactcagccgccacctcggtcaaaaccggagtcaaaaccaatgaaggggtgggcattcggtctttcggtcatttcggtctttgaaaag

SEQ ID NO: 39211 - DNA, 448 bp, Oryza sativa
  Clone ID: PAT_MRT4530_42774C.1
gattgatcaaacaaatggtgaggtgtgctatattgaaggatgcatctataaacatgcacgttctcattatttaatgcataaatgaacatcaggaatcacattcacaaaatcatcttgtctcacttacaatggccatatctacaatcattttagcatggatactttctacaacccaaaattgtttatcccaattcttacaattgtcctaaccatttttatccatttttcaaactgaccacacattgccatggtgagtctaaacaaatgtaacggcatattaattggataacaaatttcaaatttactaattagcaaaaattaaaaactccatatcatcatctatttcttgttcattgactcttaggctcaagaacaacaaatatgttttatgaaactatctcactaaacatgctacattagttgtacacctctaaacgtatctatacca

SEQ ID NO: 39212 - DNA, 268 bp, Oryza sativa
  Clone ID: PAT_MRT4530_42775C.1
gtcctatttactaagcaacaatgatgctggcttaactaagatgagttccaccaaacccatggttgttagaagcggctcttattaccctgctcttggtcgctttaccttgcgcaacatgacgcaaacggtggctgtcggcgtcatcaacaacacagacaagtagacccctgccggcgcctactcgaccaatgctgtcgacaagaagaaatgacccttattcaagtggtgctttccatatctgcatttgaaatatctacctcttttacta

SEQ ID NO: 39213 - DNA, 565 bp, Oryza sativa
  Clone ID: PAT_MRT4530_42776C.1
ggggaaaaaaaacctatattttaaaaccctgcaaaaatcttgccccaggggaaacatttacaaaaattttggggggcccgggcatttttttcccctagggccagggggatcgaagggggcgacccctccatgacccatcatccatgcctttttttaggggaaaataaaaataaaacgaccgggcgaaacccaccgaaatccaaaattaaagccgagcccaaaaaaaaaaaaacccaagagataaaattttgaaggcccgccccacagttaacaacagggggggggggcaaaaatgatttccaaggaacccccaataatgtaatttgggggaaaaaaaaaaaaaaaaaaaaggggggggtcttgcccctttaggcttggttgaaagaagaaccccttttggggacaaaaaactttttggcccaaaccccccccccgggggcgtttttaaaaaaaaaaacccccccgttggcgaaaaaggcccccggggggaacccccccaaagtcgccggggacccccccccctgggcaaaacttttaaagatggagggggccaccacccccccgg

SEQ ID NO: 39214 - DNA, 222 bp, Oryza sativa
  Clone ID: PAT_MRT4530_42777C.1
atgcatcgcctcctctcctcctcacgcacctcccatgagctgtctgacgtcgccgacatgaagctccggagtggcttcgtagagccggcggagagctcggactcgttggtggagatgtggaccgaagatggcgacggcgtccaggtttatccagatggtgccacttcccgacgtatagcgccgccactttccccaaggaagccgcaccaggacgtggtctag

SEQ ID NO: 39215 - DNA, 342 bp, Oryza sativa
  Clone ID: PAT_MRT4530_42778C.1
ggaagagcaagaataggttttgtattgtagttttgtcgaatgatgacaatgtgaccgggatttgacgggacatgtgaaattgcttggtgcactgacaccgggctgcgacgctgacggaaaatatttgggccccccctacaatgaaatttaatgatgaggtggttgaattggctaaggctggattttgcaagtcgtgcaaaaaaattgaattgctgggtcagggctaatatgggatgaccactcaccccagatttaccatggttagattgctggaattgcacctgggtgtgaagttaaatccgccctaatgctgatctgctcttggaactggaaaaaaaaaaa

SEQ ID NO: 39216 - DNA, 449 bp, Oryza sativa
  Clone ID: PAT_MRT4530_42779C.1
gccgcagcccccacaactcgccgccctcaccccctcagatcggcgccgccccgcgccccatcaaaccgccgccgccgctggcctccacctccacgagcgggcgccggcgtggctgtacatcacgtcgccgccgctgcctcagctcgccgccgtctccccccacagatcggcgccgacccggaccggacgcgccgctaccgccgccctccaccacaacgagcgggcgccggcggggctgtgcttgacgccgccgccgccccctcagctcgccgccgccgcacgcacgcacaagtgagagagagtttggttggtatcctcatccttgtcatctcctgtaaaagggacccgttacagtcaaattccagtcacgaatcagtaacaaagcatttgcaactaacggttgcggtcagtttccaatcacgaatcagtaacaatcgctgcaacgaaca

SEQ ID NO: 39217 - DNA, 749 bp, Oryza sativa
  Clone ID: PAT_MRT4530_4277C.1
agaagagcgagagagagagagagagagcttgtggaaccctaaccctaaccaggacggacaggaggagtagatccgttcgatccccatgtcgttcgccgctacaaggatgatggcggcagcccggcgcgccttccactccaaggccgcggaagacgtgcgtagacatctcgatgccatggaaaaggccaaccttgaaaggttgccacagctcttggatcccatcatccggcagcgagccgctcgagatgtccaccgcaatacccacaggatcaagatctatgctaatccttgcatagggaggccaccgcccgaagggcacatttggtatgatgtcgcctgggcaaaaaatcttggtctagttttttttgtcacctcattttttgggatgtacgatgttctattcgaggagactcaacagtctgaccaccatatgtcctcctcgttgccaatgccaccctcctaaattattctgtgtaaaatcatcgctgccgaccgattttagattatgaaataataatctccatgtcctgtggtcttactctatgaggaccttcttaattctagccttgtggtcttataatctattagtacctccttaatttaagccttgtggaagcacctacttaatttaagccttgtgggcttgatgtatcagcacctacttaatttaagcttttgtgggcttgatgtatcagcacctacttaatttaagccttgtgtgcttgatgatttaaagtaagtacatcctt

SEQ ID NO: 39218 - DNA, 1212 bp, Oryza sativa
  Clone ID: PAT_MRT4530_42780C.1
atggggagggcgccgtgttgcgacaagaaggggctcaagaaggggccgtggacgccggaggaggacaagctcctcgtcgactacatccaggccaacggccacggcagctggcgcctcctccccaagctcgcagggctgaaccggtgcggcaagagctgccggctgcggtggacgaactacctccggccggacatcaagcgcgggcccttcaccgccgaggagcagaagtccatcgtccagctccacggcatcgtcggcaacaagtggtccatgatcgcggcgcagctgcccggccggaccgacaacgagatcaagaactattggaacactcacctcaagaagcagctgcgccggatgggcctcgacgatccgccgcccgggccggcggcgggctgcccggcggcgcgtcacatggcgcagtgggagaccgcgcggctcgaggccgaggcgcgcctctccctcctctcctcctccggcgccgcggcgacgacgacgatcaccgccgccaccaccaccacctccgcctcgtcgtcctccaccaccgcggggcccgtcgccgccgccgcgacgtcacccgcggacgtgttcctccgcctctggaactccagcatcggggactccttccgcaagctagccgtggtggcggcggggtcgtcgtccccttcgcgggcggacgtcacgaaggacgctgtgaagcaggaggaggaggcggcgccggccggggacgactcgtcggcggcgtccaacgaggtggaggcggcgaccatggcggtggacgagtaccagatgttcctcgacttcgccggcgaggagctgggcctgttccacggccgtttacttttactgtcttatgagcatgtcgtgactatcccgacgtacggtggagtcatagaagatgggtatgttggtgttgcagtgcacgttcttgaagaccgtgaggcaggcaaagaaaaaggagtaaatgcaccggatagccggtggggccagcccgacgagaaaacgaatttattgccacgctcagataaaaggccaaaccagagcagcgaaaggtttgccacgacacctgcagcacaggagcagcctgttgcctgtggtggcttcatcgccaggaaagaacagaaatgggcagggcaagctcgtcgcccctacgctaatgattctcttctgggagatactattaaatgccgtgccattgtggtcctttggatatga

SEQ ID NO: 39219 - DNA, 334 bp, Oryza sativa
  Clone ID: PAT_MRT4530_42781C.1
aaaaaaggaaagacaactttttttttttttttttcccccaaggtttcacatggcacatttggggattttggggcttttttttaacttccgacccctttttctgttaaaactttttacaagacccccccagggggggtaagggtcctgggggccccatattccctgggggggatcccatttttagggggcccgttaaaagccaacaaagtttgggcttggcccaaattccgatcaaagtggagatccccaaactggtggagttgtacctgttgccctttggcctgaacaatgttaatgccctgatagggaaattgttgcccccccagcgcgggct

SEQ ID NO: 39220 - DNA, 230 bp, Oryza sativa
  Clone ID: PAT_MRT4530_42782C.1
tgagaaccgaccggaggaggcaacttgcaacaaagtcatgtacactagcatatgagcaagaaaaacagctaggtcctagctaccaggatggcaccaagaaataactgatgggactcgcattagaaaaagataaatgctagctatctggttttggacatcatgatagtaaaagagtcatgtacaagtatgatttttacattgctgtcattcaggtaaaaaaaaaaaaaaaa

SEQ ID NO: 39221 - DNA, 352 bp, Oryza sativa
  Clone ID: PAT_MRT4530_42783C.1
gggaggacaactttttttttttttttttcccccaagggttgacatggcacatttgggggtttcggggcttttttttaacttccgacccccttttctggtaaaactttttccaggacccccccagggggggtattggtcctgggggcccctttgtccctgggggggatcccttttttagggggcccgttaaaagccaacagagtttgggcttggcccaatttccgatcaagggggagatccccaacctggtggggttgtagttgttgccctttggcctgaacaatgttaatgccctgatagggagattgttgcccccccaggggggggtgttgccaaatttggttgtttttcc

SEQ ID NO: 39222 - DNA, 941 bp, Oryza sativa
  unsure (1)..(941): unsure at all n locations
  Clone ID: PAT_MRT4530_42784C.1
gcataggaataagcaatcagatccatctaattagatatgaagatttgaatttgtatcaaatgcacttagcagtatgaccgtttaatgagggcatcatttgtgctcaatccatttctcctatattacaaacagacggctacttacatgcacaacagattggtgcaaatcctctgcgtgtcagtgtcactatgtgagagaaattccagacaactctagtataatgtcactctgctgattaaaaataatgatgaatttgaagttttctgtattatttcacgtgttatttctaggagcatacaaaacagcacaattcttggtgctgaatttacattgccagacaagtttgcaattaataataggttccctaataatatatacatacttgaacatataaactcatatacacaagtagtgagatgtcgttgtgaaaccttattcccacattcaagtagggagttgggattgctcagattcaagcatctatgaggggcattatgaagaagattaccttttatcacaattatcaatcgcaacgcaatgggccaacccttatgcctttcttatgtgcaatggcccgcaattcctctgacaacaagctgtcctcgatgattacctgaattaatcgagtggcttcctgtgcaaataattcaacatcggctgctgcaatgctaaggcgcgagtgatgtcgatgaactccccctgaccggcccagtatctgagcacgataccaaagtccccaaatgagggccgcacccccgcctctgactccttttaattttggnngganaaaactggcccaccccctgtcctgaatcccnttntttaananccaaanggaagggggccgcccgnnagaggtaaatcagnccntcccatcattccaggacctcaaccncctgttntttcaaggaagatccccccntanaaccccctaaccgnan

SEQ ID NO: 39223 - DNA, 1375 bp, Oryza sativa
  Clone ID: PAT_MRT4530_42785C.1
atggcggcggatggcgtgctggccggaggcggtgggtgccgcgaccacgtcggcgcgacgacggcaagaggcgatgggcggcgcgacaatagccggcggcggcacgcgtgcgtcgacggctgggggcaggaccgcgcccgcacgaggggagacgacggccagcggcgctatgcgcagtgccgcggccagatctgcgcggccgccggcggcggcggtggcatggctgaccagaccgctgctgccgttgtcgtcggaggaggagcggcggcgacgatgggggagccatctccacctccgccggcgccggcagcggaggcggcgggggtgggggtggggcagcagcagaggacggtgccgacgccgttcctgaccaagacgtaccagctggtggatgacccggcggtcgacgacgtcatctcctggaacgacgacggctccaccttcgtcgtgtggcgccccgccgagttcgcccgcgacctcctccccaagtacttcaagcacaacaacttctccagcttcgtccgccagctcaacacctacggatttaggaagattgtcccggacaggtgggagttcgccaacgactgcttccgccgaggggaacggcggctgctctgcgagatacaccgccggaaggtgacgccgccggcgccagcggcgacgacggcggcggtcgcggccgcgatcccgatggcgctgccggtgacgacgacgcgggatggctccccggtgctgtccggcgaggagcaggtcatatcctccagctcgtcccccgagcccccgctcgtgctgccgcaggcgccgtccggctccggctccggcggcgtcgcgtccggcgacgtgggggacgagaacgagcggctgcggcgggagaacgcgcagctcgcgcgggagctcagccagatgaggaagctctgcaacaacatcctcctcctcatgtccaagtacgcctccacccagcagctcgacgccgccaacgcctcctccgccgccgggaacaacaacaacaacaactgctccggcgaatccgccgaggcggccacgccgctcccgctccccgccgtcctcgacctcatgccttcctgccccggcgccgcctccgccgccgcgcccgtatcagacaacgaggagggaatgatgagcgcgaagctcttcggcgtctccatcggccggaagcgaatgcggcacgacggcggcggcgacgacgaccacgcggcgacggtgaaggcggagccgatggacgggcggccgcacggcaaggacgaacaatcggcggagacgcaggcctggcccatttaccggcccaggcccgtttaccagcccatccgggcctgcaacggatacgagtacgaccgagccggcagtgaccaagacg

SEQ ID NO: 39224 - DNA, 1957 bp, Oryza sativa
  Clone ID: PAT_MRT4530_42786C.1
atggcggcggatggcgtgctggccggaggcggtgggtgccgcgaccacgtcggcgcgacgacggcaagaggcgatgggcggcgcgacaatagccggcggcggcacgcgtgcgtcgacggctgggggcaggaccgcgcccgcacgaggggagacgacggccagcggcgctatgcgcagtgccgcggtggctggggagatatttggagatggggagggttgattaggaagcaaccagacaccacggtgtatccaggccagatctgcgcggccgccggcggcggcggtggcatggctgaccagaccgctgctgccgttgtcgtcggaggaggagcggcggcgacgatgggggagccatctccacctccgccggcgccggcagcggaggcggcgggggtgggggtggggcagcagcagaggacggtgccgacgccgttcctgaccaagacgtaccagctggtggatgacccggcggtcgacgacgtcatctcctggaacgacgacggctccaccttcgtcgtgtggcgccccgccgagttcgcccgcgacctcctccccaagtacttcaagcacaacaacttctccagcttcgtccgccagctcaacacctacggatttaggaagattgtcccggacaggtgggagttcgccaacgactgcttccgccgaggggaacggcggctgctctgcgagatacaccgccggaaggtgacgccgccggcgccagcggcgacgacggcggcggtcgcggccgcgatcccgatggcgctgccggtgacgacgacgcgggatggctccccggtgctgtccggcgaggagcaggtcatatcctccagctcgtcccccgagcccccgctcgtgctgccgcaggcgccgtccggctccggctccggcggcgtcgcgtccggcgacgtgggggacgagaacgagcggctgcggcgggagaacgcgcagctcgcgcgggagctcagccagatgaggaagctctgcaacaacatcctcctcctcatgtccaagtacgcctccacccagcagctcgacgccgccaacgcctcctccgccgccgggaacaacaacaacaacaactgctccggcgaatccgccgaggcggccacgccgctcccgctccccgccgtcctcgacctcatgccttcctgccccggcgccgcctccgccgccgcgcccgtatcagacaacgaggagggaatgatgagcgcgaagctcttcggcgtctccatcggccggaagcgaatgcggcacgacggcggcggcgacgacgaccacgcggcgacggtgaaggcggagccgatggacgggcggccgcacggcaaggacgaacaatcggcggagacgcaggcctggcccatttaccggcccaggcccgtttaccagcccatccgggcctgcaacggatacgagtacgaccgagccggcagtgaccaagacggtcacgttcagttgcgtacttgcgtcaacaacctcctggtcaccggcgccggcaccctcgacgctggacgagagtacgagaccaactccctacccaggccacgacgcgcaaagaacagcaacgacgtgccagggatgcccaactcgttgggccaagcacccagcccggtcgcctgacatcacctacccttatgtctatgttatgttctatcattttgctgaaacaatactgaaacgtcaccctatatgtgggaggatactaatcttccacctatgaaacacggtttacccgaggggtttacctgcttgtatctaggtttggcaggcgtaagaattgatcaatggtaacttgtcaaatctgtatgatagctactttgtgttgtagctactgatagctttttttttttgttcttgcctgctctatctgattgcaactaacttctggtagtactggcagtctgccacactgtattgattccaaaattaagtaactttgactgtttcagattctggc

SEQ ID NO: 39225 - DNA, 621 bp, Oryza sativa
  unsure (1)..(621): unsure at all n locations
  Clone ID: PAT_MRT4530_42787C.1
gatacaggttcaacaatctggatcttcacttgcatacatttgagcaaggcttccactggggattctcttacataaaataatagggtatttacaagattgtggctaactattatagcagaagctatagaatgactcaactctagtgttttactatagacgtaaaccatctatctaatctatacttgagaactaagttagaatgagactaacttatataactgaactcccggcttcgataagaattccaaaatgactcttgctccaacgcaaataaatccgagatagacaacctgattatccgatcctcgaaataccacaggttgtcatccaaaatacaatagactctacttgaagaagaggaagaactaaattcaataaaagccataaaatagcaagaaagcgataaacggttaagagggatagggtttagggtatagcctatctcttttataggttattaggattattgggctagtatttcattgtgtaagttctaaaggcttggaggctagaggggattaagcaatcagggtcacttgtattttatgtgtggcttgattgctgaaagatgnggatgtatattggggtaattgaactggttcaactggtatatggctagta

SEQ ID NO: 39226 - DNA, 237 bp, Oryza sativa
  unsure (1)..(237): unsure at all n locations
  Clone ID: PAT_MRT4530_42788C.1
taacatctcataccacgcgtacgcaagctcgtaacctctaaacctgtccacctttcttcctttttttataattaacacacaaccccatcgcgcattgtataaaataacaaccttccccaaaatccacactaccttntccttccttacattatatgaaaatatatttcttcacctaccccaaccccaacttatacacacatcttacttttccaacactttacactactccatctcctg

SEQ ID NO: 39227 - DNA, 453 bp, Oryza sativa
  Clone ID: PAT_MRT4530_42789C.1
atggcggcgtgcttccgctacgcgccgtccggccctgcggggcccagcctggcgacctccgtctacgagaccaacctcgacctcgccgcgctgtcatggacgcgcacctccctcggcctctcactctgcgctgtgctccgcctctcgtccccggccatcccggaggagaccgacggggtgaggccggagaggaggtccggcggccgacgacgtggcggcggcggcggagatcgtcggcgccatgaagttcttcgcggcgcccgcgggacgagcgggcttgggcgccgtcgtcctcgccgccgcgtcacgctgcccactgttctccttctctgcgcaccacgacgcccgcggcgacgcgtgcctgcacaccgcggagctcctcagtgccgccaaatctgccgcatccaaccaaaaaaatcatgtgcagcgggcaggaggtgtctcagtaattaa

SEQ ID NO: 39228 - DNA, 180 bp, Oryza sativa
  Clone ID: PAT_MRT4530_4278C.1
atgtccctgcatagcattgctgaacacgggcttgcgtacttcgggcgctggccagcccactgctcccagatatggctctacaacggtacttatcagaaacgagagaaggactacgaacaactccagaattcctccgacttcttctactctactctctccctaattctagcatacaaaata

SEQ ID NO: 39229 - DNA, 1636 bp, Oryza sativa
  Clone ID: PAT_MRT4530_42790C.1
cggacgcgtgggtgcgatcgatcgagagctagaagaagcagcagcagcagctacttcttagctcgccgtcgccggagctagctcgcgtgtgaccaccgccgccgccgccgccgccgcacgcagcctcagctcgatctctgcactttgttcgatcgccggccatgggggtggggcgagcgctgagcgacgcgaagccgtacgtggcgatggtgctgctgcaggtggggttcgcggggatgtacatcgtctccgtggcgtcgctgaagcgcggcatgaaccacttcgtcctcgtcgtctaccgcaacctcgtcgccaccgtcctcatggcccccttcgccctcctcctcgagaggggagtgaggcccaagatgacactgagaatcttcctcaagatcatggggcttgccattcttgagcctgtgcttgatcagaacctatactacatgggcgcgaagctgacctccgccggcttcgcctcggcgctcgtcaacatcctccccgccgtcaccttcctcctcgccgtcctcctcaggatggagaaggtcaggctccggagcctgcacagccaggccaagatcgccggcacggtgttcacggtggccggcgccgtgctgatgatcatgtaccacggcccggtggtgcagttcccgtggtcgtcgtcggcgagcggcagcgccggtcaccacgtcgacggcgcggcggcggcggcggcgacggcgtccagcgcgtcctcctggctgaacggcaccgtcatgctcgtcggcagctgcgtctgctggtcgggcttcttcatcctccagaacaacacgctgcagagctacccggccgagctgtcgctgacggcgctcatctgcgtgctcggctcggcgatgagcggcgccgtcgcgctcgtggcggagcgccgcgacatgagcgtctgggtcatcggcttcgacacccgcctcttcaccgccgtctactcggggatagtgtgctccggcgtggcgtactacgtgcaggggctcgtgacgagggcgcgtgggccggtgttcgtcacggcgttccagccgctctgcatgatcatcaccgccgtcttgggctccaccattctcaaagaagagatcactcttggaagtgtgatcggcgcggtgatcatagtggtggggctctacgcgctcatctggggcaagggcggcgaccacgccgacaacggcaagccgccggccgccgccgccgccgcgccggagaagggcttgccattgaccacgctgcaggccaacggcgacggcgacggcaagcttgctgtgctcgtcgccgacgtcgagatgccggcggtgaaggatgtctactagcttctctctgactctctgtgtgtatgtgcgtgcaacaatgtgcatgcatggtcgatcgcctcttgcgtgcaaacggtgttaatttgaggggtaattaagatggtttagattgttgattagtaattaattagctgtgtgagttaatgatggataagatatactacgcaagtgttatgaaagtgttatgcatgtagcgttgtctgttgtgacgtactctctgcaatcgtggagacggattaatattgattaatactcgtattgagctagctaacgacttttgctaaaaaaaaaaaaaaaaaaaaaaa

SEQ ID NO: 39230 - DNA, 249 bp, Oryza sativa
  Clone ID: PAT_MRT4530_42791C.1
atgcggttgttgactgttgtgaatgggggtagaaatcgcccgcgtagcagccgcgcgaagccacggcgagctagcgcgcgcggccgcggccgcggaacccgccgtgcgtgtgcgcttcgccggatggtagcgttcatgcgcgtgaaaccgctgaccttgggttccatcacccacgcgaccttggccggccgtacactggctgcgcacgcatcacttcccgtccgggattggaaaaagtacgcaccaaag

SEQ ID NO: 39231 - DNA, 1161 bp, Oryza sativa
  Clone ID: PAT_MRT4530_42792C.1
atgggctaccgcgccgtctgccgctgctggcgctccgccaccgacgaccccaggggggcgagcgcccgggacccccgcttccgcccccgccactgggccatgctcgacgaagtcttccagaccgacgcgcgcctcttcgccaacgccgccaccggccgcttcctccgcatggacctgccgctgctcggccgcggccgccgctaccgcctcgtcgccagcgcccccggcggcgacctcgtgctggccgaggcgagcccccccgcacgcggtgcgcgtcctcaacccgttcaccggcgccgcgaagcgcggcgccacgacgcgcttcgcggcgccgctgccttgcgaggacgggttcgatgcccatgtcatcggcgcttcgcccaccctcgtcctgctcgccgacgactccgccaaggtctacttcgccgaccccgacagcgaaggcttctccgtgttcgaggagagctacgcgtgcgctctcatcaggctggccgtcgtcggtggccgctacgccgccgccggcgagctagggtcggtggcgtcgatcctggtccccgaggccatcaagacggggctccctctcgccgtcaaaatcacaaacacatgtcgcgcgaaccccgcgttccgttgcttcgtggtggaatccgcgggggaagcgctgctcatcttcaagatggacagaaagatcgtgcagatttacaagatgagcacgggaggggtgaaggagatcgatcgctggaggaggtgaagagcatcggcggcggccgcgccatcttcgtcggcgccaccaggtgcatatccatcaacgcggataagttcaacgccattgatggcaaccgaatctactaccaggagcgcgacgacctcacatccgcggacatctacatgtatgaactcgagagcgaggagacgaccaagatcggcggagccatagattcgttgaatcccgtcttcctcgtttctactgaacctcctttcagtccaattcagctcttctgcagctacgccgacgaagcactgaggttccgactggagtgggagaaaatagtgcaaagcctccctgagcggcttcctgatgacattatggcttccatgggtgctgacctgatgggtgattttgaagacgaattcgaggattttgaatatgaattcaacgattga

SEQ ID NO: 39232 - DNA, 2729 bp, Oryza sativa
  Clone ID: PAT_MRT4530_42793C.1
aataatctgggggtgagtcatgggactaatagcattgttcctttttttcatgaatttccagcaaaatagatgctggcatacattctcatgggagttgagtgtttgatgacacattattacgaaacaggaccttgataaatgatagggtgaccatagccaggtcacgctcacatgaaaccgagacgacacctcgagctttgctgcccccagagggccctaagccctagcccattcattcctacagtaataactggaagaaattcctgaatgccaaaagtggcctcatctgccaaagccaactatgattcggcagttgttattagacattctctatacctgttgcctttttgaagtgcagactgctaatgtgatcaacctgttattaaccaaccaagccagcattggtggcattatttttatgctctcaactactaacttttctaaggctttgccttgagcagaatggaagagtatggagcaattctgtattttggtcctgtaaatggcaccccttctggtacaatatcatttggtgattccaggttggtatccaccacacggttccaacatttatggtgtggtggtgggggaattacagcgtccacaaaatagtcatgtgcattgaatgccaaatagatatctccaccagagttgtgatcatgtactgtgaatgccaaaaatttgctttcctggttctcccaacaatcctcgtgccaggtgacatcgtttttattaagaaacctgtctcgtcttaatattgggttgctgtgacgaaactttatcatctctgagaaaaacctgaaatggccatctcttctttgttccaactgttcccattggaaattattaatgcaagtatcatgtccatagctattgttgttcccataacgtgtatgaccatattcatcgcccatcaacatcattggggtgccctgagaaatcattaaagctacatggaagtttttcatttgtcttgaacgcagacttaacacattcagatcatttgtttctccttcaacaccacagttccagctaaagttgtcattgcatccatcacagccaccttctccattagcatcattgtgctttaagttgtaagaaacaaggtcacataaagtaaatccatcatgtgcaatcacaaaatttacaccatggtaaggcttccgctcgttcacctgatagagatcagcagatccagacacacgagtcgcaaacacccccttcataccagggtcacccttaataaatcttcgaagatcatctctgtatttgccgttccattcagcccacctgtcccagttagggaaacgccctacgagataaaggccgccgcaatcccaaggttcagcaatgatcttacatctagataatacagcatctttggcaatttccttgatgagtggaggtgcatcaagaggacaaccatctggtccacgacaaagaacacttgcaaggtcaaatcgaaatccatctatgtgatactcctcaacccagtgtctcaagctgtcaagaatgagctccttgacaacaggatggttgcagttcagtgtattcccgcagcctgagaagttcagtagttcagcatttttgttcaggtctaacatgtaatagaccttgttatcaatgccacggaaagaagtcatatacgggtgagcatcatccgcctcatttgtatggttgtaaacaacatccagaataacctctatgccagctttatgcaattctttgaccatctgcttgagctctttggaagcagccactggtccaccaccggcactagcataacggctcatgggtgcaaaaaagtttatcgtagaatagccccatgtattgaccatgtggtcccttgggttggggtacctcttgaattccagctcatcatactcaaaaacaggaagtagttccactgcattaacgccaagttccagcaaatgagggattttatcaatgagaccaagatagcttccacgagaagtcgaatcaaggccacttgactcatccgcggtgaaagcacggacgttcatttcatatatgactagatctgcctcaggcaaattcggaagcctgtagtcatcaccccaatcaaaaggagagctatcaaaatcatatgttccaaaatgctggcttgacttctcttcagcaaccccaaagtactttcgaccagaaactaattttgcataagggtccagaagaacagtgctgctatcaaatctatggccttggtcccatccttgagggccaccaacacgatacccataaagaacaccagaagcaggcaagccctccactatcacatgccatatatccccagttttgttcttctgctggtctaaaacaaactcgacaacatctgcacctttctcatcttcagttcccctcccaggaagctttaagcagagaatgacagaagaagcatgctgagagaaaagtgcgaagttcagcccgccttcaacttgagacactcctaatgggaaggctttaccagaggaatatttaaatggcatttcagtatcagacattgtacatcctctttcctcggtcatgcttctcccagcgttcccgttctgagctctcgccgtggtgcttcgtacagaatcaaatcgcctaacctgccttctcagaacacgctctgagcccagacgcgtccccgaagccgatcgtcgccacacccacactttcccacggaggcggcccatgtactggaggtgcgataaatgggccgtgcccat

SEQ ID NO: 39233 - DNA, 629 bp, Oryza sativa
  Clone ID: PAT_MRT4530_42794C.1
cgggctgcccaaactccgccgccgccgccgtcaccgccgctcgccaccgccgcggccgccatgagggcgctcgacgagaaggagacgaagatggtgttcgagaagctgttcaagttcacggggccgaacctgaagcacctcctggagcggccggcggtggaggggcccgacccgcaggccgggcgctactgcctccgcctccacaagaaccgcgtctactacgcctccgaggcgctcgtccgccgcgccaccgccgtcgcccgcccgcgcctcgccggggtcggcacgcccatcggcaagttcacccacggcggcgcgttccacctcaccgtccacgccctcgacctcctcgccgcccacgcccgccgccgcgtctggctcaagcccgacaccgagcgctccttcctcttcggcaactccgtgcccaagtcctccctcgcccgcatcacagagaacaccaaggccaacgacggcgtcgtcgtcatgtccatggccgacgtcccgctcggcttcggcatcgccgccaggtcggcgcaggactgcaggaaggccgacaccaacgccgtcgttgtgctgcaccagtctgacgcaggcgagtacctccgccgggaggaggagctcatgtgagg

SEQ ID NO: 39234 - DNA, 311 bp, Oryza sativa
  Clone ID: PAT_MRT4530_42795C.1
tgaaaatgcatcattcttctagccagagttcagcctttcatggatccagtggacactgttactcatgagaggatgagaccctctttcacagtccttaggggattacacattggtaagtactttttgtttacggtgtttgttattgtaattgaatttacattttttttcattttttgtattttttttgttgatatctaactttttttctttacatttatctgttttttggctctctacttatatctcatgtattattactactttacttttttttggttttttctttacttttaattcatcttctctatttc

SEQ ID NO: 39235 - DNA, 224 bp, Oryza sativa
  Clone ID: PAT_MRT4530_42796C.1
cagaacccccgcgaccacccccgccggtgatgttagggagccaaagaatgctctcatcgggggggttttaatacaacatctctctttcttcatcacttagcgcaccctatccctcccaaaagaccaccatattttaggcaagggggtaaaggaaggtatcagagatagcgagggaggactatactaagaacccattgctttcatatgcgagctaaacgtaaatc

SEQ ID NO: 39236 - DNA, 422 bp, Oryza sativa
  unsure (1)..(422): unsure at all n locations
  Clone ID: PAT_MRT4530_42797C.1
atgcagcagcacagatatgataatcagtgatggcttcctgcttaccagttaccagtgtttcatttgtcatggaagtggcagctagaacacaggactgctagaatccctaactaataattgggactttaggagtctctgccatccattctgacaactacganctcgttttgtntaganaaaatgtcatagtgaaattcantgtncaaattatcagttgctcgttccnaagggagcttttgtntatactanttggctaaattgtngatcaggtttgctcccnngaacgcacaacacattgtgacanaacttgttacttgtcctacatttcgacgcccntancgctggcggcatgaaatgatcacaggtgaantgttacaaccnaaagattcnntgaaaaattggtgttctggactgagctganc

SEQ ID NO: 39237 - DNA, 144 bp, Oryza sativa
  unsure (1)..(144): unsure at all n locations
  Clone ID: PAT_MRT4530_42798C.1
gcgtcaacctccgacactgtncccctactctgggggggcttccagaactactccgccggcttctccatgacgacggatatggccgacgacccccttgacccgccgacggagccgcagccgcagacgctgccggcggaagcagcc

SEQ ID NO: 39238 - DNA, 404 bp, Oryza sativa
  Clone ID: PAT_MRT4530_42799C.1
aggacccccctatttttttttttttttgattgtttaatcaaactcccgatgcgactcgctagaagtttaacgttcagaatattgaatgcataagggttctatggcattctccagacaaaggaaagtaagcagctcctgcttgtctcaagactcaaattgcgctacataaggaaaatccattcctagaacatgctaagcttgaagcaccaaggagcatagcagaacgagagctctctctctatgccaccacattgctggcagtggacgacctatacttccaggtgggcggacgcttcttggtgcgcttgtagtagcgagcgaagcggtggatcctgctctcaacatggatgagcctaaacttggagcgcttggcgttccctgtccactccaaatgcttcctaata

SEQ ID NO: 39239 - DNA, 1890 bp, Oryza sativa
  Clone ID: PAT_MRT4530_4279C.1
aatcaaagcacttcgaaactttcatttcactcggcttagtcctttctatgagtcatttcacaaatgcattgaatttgggggctgatcgatatgcgatttctaggcggaagagtcattacatcattttcggagctatcctcacatacatgagcgttgtaaattgtaacatgcccgatcagggaagcacttgtatcatttcaaatccaaacaataaactcagttaaaaacaagtcgatgaacacacgttacagaaccgtttcaacacaatgggcatggtctcctgaaaggtcgactgtgcagcacactgccattttatgcaatgagaaaagggagtacagtcagcatgaaagcctcgtaagtaaaagtcgcagagcccgagaaggctgtgtctttttccttgaacttctcagtcagacccttaactgtgaggcagcattcaatgaagttatcatattcaatggctttgttcttgcccccagtcttgtcaaactttgacacaagcaagtctagcacagttggagaaactgaatatcccagactgagaagagcatcacgcaattctgttgcatcaattttaccacttcggtcacgatcaaacctctcgaaaatggacctccaattctgaagactgtaaaacacagaggtaaattccttgggaccaatcttgcggacgttggtgttggtgaagaggtacatgaggaggtggacggtgcggaggctgaagctctggctgtacccggacagcgcggactgcagctccttgtcgtcgatcatcccgctgccgtcgcggtccgccgcctggaagcacgccaccacgttgggatccgtcccgggcgggaacgccgacggcaccagcgacgcgaacgggctgccgtacccgccgggcgccccgtagggcgccgacgagggcggcggggccccgtacggcgcgccgtacggctggctggagggcggggcgccgtagccgcctccgctgccgtagggccgctgggtggatggggcgccgtagccgcctccgctgccgtagggcaccgtagccgcctccgctgccgtagtaaggggcggaagaggaggaggtcttaccttccttgggaggcttcgcgccgtacggcggggcggagggggcgggggaggagccgtagggcggtggcggggcgccgtagccgccggcgccgccgtaggggtagccggagccgggatttggcggcggcgaaagggaggaagagggagagggaggggagtgctcaccgagaggccaaatggcggaaggaggcggttggcggcgagcaaggtgacggcgggcgccttgggatgacggtgggacggcgctccggcgatggattggggaagaggagtggtagacggggtgcggtagggcgtggcggcgctgtgggtagcggcggcatggccgggcaagacgacgctcgccggcgggaggcggaagtggctcgggtcggcggtggaagcagcgctacggcgaggcttcagggaggacgaatggatgtcggggtgcagcgcggcgtgacgaagctagtggtggcggcggcgcagtgcggcgacagcgggaagcggcggctggaggcacggcgacgagcggcggagcgcgggctcgcgcggggagcacgggagagggtgcgaggagctcggggaggagggggaaacggaagaggagagcacgagggtgctttatatagggctcggggatggagatcgtggccaggagaggtgggatcggccggcaatgtggggcgccgacgtggggaggttggcggcggttcggcgctgattttgcggggcggagtgggggaaataggggaggaggaggtggggatcgagtccacgcgttcgcgaggtgaggtggagcgcgggaagcgcggcgtcgtggggtga

SEQ ID NO: 39240 - DNA, 212 bp, Oryza sativa
  Clone ID: PAT_MRT4530_427C.1
tgctcgtctgcttcctcctcatgagcgagtcgacctcctttcatgtgttgagctccagtgagcagcatctcatctgtatggcgcttgcagatagatacacccccaatatccatagcaccggtggatcaattttgaagatccgtcgttagtgtcgtcagtctggttgctgtacagttggcctgtatactcatgagtggttatcaatcgtaaat

SEQ ID NO: 39241 - DNA, 2441 bp, Oryza sativa
  Clone ID: PAT_MRT4530_42800C.1
atgatgactgctttcctccaccacctccaaaatccaccacaacataatgctccaccacctccccaacactctaaactcgccgagttcctccgcatccgcccacctaccttctctagctccaacaaccccgtggatgcgttggattggttgcatgccgtggggaaaaagctagacacggtgcagtgcagcgatgaggagaaagttatcttcgccgcccaccagctgcagggacccgcatctctatggtgggaccatttccaggctacgcagccagaggggcagcctattacttgggcccgcttcaccgccgctttccgaagaacccatgtgcccgctggagtcgtggcccttaagaaaagggaattccgagagttgaagcaaggcaaccgctccgtgatggagtatttgcatgagtttaacaacttggcccggtttgccctggaggatgttcatgaagatgaggagaagcaggagaaattcctggcagggatggaccctgagctgtccgtgcgtctggtctccggggattatccggatttccagcgtctgggtggccttaagtatacctcccaaaaattctatgccctcaattttagattactgcagcctccgaggcatttcctctggttatggaagagtaaggttttctcaaagtatcggtctacaaagaacgatatcggagaaactattgaagattttgatgaagtagaaaagcttggtcaaggatttacatcggccgatccattggaggaagtagacatcggagatggaactaagccaaggcttacttttgtaaacaaaaacatgaaagctgattataagccttataaacaaccacctcatcgttttaatcctttgctatattatcgggtcaaggaggagatagaccggttattaaaagcggggttttttaggccatgtcgttatgcggagtgggtgtctagtattgtcccggtgaaaaagaaggggattggtaagattagagtttgcatagactttagagatttaaataaagctactccaaaatatgaatatcctatgcctatagccgacatgatgattaatgatgcctcgggtcataaggtgattagtttcttggatggtaatgccggctacaatcaaatctttatggtggaggaggatatgtataagacggcttttaggtgtccaggatttgttggtttatttgagtgggttgttatgacttttggattgaagaatgccggtgcaacatatcaaaggacaatgaatttgatcttccatgatttgctaggtattatcttagaaatctatattgatgatattgttgtcaaatcggatggtatggaaggctatagagccgatttgagtttagcttttgagaggatgcgccggtatggtttgaagatgaatccactcaaatgtgcttttggtgtgtcggcggggaagttcttaggattcatgttgcatgagagaggacttgagcttgatcctaagaagatagaaaagattcctgatttcaaggcgccgacatgcaagagggaagttcaaaagttgctagctaaggtaaattatttgaggagatttatatataacctagtgggtaaaatcgatgcttttgtccctattcttcgcttgaaaaaagaagccgattttacttggggggcaaaacaacaagaggcgtttgagggattaaagaagtatttatctactccacctgtggtgcgagcgcctaaagccggaatgccgtttcggttttatattgccgccgaagataaagtcattggtgccgttttgacacaagaagaagatggcaaggaatacatcattacatatttaaaccatcgtcttttggatgctgaaacaagccttgccggagttagtcatgttttccttattgggttgggacttaggaggaaacccctaaacaggggaaaacaagaagatagttttggagagacagcaaagaatgatcatgttgatcattccgatctagaatcctcaaacttacctgatccaggaaagaaaaacgtaccaaaagatttggaagctctagctggggctaaaaaggatgtacctgaggaagtggaatttattgaaatgaattccaatgatttagacaacaagatgaggaggaacattggaaagagaaatcgtcaagatgataatgggagtaaaacaaagaaatcgtctaatcgtaatgtgcaaggtcacggaactagtaggtccgtgaaaggaaggacaacagaactaactccagatcctactaaacacgcaatgggaaggggggcaaccagactcacacttcctcacggttttgtgtagctgttattggaggatttgatatgttaagaattagtctgcactgaagtttctgaatattgtgcaattgttgctggagtatgtaacttcttctgaattggtgtctttgccgatgtttttgaatatgcttcctcagtagc

SEQ ID NO: 39242 - DNA, 1191 bp, Oryza sativa
  Clone ID: PAT_MRT4530_42801C.1
atggtgacaaccaggagaagtgctgctaccggtgaaggcagtcaccccgaaggcagcaaccacaacaaccatgacagcccacctccacctcctcccccgcctccaccaccaccaccagacaccaactccatcctcacccaaatcctcgcccagcaggccaacatgatggctgcttttatccatcacatccaaattccgccacagcataatgctccacctccaccaccacccccgcaacattctaaacttgccgagttcctccgcatccgtccgcctaccttctctagctccaataaccccgtggatgccttggattggttgcatgccgtggggaaaaagttggataccgtgcagtgcaacgatgaggagaaagtcatcttcgccgcccatcaactgcaggggcccgcatctctatggtgggaccacttccaggctacacagctagaggggcagcctattacctgggcccgcttcaccgcagctttccggaggacccatgtgcccgccggagtcatggcccttaagaaaaggaaattccgagagttgaagcaaggcaaccgctctgtgatggagtatttgcatgagtttaacaacctggcccggtacgccccagaagatgttcatgaagatgaggagaagcaggagaagttcttggcaggaatggaccctgagctgtccgtgcgtctggtctccggggattatccggatttccagcgtttggtggacaagagcatccgcttggaagccaagcacaaggaactggagtcgcacaagcgtcgcttggcgaatttccgcaatcaacagggggctaaccaaagggtccgctacactaatccctacccagggggatcctcctcgcagcagcagcagcagcaacctcgctccgcgccccgacctcaattcgtggtgcgcgtctcacagccgcagcaacagcagagtcagcaagggactcgtgcgccccgtcctcctgcaccagccgtgcagcctggacaaggccgcagggatgctcaaggacaacaacgtctgtgcttcaattgctttgagcccgggcactttgcggataaatgcccaaagccgaggcgccagcaaggccaagcgcctccccgccccaacaacggtggtaaggatgtcattccgggtcgtgtgaaccacgtgactgccgaggatgtgctgacgactccggacgtcatc

SEQ ID NO: 39243 - DNA, 298 bp, Oryza sativa
  unsure (1)..(298): unsure at all n locations
  Clone ID: PAT_MRT4530_42802C.1
atgggcctcctcggagcccacacatgacacgctatgcgcgaaccggctgaagtcaacagnccccacccccgtctctctctccacgcatgtatttttccagaggtggataaagattgccacacgtcacctcaccggtatgtgtgaatggcccataggtgataactgcagtttacaggtggacccgactttatccctccgcatcgctttccattttntccgttgtatagatgtaaagagaatttattttccagtgatttgccatgggtattgangtccacaaaaaaaaaaaaaaaaaaaa

SEQ ID NO: 39244 - DNA, 2196 bp, Oryza sativa
  Clone ID: PAT_MRT4530_42803C.1
atgactggcttcgtcttggagctgcgaggcatgtgcgtggtcttggggtatccacacggagtggactaccaggccaggccgcttccgaagcaggagggtgaggatgcagagcctcacgctggttgggaggtcactgcagtgatcctctccggctctcccgagcggacttcgctggcagtcaccgcgggtggggattccttccccgccgcttgccagaacgccgctctcctcgccatcggcacccttcaccagcgctacccggacgagttgcagcactcgccctaccgctaccaccctcgtcgcggaggagcccgcgactacgccaccttccgagacgccagctcggaggatgacgccaccgtcgtgcatctggcacgcatggtggaggcgtacgacgcggctcgtatcgacttccaccagatggtgcgtcgtggcatggtggagaacaacctgaagatcctggagctgcgtcaggagaacctgcagctcaagaaggacctcgacgcgttggaggcgcagctgcatcagctcaagatcgcccagggagagatcagccgtcccaagcgtcgccgcgtctgccgcagccagaagatcaccgcccgcaagagcacctccaggcccgagcttgttcgtcagtccctggcgtggacctgcttcgtcgagacccctcgtgccgagcctgcgcccgtggttccccaggagggggaagcctccggcgttggtagctcggagggtgcgctgttgctcaccttccgtcctggcccgtcgcagcgctcttcttctctgtttgctggttctatgtggggttttcagatggtgacgaccaggagaaatgttaacaccggtgaaggcaaccaacccgagggcagcaaccccaaccaccaaggcaatccacctccaccaccaccacctgacaccaacgccattctcacccagatcctcgcccaacaagccaatatgatgaatgctttcctccaccacctccaaaatccaccacaacagaatgctccaccaccacccccacaacactctaaactcgccgaattcctccgcatccgcccacccaccttctctagctccaacaatcccgtagatgcgttggattggttgcatgccgtggggaagaagctagacacggtgcagtgcagtgacgaagagaaagtcatcttcgccgcccaccagctgcaagggcccgcatctctatggtgggaccatttccaggctacgcagccagagggacagccgattacttgggctcgcttcaccgccgctttccggagaacccatgtgcccgccggagtcgtggctctcaagaaaagggaatttcgagagttgaagcaaggcaaccgctccgtgatggagtatttgcatgagttcaacaatctggcccggtacgctccggaggatgtgcgggaagacgaggagaagcaggagaagttcttggcaggaatggaccctgagctgtccgtccgcttagtctctggggactatccggattttcaacgactggtggacaagagcatccgcttggaagccaagcacaaggagctggaatcgcacaagcgccgcttggcgaacttccgtaatcagcagggtgctaaccagagggtccgctacaccaatccctacccagggggatcctcctcgcaacagcagcagcagcagcaacctcgttccgcgcctcgacctcaattcgtggtgcgcgtcccacagccgcagcagcaacagaatcagcaagggacccgtgcaccccgtcctcctacgccaactgtgcagcccgttcaaggccgcagggacgctcaaggtcagcagcgtctgtgcttcaactgcttcgagcccgggcactttgcggataaatgcccaaagccaaggcgtcagcaaggccaagcgcctccccgctccaacaacggtggcaaggacgtcatccgtggtcgtgtgaatcacgtgacggccgaggacgtgctgacaaccccagacgtcatcgttgagaagaaagacaagacgaagaggatgtgcgtcgactacagagctctcaatgaagtcaccatcaaaaacaacgtgtcaaggcagaacaccaacgaccggccggacttctccaacctctccaagtgccagaatggaagtgggatgaaattgggatggatttcatcaccggacttccaaaaacccaaggtggatatgattctatatgggtaa

SEQ ID NO: 39245 - DNA, 291 bp, Oryza sativa
  Clone ID: PAT_MRT4530_42804C.1
atggcggcgccggccgggggcacggtggcgtcgacgtcgtcggtagcggcggcggtgtggagcagggcgacggtggaggagacggtggtggagctggagccgctgctgccggcggatcagctcgacatggtccagagccggcgcgtctggtcgacgaccaaacatgataccggtgcactagacaaggacaaaccagtgtgcctccgggaccatagctgcacggagcctccgccaggcgtgtcctacatcgggtggggagacaaatgcgtctaccataacccagggtgttga

SEQ ID NO: 39246 - DNA, 435 bp, Oryza sativa
  Clone ID: PAT_MRT4530_42805C.1
tttttgtttttttttttttttttttttttttttttttttttttttttttttttttttttttttttttttttttttttttaaaaaaacaaaacttttgggtactgacttggttagcaaaaaaagggttccaaggggagaaactggccaagctatgaggtgaggcacaacagaggcttttataacagggtcaggggtgcacaaaaaatcttgggagtttacaaggttgattaaatttgcccgaaaagggtctcacccactgggtacttacttagggaaacaggtcactttcacgggtagccgggaggtaaacctttgtggggggtggcccctccagatggggcaattttaagaaccgaaacaaaacccccagtttttcccgagggtaagggccaacccatcttattgggggaagaaaacaataggggggttgtaagg

SEQ ID NO: 39247 - DNA, 261 bp, Oryza sativa
  Clone ID: PAT_MRT4530_42806C.1
cacggtaccggcccggactgactggctggacccacccacgcgtgcttttgccccatttttacctcactaccggggcgcttgaaaaacccaaccgtgttgtgacccttcgccgccggcaagcgccaaggagggtgcccgccagggaggggagaggagaggagacggcggcttggcgtcgggaagggagggatggcgatggcgccctcaccgccggtgtggaccttacataaagccgcgtagagcctcttttgctcggagacg

SEQ ID NO: 39248 - DNA, 1033 bp, Oryza sativa
  Clone ID: PAT_MRT4530_42807C.1
atgatgaatgctttcctccaccacctccaaaatccgccacaacagaatgctccaccaccacctccccaacactccaaactcgccgaattcctccgcatccgtccacctaccttctctagctccaacaaccccgtggatgcgttggattggttgcatgccgtggggaagaagttagacacggtgcagtgcagtgatgaggagaaagtcatcttcgccgcccaccagctgcaggggcccgcatctctatggtgggaccatttccaggccacgcagccagaagggcaacctattacttggactcgcttcaccgccgctttccggaaaacccatgtgcccgccggagtcgtggctcttaagaaaagggaatttcgggagttgaagcaaggcaaccgctccgtgatggagtacttgcatgagttcaacaacctggcccgttacgctccggaggatgtgcgggaggatgaggagaagcaagagaagttcttggcaggaatggaccccgagctgtctgttcgtctagtctctggagactacccggacttccaacgtctggtggacaagagcatccgcttggaagccaagcacaaggagctggaatcgcacaagcgccgcttggcgaatttccgcaatcaacagggtgctaaccagagggtccgctacaccaatccctatccagggggatcctcctcgcagcagcagcaacagcagcagcaacctcgcccagcgccccgacctcaatttgtggtgcgcgtcccacagccgcagcagcagcagaatcaacaagggactcgtgcaccccgtcctcctacgccagctgtgcagcccgttcaaggccgcagggacgctcaaggtcagcagcgtctgtgcttcaactgcttcgagcccgggcactttgcggataaatgcccaaagccaaggcgtcagcaaggccaagcgcctccccgctccaacaacggtggcaaggacgtcatccgtggtcgtgtgaatcacgtgacggccgaggacgtgctgacaactcccgacgtcatcgttg

SEQ ID NO: 39249 - DNA, 393 bp, Oryza sativa
  Clone ID: PAT_MRT4530_42808C.1
atgaatgggattggtggcatctggaacccgggaatggtagggatcgtcgtcgggattgtggtgggaatggatggaatagtggttgggattgagggcattggtggcagggtaacaggaactgtaggaatggttggtatggtggtcggaatggccggaattggaagagatggaattgtgccagcggctgttgggggaatggtaacctttgggataggaacagatggcattgggggcactgtcagcttggggactgcagatgacgagctgcgtagctgcaatggaaggctgagaaggccaggagcagaaccagaagatgacaaccagaagaagccatggacattccatgatacacatttacttttagcacaaataaaccaagagatactttgttag

SEQ ID NO: 39250 - DNA, 700 bp, Oryza sativa
  Clone ID: PAT_MRT4530_42809C.1
atggttatgccgatggtgacgaccaggaaaagtgctgctaccggtgaaggcagccaacccgaaggcagcaaccacaacaaccagggcagcccacctccacctccttcttcgcctccaccaccaccaccagacaccaacgccattctcacccaaatcctcgcccagcaggccaacatgatggctgctttcctccaccacatccaaaatccgccacaacataatgctccaccaccacccccacaacactctaaactcgccgagttcctccgcatccgtccaccaaaattctctaactccaataaccctgtggatgcgttggattggttgcatgccgtggggaaaaagttagacaccgtgcagtgcagcgatgaggagaaagtcgtctttgccgcccaccagctgcaggggcccgcatctctatggtgggaccatttccaggctacgcagccagaggggcagcctattacttgggcccgcttcaccgccgctttccggaggacccatgtgcccgccggagtcatggcccttaagaaaagggaattccgagagttgaagcaaggcaaccgctccgtgatggagtatttgcatgagttcaacaacctggcccggtacgccccggaggatgtacgggaagatgaggaaaagcacgagaagttcttggctggaatggatcctcagctgttcgtccgtctagtcttcg

SEQ ID NO: 39251 - DNA, 456 bp, Oryza sativa
  Clone ID: PAT_MRT4530_4280C.1
atgactctcctcttatttctcactctctctttcttctctttcttctctctctccctatgcatcttcatcaatgagaagttgagaacgggtgcttctcgctccatggtggtgcccaagaagactgtaggcgatgagcttcgaggccggcgagaagatctaggtggtgtggccggcgagcttctatcattaatgcttcatcatcacctcatctccccgcctcgcaccccatggcagtggccgagaaggccacaggcgcgagcttcggggccgcaagcggatctaggtggcatgccaccaagcttctatggctactgcttagtggtcgccttctctcttcctgagccatggtggctgccaaggagtctacgagcggatctaagcagcgtggccagcgagcttatgtctctaatggttcaacattgcctcctcttccctcttcttggtccacagcggtag

SEQ ID NO: 39252 - DNA, 753 bp, Oryza sativa
  Clone ID: PAT_MRT4530_42810C.1
cgcatcacctcacatcaaaagaaacacagtagccttccagaacacacaaaaacaacagtcacttaccatggcttcttctggttgtcatcttctggttctgctcctggccttctcagccttccattgcagctacgcagctcgtcatcttttggacacagcagctgcagctgcagcaccagaggcagccccagctcagccctccatgccaacagttccaaccacgctgcctccgataccttccatacctgcagtccccaagctgacagtgcccccaatgccatctgttcctatcccaaaggttaccattcccccaacagccgctggcacaattccatctcttccaattccggccattccgaccaccataccaaccattcctacagttcctgttaccctgccaccaatgccctcaatcccaaccactattccatccattcccaccacaatcccgacgacgatccctaccattcccgggttccagatgccaccaatcccattcatgtcctcacctcccaaaaccactagcccctgaagttcttcaagaggatgagactgatattcatggttactagtcagggatttggttaggcatatgttgccatcatatcagtgtgtacatttatttgtgttctgttattggagttatactggcttgcattggtgtgattgtaaatgcagctaggcagttgtactatcatgtttgtgaataaatcatttcttggtttgcataacataaaaaaaaaaaaaaaaaaa

SEQ ID NO: 39253 - DNA, 525 bp, Oryza sativa
  Clone ID: PAT_MRT4530_42811C.1
atggtgacaaccaggagaaatgctgctaccggtgaaggcagtcaccccgagggcagcaaccacaacaaccagggaagaggacaaacacctcctcccccgcctccaccaccaccaccagacaccaacgtcatcctcacccaaatcctagcccagcaggccaacatgatggctgctttcctccaccacatccaaaggccgccacaacataatgctccaccaccacccccacaacactctaaactcgccgagttcctccgcatccatccgcctaccttctctagctccaataaccccgtggatgcgttggattggttgcatgccgtggggaaaaagttagacaccgtgcagtgcagcgatgaggagaaagtcatcttcgccgcccaccaactgcaggggcccgcatctctatggtgggaccatttccaggcaacgcagccagaggggcagcctattacttgggcccgcttcaccgccgctttcctgagaacccatgtgcccgccggagtcatggcccttaagaaaagg

SEQ ID NO: 39254 - DNA, 693 bp, Oryza sativa
  Clone ID: PAT_MRT4530_42812C.1
atgaatccgaatgatggcaatcctgaaggaggagaaattccccagccagatcctactactttagtagaagtaatggcaaaacaaactcaattattagaagccattgctcaaaatcaagggaataaaggacaaggtaaccatgctgaatttatgagggtcagaccaccaactttttcaaaaacagaagaacctatggatgccgaagattggctacgggcaatagaaaagaaattagccttggtcagaactgatgaacaagagaaggtaacctttgaaacccatcgattagaaggactagccaatgaatggtgggaagcttatcaagcatcaatagacgaccctgcccatattattacctggaaagaattccgtacagcttttaaaaatactttcatacctaatgcaataattagaatgaaaaagaatgaatttcggagattgaggaaaggattcatgacagtccaagaatacttaaataaatttacacaacttgcccgatatgctgcttcagatattcaagatgagaaggaaaacattgaaagacttattgaaggactgcgtgatgaactacgaggaccgatgatcggccaggatcatgaaaactttcaaagtctagtcaacaaagtagttagactagaaaatgatcaaaagatgattgaaggatttcggaaaagaaggataaatctgcaatga

SEQ ID NO: 39255 - DNA, 1486 bp, Oryza sativa
  Clone ID: PAT_MRT4530_42813C.1
atgaagattctggagctgcgtcaggagaacctgcagctcaagaaggacctcgacgcgttggagtcgcagctgcaccagctcaagctcgcccaaggagaggacagccgccccaagcgccgccgcgtctgccgcagccagaagatcaccgcccgcaagagcacctccaggcccgagcttgttcgtcagtccttggcgtggacctgcttcgtcgagacccctcgtgccgagcctgcgcccgtggttcctcaggagggggaagcctccggcgttggcagcacggaggatgcgctgttgctcgccttccgtcctggcccgtcgcagcggagaaatgttagcaccggtgaaggcaaccaacccgaaggcagcaaccccaacccccaaggcaatccaccttcaccaccaccaccagacaccaacgccattctcacccaaatcctcgcccagcaggccaacatgatgactgctttcctccaccacctccaaaatccgccacagcagaatgctccaccaccacctccacaacactctaaactcgccgagttcctccgtatccgcccacctaccttctctagctccaacaaccccgtggatgcgttggattggttgcatgccgtggggaagaagctggacactgtgcagtgcagtgatgaagagaaagtcatctttgccgcccaccagctgcaggggcccgcatctctctggtgggaccacttccaggctacgcagccagaggggcaacctatcacttgggcccacttcaccgccgctttccggagaacccatgtgcccgccggagttgtggctcttaagaagagggagttccgggagttgaagcaaggcaaccgctccgtgatggagtatttgcatgagttcaacaatctggcccgttacgccccggaggatgtgcgggaagatgaggagaagcaagagaagtttctggcaggaatggaccctgagctgtctgttcgtctagtctctggggactacccggacttccaacgtctggtggacaagagcatccgcttggaggccaagcacaaggagctggagtcgcacaagcgccgcttggcgaacttccgcaatcagcagggtgctaatcaaagggtccgctacaccaatccctatccagggggatcctcctcacagcagcaacaacagcagcagcaatctcgctccgcgcctcgacctcaattcgtggtgcgcgtcccacagccgcagcagcagcagaatcaacaagggactcgtgcaccccgtcctcctacgccaactgtgcagcccgttcaaggccgcagggacgctcaaggtcagcagcgtctgtgcttcaactgcttcgagcccgggcactttgcggataaatgcccgaagccaaggcgtcagcaaggccaagcgcctccccgctccaacaacggtgggaaggacgtcattcggggtcgtgtgaaccacgtgacggccgaggacgtgctgacaactccggacgtcatcgttg

SEQ ID NO: 39256 - DNA, 162 bp, Oryza sativa
  Clone ID: PAT_MRT4530_42814C.1
atggcgctcatgtccaccgcgtcatgcgcgattgcgaacgtgtggcaggtgacggcggcaacagttggcatcgggagagcgacgaggccaaagccgttggagaagcacttctccatggtggcaatcgctggtgcactggcacccaaagtggcgcagacatga

SEQ ID NO: 39257 - DNA, 183 bp, Oryza sativa
  Clone ID: PAT_MRT4530_42815C.1
atggcgccgccgcagccgccggcggctgcatgccgatcgaaaagcgccccctccaaatccgcgcgtgttgtgctgaattcgcctgtgtggccagattccagatttcccgagatcggtgtgaaggtgatgaatcgggttcatgacacaccagctatgtcgggggagggtacatcaaagagctag

SEQ ID NO: 39258 - DNA, 2151 bp, Oryza sativa
  Clone ID: PAT_MRT4530_42816C.1
atgactggcttcgtcttggagctgcgaggcatgtgcgtggtcttggggtatccacatggagtggattaccaggccaggccgcttccggatcaggagggagacgacgcagagccccacgctgcgtgggaggtcacagcagtgatcctctccggctctcccgagcggacttcgctggcagtcaccgcgggcggagactccttccccgccgcttgccagaacgccgctctcctcgccatcggcacccttcaccagcgctacccggacgagttgcagcactcgccctaccgctaccaccctcgtcgcggaggagcccgcgaccacgccaccttccgagacgccagctcggaggatgacgctaccgtcgtgcatctggcacgcatggtggaggcgtacgacgcggctcgtatcgacttccaccagatggtgcgtcgtggcatggtggagaacaacctgaagatcctggagctgcgtcaggagaacctgcagctcaagaaggacctcgacgcgttggaggcgcagctgcaccagctcaagatcgcccagggagaggacagccgtcccaagcgtcgccgcgtctgccgcagccagaagatcaccgcccgcaagagcacctccaggcccgagcttgtccgtcagtccctggcgtggacttgcttcgtcgagacccctcgtgccgagcctgcgcccgtggttccccaggagggggaagcctccggcgttggtagctcggaggctccttctctgtttgctggttctgtgtggggttttcagatggtgacgaccaggagaaatgttaacaccggtgaaggcaaccaacccgagggcagcaaccccaacccccaaggcaacccacctccaccaccaccaccagacaccaacgccattctcacccaaatcctcgctcagcaagccaacatgatgactgctttcctccaccacctccaaaatccgccacaacagaatgctccaccaccccctccccaacactccaaactcgccgaattcctccgcatccgcccacccaccttctctagctccaacaatcccgtagatgcgttggattggttgcatgccgtggggaagaagctagacacggtgcagtgcagcgacgaagagaaagtcatcttcgccgcccaccagctgcaggggcccgcatctctatggtgggaccacttccaggctacgcagccagaggggcaaccgatcacttgggctcgcttcaccgccgctttccggagaacccatgtgcccgccggagtcgtggctctcaagaagagggaattccgggagttgaagcaaggcaaccgctccgtgatggagtatttgcatgagttcaacaatctagcccgttatgccccggaggatgtgcgggaagatgaggagaagcaggagaagttcttggcaggaatggaccccgagctgtccgttcgtctagtctctggagactacccggacttccaacgtctggtggacaagagcatccgcttggaagccaagcacaaggagctggaatcgcacaagcgccgcttggcgaacttccgcaatcagcagggtgctaaccagagggtccgctacaccaatccctacccagggggatcctcctcgcagcagcagcagcagcaacctcgctccgcgcctcgacctcaattcgtggtgcgcgtcccacagccgcagcagcagcagaatcaacaagggactcgtgcgccccgtcctcctacgccagctgtgcagcccgttcaaggccgcagggacgcttcaggtccgcagcgtctgtgtttcaactgcttcgagcccgggcactttgcggataaatgcccgaagccaaggcgtcagcaaggccaagcgcctccccgctccaacaacggtggcaaggacgtcatccgtggtcgtgtgaatcacgtgacggccgaggacgtgctgacaactcccgacgtcatcgttgagaagaaagacaagacgaagaggatgtgcgtcgactacagagctctcaatgaagtcaccatcaaaaacaacgtgtcaaggcagaacaccaacgaccggccggacttctccaacctcttcaagtaccagaatggaagtgggatgaaattgggatggatttcatcaccggacttccaaaaacccaaggcggatatgattctatatgggtaa

SEQ ID NO: 39259 - DNA, 2721 bp, Oryza sativa
  Clone ID: PAT_MRT4530_42817C.1
atgagaattggtcgacggcccgggcggccgcaaggggttcgcgttggccgattcattaatgcagctggcacgacaggtttcccgactggaaagcgggcagaaacagctatgaccatgattacgccaagctatctaggtgacactatagaatactcaagcttcagacaagaacaacaacaggctcaacagaggttgggaataaaagagctgcccctctcaggaaagaaattgacttggtcgcaggagtgttctaacccaacgcaaacgaaaattgatcgagccttctgttgcctggaatcggatatcctttttgactctgcccaaatgtctgctctctccacctcttgctcagatcatgccccccttttcataaccggctgtgtagaaagagagcaaaacaattccttcaggtttgagtcgtattggctcaaattcccggatttccttcaaataactgaagattcatggaataggcctatacagacctccaatccttttgtaagacttcatctaaaactaaaaagacttgctagagatttgagaagatggaaagctacaaaaattggagacataagattgcagttgatcattgccaacgaggtagtttatcagcttgatgtagcccaagaggaaagaactttgtcagatgcagaacagtcccttcggaaatctcttaaatccagaattctgggacttgcagccattgagagaactcgtctgagacagagagctagaatcacttggttaaagcttggtgatgtcaattcaaaattcttccagattaaagcaaatgggcgaaaaagaaagaatcacattcttctccttcacacccctagtagtgtcgcagttacaaaaagccaaaaagaagaaaaactcaacagatacttcactcaaaagctaggttcctttgttattagggagaaaagtctgaactggtcatctctggacctgccgacagtagatctctccgaccttgatgaagaattctttgaagaagaacttaaggaggctatctcagacttaccctcagaaaaggcccctggaccagaaggttatattggggcttttttcaagcaggcctggagcattatcaaaacggatctcatgcaagctgtttctttctttggagacatgggttactacagacttcatgatttgaactgtgcgcacatatgcctcattcctaaaaagactgatgcttccaaagctgaagatttccgacctataagcttaatgcacagctctgcaaagatcattgccaaactccttgcaaacagacttgcaccgaaattaggatatcttgtctcccaaagtcagagtgcttttattaggaaaagagcaatccatgacaatatcctattcgttcaaaacatgatcaaatcttttcatagagcaaaaaagcctactcttttcctaaaagttgacatttctaaggcctttgacactgttaattgggcatacctgcttgaagttctacaaaattttggtttcagccaaaagtggtgtaattggatctccaatctgttcggcacctcctcttcgatggtccttttaaatgccaccccagaatcagaaattgatcatgcaagagggctccgacagggagatccgctctcccctatgctttttattctcgcaatggaacctttatacaaattatttgagaaagcagaagctcatggcttcctctccaccctacaaagacaaagacgtttcagatgttccctctatgcagatgatgttgctcttttcttgaagccaaagcgagaagaaatgttagtccttcgtcgaattctctctgcctttgcagatgttagtgatttacacacaaatatggacaaaactgaaatctatcccataagctgcaatgaagttgatttggaagattgtctctccatctttcctggaaaggtttcaaccttcccctgcaagtacttgggcattcctattcacacaagaaagctgcgcaaaattgatcttcaaccgctggtagataaagtgggttcaagaatccctggatggaaagggcgcttcttcagttctgcaggaagagaaattctgaagagcttttctctggaaggggatgatcctgaaaaagtaaatgggggcagttgccttgtaaactggaatgcagtttgtagacccaaatctttgggaggtctaggaattctgaatttggaaaaattcgcaatggccttgagattacgctggctttggtttgaatggaaagatgaaatctattgcaagagatcaatctgcaagccaaaacctcggacagcatcatctggaaatggactcagaatggaatttatacagcaaaaagcgcctatgaagcacagttccaaggatcaaatcaactggcacgctagcatatccgaaggcgagttttggacctgcactggagttaagcagatctcccaggcatatagtgttactaagaaataccaacatggcgctcatgtccaccgcgtcatgcgcgattgcgaacgtgtggccggtgacggcggcaacggttggcatcaggagagcgacgaggtcggcaacgaggtcccgaggggcaccgcctatagaggcgtgcagctcggctggcgcatgcgcgcccaggcaggccaaagccgttggagaagcacttctccatggtggcaatcgctggtgcactggcacccacagtggcgcagacatgagggccaggccaaggcagtgctcgccagcaccagttag

SEQ ID NO: 39260 - DNA, 610 bp, Oryza sativa
  Clone ID: PAT_MRT4530_42818C.1
aggcttcatttcttcacctgatatcccgtgcgtactaatgagatgacctctcgagctacttaaacaagtagagacacttcttcatttgcagccaatttgattgcttgcaaaattgtgccaaattttcagtactagataagataggatcagagttcgaccagctgggatgcgttggcttctccttgccctgttcttggttgctctggtgagcaacggcgccgccgtccatggcgccttcaacaggttcagcttcccggaggacttcatcttcggcaccggctccgcggcttatcagtacgaaggcgctgtgaacgaaggcggcagagggccgagcatctgggacacgtacgctcacattccaggcaaagttgaagatggtagcaacggggatgtagcagtggacttttaccatcgctacaaggaggatctgaacttcgtgaccgacatgaacatggacgccttccgtttctccattgcttggagcaggatcctgccaaatggaaccatcagtggaggaatcaacaaagaggggattgctttctacaacagcctgattaacgaggtcatatctagagggttgaagccatttgtcaccatcttccatttcgac

SEQ ID NO: 39261 - DNA, 1173 bp, Oryza sativa
  Clone ID: PAT_MRT4530_42819C.1
atggtggaggcatacgacgcagctcgtattgacttccatcagatggtgcgtcgcggcatggtggagaacaacatgaagatcctggagctgcgtcaggagaacctgcagctcaagaaggacctcgacgcgttggaggcgcagctgcatcagctcaagatcgcccagggagaggacagccgtcccaagcgtcgccgcgtctgccgcagccagaagatcaccgcccgcaagagcacctccaggcccgagcttattcgtcagtccctggcgtggacttgcttcgtcgagacccctcgtgccgagcctgcgcccgtggttccccaggagggggaagcctccggcgttggtagctcggaggtcgtgtggggcatggttatgccgatggtgacgaccaggagaaatgttaacaccggtgaaggcaaccaacccgagggcagctaccccaacccccaaggcaacccacctccaccaccaccaccagacaccaacgccattctcacccagatcctcgcccagcaagccaacatgatgactgctttcctccaccacctccaaaatccgccacaacagaatgctccaccaccccctccccaacactccaaactcgccgaattcctccgcatccgcccacctaccttttctagctccaacaaccccgtggatgcgttggattggttgcatgccgtggggaaaaagctagacacggtgcagtgcagcgatgaggagaaagtcgtcttcgccgcccatcagctgcaggggcccgcatctctctggtgggaccacttccaggctacgcagcccgagggacagccgattacttgggctcgcttcaccgccgctttccggagaacccatgtgcccgccggagtcgtggctctcaagaagagggaattccgagagttgaagcaaggcaaccgctccgtgatggagtatttgcacgagttcaacaatctggcccggtacgctccggaggatgtgcgggaagatgaggagaagcaagagaagttcttggcaggaatggaccccgagctgtccgtccgtctagtctctggggactatccggattttcaacgactggtcgacaagagcatccgcttggaagctaagcacaaggagctggaatcgcacaagcgccgcttggcgaatttccgcaatcaacagggtgctaaccagagg

SEQ ID NO: 39262 - DNA, 210 bp, Oryza sativa
  Clone ID: PAT_MRT4530_4281C.1
cagttcttcttttttacttgatgatgtttttcagagtcaaggacaaacggggatgcggggcacaactcctcccgaagtgccaaccgaacggcgtacgaactcgcagctacatacaaaaacgacgagacaggaattgatcttaggatacacctaccgagctgagaccctatgagccctgtgggtgaagaaagtaccaaaaggttgggcatg

SEQ ID NO: 39263 - DNA, 299 bp, Oryza sativa
  Clone ID: PAT_MRT4530_42820C.1
aaaagcaaaagaaaagccatccctgggcttcagagaagcccctaaacagatccccttttaacaggtaaggggattcccaaaggggaaaaaaaggggaaaatgggtgaacattttaaggggttttatcaaacataattgggggaatccgggaaaaaaaggggtttttagattccacaagtatccggggggaatctcctttaggggggttttcattttggggaggggccaaacgaaggagggactgaacccgaaagaaatttttacgggtaaccccccgacggggcttttgaaaaaccaac

SEQ ID NO: 39264 - DNA, 4512 bp, Oryza sativa
  Clone ID: PAT_MRT4530_42821C.1
atggttacaccgatggtgacgaccaggagaaatgttaacaccggtgaaggcaaccaacccgaaggcagcaaccccaaccaccaaggcaacccacctccaccaccaccaccagacaccaacgccattctcacccagatcctcgcccagcaagccaacatgatgaatgctttcctccaccacctccaaaatccaccacaacagaatgctccaccaccacctccccaacactctaaactcgccgaattcctccgcatccgcccacctaccttctctagctccaacaaccccgtggatgctttggattggttgcatgccgtggggaagaagctggacactgtgcagtgcagtgatgaagagaaagtcatcttcgccgcccatcagctgcaggggcccgcatctctctggtgggaccatttccaggccacgcagcccgaggggcaaccgattacttgggctcgcttcaccgccgctttccggagaacccatgtgcccgctggagtcgtggctcttaagaaaaaggaattccgagagttgaagcaaggcaaccgctctgtgatggagtatttgcatgagttcaacaatctagcccgttacgctccggaggatgtgcgggaagatgaggagaaacaagagaagttcctggcaggaatggaccccgagctgtccgttcgtttagtctctggggactatccggacttccaacgtctggtggacaagagcatccgcttggaagccaagcacaaggagctggaattgcacaagcgccgcttggcgaacttccgcaatcaacagggtgctaaccagagggtccgctacaccaatccctacccagggggatcctcctcgcagcaacaacagcagcagcaacctcgcccagcgccccgacctcaattcgtggtgcgcgtcccacagccgcagcagcagcagaatcagcaagggacccgtgcaccccgtcctcctacgccaactgtgcagcccgttcaaggccgcagggacgcttcaggtccgcagcggctgtgcttcaactgcttcgagcccggacactttgcggataaatgcccaaagccaaggcgtcagcaaggccaagcgcctccccgctccaacaacggtggcaaggacgtcagccgtggtcgtgtgaatcacgtgacggccgaggacgtgctgacaactccagacgtcatcgttgagaagaaagacaagacgaagaggatgtgcgtcgactacagagctctcaatgaagtcaccatcaaaaacaagtaccctcttcctcggatcgatgatctgttcgatcagcttaaaggtgccactgtattctccaagattgatcttcgttccggatatcaccaattacgtattcgtgaagaagatattccgaagaccgcattcactacgcgatatggactgtatgaattcacggtgatgtcgttcggcttgaccaatgctcctgccttcttcatgaacttaatgaataaagtgttcatggaatacttggataagtttgttgtggttttcattgatgacattctgatatactcacaatcagaagaagatcatcagcaccatctccgtctggtgttgggaaagttgcgggaacatcaattgtatgccaagcttagcaagtgtgagttctggttgtccgaagtcaaattcttggggcacgtgatatctgctaaaggagttgctgtggaccccgaaacagtgaccgccgtcaccgattggaagcaacctaagacagtcactcaaattcgcagtttcttgggtttggcaggatactaccggagattcatcgagaacttctccaaaatcgctcgacccatgacacagttgttgaagaaagaagagaagtttgggtggagcccgcaatgcgaaaaggcgttccaaactctcaaggaaaagctggtttcctcgccagtgttaatcttgccggatactcgcaaggacttcatggtgtattgtgatgcttcgcgccaaggattggggtgcgtgctcatgcaggacggtcatgtggtagcctatgcctcacgccagctacgacctcatgaaggcaactaccctacacatgacttggagttagccgcagtgtcagatctgaaccttcggcaaaggagatggttagaactcatcaaggattatgatgtgggaattcactatcatcctggtaaggctaacgtggttgccgacgctctaagtcgaaagagccactgcaacactctcaacgtccgaggcattccacccgagcttaatcaacagatggaagccctgaacctaagcatagttggtcgcggattcttagctgcgttagaagccaagcccaccttgctcgatcaaatccgcgaggctcagaagaatgatccggacatgcatggactcctcaagaatatgaaacagggtaaagccgctggtttcacagaggatgaacacggaaccttatggaacggaaagcgggagaaatactggtgggttagcatgaagcgggaaattgcagagtttgtggctctatgtgatgtgtaccagcgtgtcaaggcagaacaccaacgaccggccggacttctccaacctctccaagtgccggaatggaaatgggatgaaattgggatggatttcatcaccggccttccaaaaacccaaggtggatatgattctatatgggtaattgtggatcgactaacaaaggtagctcgattcattcctgtgaagaccacctatggaggaaacaaactagcggagctctacttcgctaggatcgtgagtctccatggtattcccaagaaaatcgtatctgataggggaagccaattcacctctcacttttggaagaagctccaagaagagctgggtactcggttgaatttcagcaccgcctatcacccgcagacagatggacagaccgagcgtctaaatcagatcctagaagatatgctccgcgcatgtgtcctagatttcgggaagacctgggataagagtctcccctatgccgagttctcctacaataacagctatcaagccagcatacaaatggcaccatatgaagcgttgtacgggcgcaaatgccggacaccgctcctgtgggaccaagtcggagaaagccaagtgttcgggactgatatcctgagagaagctgaaactaaagtcagaatcattcgggataatctaaaggtggcacagtcccggcagaaaagttatgcagataaccgtcgccgtgatctggaattcgcagtggatgattttgtgtaccttcgggtcacgccattgcgaggtgtacacaggtttcagacaaaagggaagctcgcacctcggtatgtgggtccctttcgtatcactgctcgacgcggagaagtcgcctaccagctggagttgcccgcctccttgggcaacgtgcatgatgtgttccatgtgtcgcaactcaagaaatgtctccgagtgccatccgagcaggccgactcagagcgaattgaagttcgcgaagacttgacgtatgtggagaagccagtgaaaatcctggacaccatggagcgcaggaccaggaaccgagtaatccgtttctgcaaggcgggcccgcccgccgctctcgctgacgggtgggacccacctgtcatcgccctcctcgcgccgcgcccgccgccgcgcccgtgccctagcgccgccgccgccgcgaatcccgccgctcccgtccgccccgcgtgcaatcaagaggggggaattactccccgtaatcccctcccccgtttccccctctttcccctctctctctccctcggattcgctcggaatcaatcccgcattcatcgccggcgcaatcaatggcggccgaatcctccgcgcgcgattcctccctccccggccgctctttccttcccccggcgctatttaaacgttgcccgagctccgctctttcgtttccgccgctcgccgctcgctctcgccgtcggaatcgtgctcgcgccgtgctcctctctctccgccgtcgccgccgagctccgttgcgccrccgtcgtcgctccggttctcctcccgactcggcgacccctccctcggcatcgccgcatcgccgtcgacctcgtccgcgcctccgtttcgctcgccgactgccggagcgccgtcgtcatcgtcatcccgaaccgcgccgccgccttcttccgctccgtccgccgtttccgccgccttcgctgtctcggggtgagccgtggaccgtccccttcgtttcccccttccctcctctctctcgggtgccgctccgccgcgccgttggtcgccggcagtgaccatcggggcgcgggcgcgccgctcccgtcggccgtgccggcgaggccgccctcgggcgcgccctcgcggctgccaagtgggcccggccgtcagccgcccgcgcccgcgggtgcggctgacgcgcgggacccacggcgccgaccgccgccagccgcgtgcgcccggtccaccgtggaccgagcggctgacgcgtgggccccacttcccgtggacccggtccgcgcgcccgcccctcggctgacgcaataa

SEQ ID NO: 39265 - DNA, 531 bp, Oryza sativa
  Clone ID: PAT_MRT4530_42822C.1
atggcgccgatgcggctgtggtggagggaggcaccagctggtggcagcagagggaacctgctcccgtgcggcaggaagattagggtttgggcagaagggcgtgggagaggaggcgttggcgcgtcgcaggagtggggaggcagggagcgaggagatggagggggcgcggctctccgctggggcgacaacgtctccgcttgcatctgtgtctgctggccaccgcctgcctcctccgcgctcgacggccaccgccgccgcttccccttccgcttccacacccaccggctgcctcccgccgtcggccacttgcgcccgctacttgggcactcctcctcccctccgccccttgcgccgcccgcaccgctcctccgactgcgccgccacccgtgccgctcctccgaccacgccacccctccacctagctactcctccgactgcgccgtccctctgatcggccctcgtcctccccgtcgtctcggcggtagagaagagataaaggatgttggtatatggaggatgcaatatggatga

SEQ ID NO: 39266 - DNA, 510 bp, Oryza sativa
  Clone ID: PAT_MRT4530_42823C.1
gcacgaggctttgtttaatcttgtgaatttgatgtgtgattgagtttctagggtcagagcttcaagtgtgattgaagtagatctacattttgtgtgagattatgcagagtaaaaacgacgtagtattttctttcataatacagtttgtcacgcttcatttatttttcttctggagcacacacacgttgattttactgcttaaatgatatttggaatacctgatgggaaatccactgctgagtcctatttaacagaaattagtgagatgctttttgtaaaatggaacatgatactttctgccaaatgaaacatcttttagccgccctacttgtttcttcacagtgaccggtaaaatactcccgcagtgacatgtacaacaagctaggaacataaacttaatatgtactagaatgtttaggactgtccttatagattcacatgtatagtttttttaatcaaactagcatgtggtcattatgataattcatgtgctgaatttagcatttcaga

SEQ ID NO: 39267 - DNA, 342 bp, Oryza sativa
  Clone ID: PAT_MRT4530_42824C.1
atgctggaggccgtgatcccggcggtgtggagcgccgtccacgggtggttcacccccgcggtgctcttcctcgtcctcaacatcgtcatcggcaccatcgcggttacttccaaggtcaccgcctcctcctcgacggcgggcggcggcggcgaggggccgctctgcccctgctgctccgaggcggccgagtggtgggctggggtgcttgatctgggcgcccgcgatgaggcaacaacggcggggggggtaaagtgtggggggcgggaagagagccccaaggtcgagggagtatcggagggcgagttagagggggggtcggtgtttcatgctgtacacactgag

SEQ ID NO: 39268 - DNA, 1238 bp, Oryza sativa
  Clone ID: PAT_MRT4530_42825C.1
cccacgcgtccgcccacgcgtccgaccgaattctcccgagctccggcgacgtggtcgcgcattcctcttctcgccggcagactcgccgccgtcctccgccgcccctctcgcggcgcagcgattcgtctccctcctccgcaaccgcgcccgagctcccccctcctccccgcatccggtggatggcctcttccgcgccgtccgcggcggcgggggcgaccccgccggaccccctccgccgcgaccgcatcctctccagcaagctctacctcgacgtcccgggctccaaggctccggtggtgtactcgccggcgtacgacatcgccttcctcgggatcgagaagctgcacccgttcgattcctccaaatggggccgcatatgcaagttcctcaccaaggaagggcacctggagaagaaccgagtggtggagccattggaagcgaccaaggacgatttgctggtggtgcactcggagtcgtacttgaacagcctcaagagcagcctgaaggttgcgtccattgtagagcttcctcctgtggcattcattcctaattggcttgtgcagcaaaagctactgtaccctttcaggaaacaggtgggtgggtcgattctatcggccaagcttgcacttgagagaggatgggccattaatgttggcggagggtttcaccattgttcggcagagcaagggggcgggttttgtgcatatgctgatatttctctctgcattcagtttgcttttgtccgtctaaatatttcaagagtgatgatcatagatctggatgcccaccaaggaaatggccatgaaaaggatttcgctaatgatggaagagtttacactttggatatgtacaatgctggaatatatccctatgatcatgttgctaagcggtatattgatcaaaaagtcgagctagttagtgggacaaagacagaagactacttggatcaacttgacaaggctcttaaggttgcagaaagtagatttcagcctcagttgattgtttacaatgctgggacagatatcctggatggcgatccattgggaagattgaagataagccctcagggcgtggtgatcagagatgagaaggtgttcaggtttgcaaaggatcaaagcatcccactactcatgttaacatcaggaggatacatgaagtcgagcgcccgagtgatcgccgactcgataatcaatctctcgaataaaaacttgatagagcttggtagccagcttggctga

SEQ ID NO: 39269 - DNA, 487 bp, Oryza sativa
  Clone ID: PAT_MRT4530_42826C.1
tggtttttttaatttttttggttttttttttttttttttttttttttttttttttttttttttttttgggacaagggggggcataaaatcaacatttgggggggttttattttacaaaacacccccatgcaaggggccattaaccaccaacccagttttcctaatttaagggggaaaaaaaaaaagggggacctttcctttttccaaaccctcccaggttggttggcatcacaaaactaaacagggggggggaacccacaccaacgcattgatcccgtttgaattgcccccgaaaaagcttaaattaaaaggatgaggaaaaggggtcaaaaaagggggggtggaacgggtccctaagggggggggccccaatggtggggggccccttgccgggggggggggcctgcacgggaaaacccaggaaggggaccctggcgaggggggcctgcttaaactccggcagggggagccgcttttttttttttcg

SEQ ID NO: 39270 - DNA, 3455 bp, Oryza sativa
  unsure (1)..(3455): unsure at all n locations
  Clone ID: PAT_MRT4530_42827C.1
atggagttctccggcggcgcgaccgtgtcggcgccgttcggttgctgccgtgcggcgtggggcgccgcggcggcgggtgcgggggcggagggaaggagcaggagggttgtgccgcgcgcggtggagccgcggcggcgcgggcggtggatggtgaggtgcgtggcgacggagaagcacaaggacgcggcggcgcggcgcggcggcgtggaggtggagttcgccgacgaggaggactacgtcaagggcggcggcggcgagcttctctacgtgcaaatgcaggcgtccaagtccatggacagccagtccaagatctcctccaagctgctgcccatacccgatgaaaattcagttcttgatttggtcatcattggctgcggtccagctggcttatccctagcagcagagtcagctaagaaagggctcaatgttggtctcattggccctgatcttccattcacgaacaactacggtgtgtgggaggatgaattcaaagacctgggcctggagagctgcattgaacatgtctggaaggatactatcgtgtacctagacggtaacaagccaataatgattggccgtgcgtatggcagggttcacagggacttgctgcacgaggagttgctgagacgatgctatgacgctggcgtcacatacctcagctcgaaggtggacaagatcatggaatctcctgatggacatcgggtagtctgttgtgaaggggattttgagggaatgttcggggttacgaatgttgcatctggggcaggaactggtaggcgggtagggaaagggaaagccgttcctcgtgtttgtgtgcagcctgcatatcctgtcgaattctaggcgtacatcaatccacatgctcccagcctaatggttttcctggactacagacagtgcttcaaacaccaatcctcccatcctgtgcagggagatccagcggtcgtctatgccaaggccgggtcatatctcaccggagaagtgcaggcgggcaggatgcaaggaggagggccactcagccccgacgagcaccgggccacctcgccgccggggataatgcaccaccagccggcgatgacgatcgtcgtcgccgtggaccgtgaccggaacagccagctcgccgtgaagtgggtcgtcgaccacctcctcaccggcgcctccaacatcatcctcctccacatcgccgtccacccccctgccgccaaccatggattcgccatggccgaggcgacgcatggcgcgttggaggccgagatgagggagatctttgtccccttcagaggattctgcaccaggaatggggtgcatgtatcggagttggtactggaagaggcagacgtgtcaaaggccttaatagagttcatcaccgtgaacaagatccagagcatcgcgctcggcgcatccaacagaaatgcattcaccaagaaattcaagaacgccgacgtgccgtccagcctgatgaagggcgcgccggactactgcaacatctacgtggtggcgaagggcaagtcggtgaacgtgaggctcgccaagtgcggcgtcgatggcggttgcggcggtggcggtggctacgagggcgactcatcgatcaggagcctgtacacgaggaggtgctcgagggggaagctgccgccggcgacgccgtcgccggactcgtcgaggcggtcggtggacagtcgcaccctgccggagctcaccacgcggccgccgttccgcgagcgctcgctcccgtcctcgtcgtccaagcccgtcgtgctgtccagcagggcggcgcccgactgcggcggcggcggcgtcgacgggtcgtaccgctccacgaggcggtccgcgtcgaacgagtccttcgtgggcgacctcgacttcggccagagctcgcgcttctcctccatggacttctgcgacagcctcgacatgtcgtcgctctccgccagcccacgggagagcagctcgcctctctccgccccgcagcgcgaggtggaggtggagatgcggcggctgaggctggagctgaagcagacgatggacatgtacaacgcggcgtgccgggaggcgatcaacgcgaagcagcggaccaaggagctgcagctgctgaagctggaggaggcgcggcggctggaggaggcgcggcacgcggaggaggcggcgctggcgatggcggagatggagaagaccaagtgccgcgcggccatggaggcggccgaggcggcgcagcgactggccgacctggaggcccagcggcgtcgcaacgccgaggtgcgcgcccgccgcgaggccgacgagaaggtccgcgccctggacgccatctccagccacgacttccgctaccgccgctacaacatcgacgacatcgagctcgccaccgagcgcttctccgacgagctcaagatcggcgagggcggctacggccccgtctaccgcgcctccctcgaccacaccccggtggccatcaaggtgctccgccccgacgcgcagcagggccggaagcagttccagcaggaggtggaggtgctcagctgcatccgccacccaaacatggtgctcctcctcggcgcctgcccggactacggctgcctcgtctacgagtacatggacaacggcagcctcgaggaccgcctgttccgccgcggcggcacgcccgcccgatcccgtggagccagcggttcaggatctcggcggagatcgccaccgcgctgctgttcctccaccagaccaagccggagccgctggtgcaccgcgacctgaagccggccaacatcctgctcgaccgcaactacgtcagcaagatcagcgacgtcgggctggcgcgcctcgtgccgccggcggtggcggacagcgtgacgcagtaccggctgacggcgacggcggggaccttctgctacatcgacccggagtaccagcagacggggaagctgggcgtcaagtccgacatctactccctcggcgtgctgctgctgcaggtgctcaccgcgcggccgcccatgggcctcacccaccacgtcgagaaggccatcgacgccggcaccttcgcccagatgctcgacgtcaccgtcaaggactggcccgtcgacgacgccatcggcttcgccaagctcgccctcaagtgcaccgaaatgcgccggagggaccgcccggacctcgccaccgtcatcctgccggagctcaaccgcctcaggaacctcggacacgcctacgaggcgcgcatgagcgccgccgccgccgacgccgccgcgcacgcccaggacaacgtcggctcgccgacggtggtgggcgcgtcgtggagaacggcggagagctaagctagcgggaggccgtgtcagttattttagagtcacaggagagggtggagttcacacggtacatttacggtctttttttgttcggtgtaaatccttaaataccttgggtgttttgtacagttgncaaaaaaaattaacatggttcttcgggtgggttgg

SEQ ID NO: 39271 - DNA, 276 bp, Oryza sativa
  Clone ID: PAT_MRT4530_42828C.1
acatacacaaaacattttttttatttcgcaaacggcagtacatagaggagagaccacatgaatttccagccaccatgcttgtcacctgtttcacacagtgttctcacaatctctctcacactctgaaggatggagtcacactcacacaggcatgagccattgcactggatggactgtttatatattcatcatgtagacaggctggtgcattggcaattcagtcatagagcggcatggccttagcagaagcaggggttgcacctgccgctggagcca

SEQ ID NO: 39272 - DNA, 126 bp, Oryza sativa
  Clone ID: PAT_MRT4530_42829C.1
atggccaacatggggatgacatcgcccatcagaggtgacgaagatattagtggtggtaaagacaacgaggcagctggtaaagaagacgaagacgccattagcggtggcataataaaccagcggtga

SEQ ID NO: 39273 - DNA, 2565 bp, Oryza sativa
  Clone ID: PAT_MRT4530_4282C.1
atgagcagcatgaatgctctgcttgtgacgctgacaaacatggatgggctcagcgatcaacaaaaggagtggaggaacaaggatgcaattgagcatcgtgacaggtataagctcagtgagtctgtccccacggctacaccgactcatgttgttgccattgatcctcagcatctagcactgaatgaagaggaagatggacttgtaggcattgaaggtccgaagcagaaaatcataagaatgttaatggatgaagaggagggatcacggaaactcaaggtgatttccatcgtgggctctgctggtattggcaagactacccttgccaagcaagtgtacctggaaatcaaaggcagatttgattgttcggcttttgtgtccttgtctcaaaatccaagcatgaataagatcttcacacatatactttcacaggtggggttcaaaacccgaagacctttgcaccgtgagtatgatctcatcgatgaacttaaacaatatctcaggggaatgaggtacctcattgtgatcaataatatttggagtgaatcggtatgggatacgatctgcttggcttttgcacttcgtaaatgtggtagtagggttataataactacatgtattgaggatctagggagtgtatgccgcccaaacttttatgggcacatctacaaggttgaaccacttaatgattttgactcgagaatgttattcttcagaagagtttttagtaatgaggatgcttgtcctgatcatttaagaaaagtatcagaggaaattttaaggatgtgtggaggtgtaccattagcaataactagtgttgctagcatattggctggtcaaggtgacatgatgatcgagaaatgggagaggatactaagctctcgtggttatgagttggaaacagatcctactataggatggatgagacatgttctgagctttagctacagcaatctttgtcctgaacttaggacttgtctattatatctttctacatttccagaatattgttcgattcgcaaggatgatctgatcagacaatggatagctgagggtctagttaaggagaaatttggatgcgatcagtatgaaattgcagaaatttacttcaataatctgattaaaagaagtataatcaaccctgttgatatcgatgattgtggaatggtgatgtcttgtcgagtgcatgatctgatgattgatcttatcatatcaaaggccattgaagaaaactttattgctatattagatgatcagcatactatgagaggatctcatgaagcacgtcgatttacccttcacttcaaccgagacctggaaaatacagagcagaacttggtgctgacaagatcagttcaccaccaaactcgatcaattagctttttgggtcctattcaatgcatgcttgttatatcagagttcaagtacttgcgactcctacagattgaagtttattactcaaacattgacagctatgatttaactcatatgtgtgaatttttccaattaagatacttcagaatcagaggtatcctctgcaaacttccagaaaagattggaggactcaaatatctggagacattcgatatagatgataacgtgaaaaatattccatcagatgtttgtaagttgtcatcaatggcacatctgactttaccaaagcatgcaaagattcccagcggcattgataaattggtagccctcagaactctgaaggtctcaactagctatgatacatcaatagaattctatgagggctttggctctctgagaaagctaagagagcttgagcttggtgcgactaattacatgtcaagagacaaggttgtttcactggctgcatctctcatgaaacttggaagctgcagtcttcggtccctgattcttcgcaacggtgacttatcacttgaggccggtgaccgcctgaatttttggtcccctcctccgctccatcttcgcaggcttcatgttttcgaggtcgtcttctcatatgttccagattggatcgcaaaacttgataagctcacaagcatggttattcgtattcgcgagatctcgaaggatgggtttggtgttcttgcaaggttgccttgcctccttttccttagattgagtgttcatcgtgtcaaggaagaagacgccaccattgttgtctgcagtaggacattccaacatctgaaggaattttggttcagatataaggtgccatgcctggtgtttgagccattggcgatgcccagactgcagatcctgaatatacaattcgacgaagaatgcctgtatggaagggatgatggtgtaccatgtgaaccggctggcatcgagcacctgactaaccttatgcaaatctctgcacatattcatctagctcaccattggatgtggcaaactccggccttgccgcgaagaaaggttaagcattttagtgaaagacatgatgaggatggccatggccaggttgaagaagaagctccagtgtacaaaaaggcagcggaggccatgttgacaagagcaaccagcaagcatcctgggattcactatgttaatattcagtttatacagatgtaa

SEQ ID NO: 39274 - DNA, 657 bp, Oryza sativa
  Clone ID: PAT_MRT4530_42830C.1
cgaacccgacggcgccgacggcgtggtgcggcggcgaccctagcggcggctagaggcggctggagcaatgaaaaaaaggcggcggcgggtgggagcacggtgcgggagcgatggggagcttgggagaggccgacggaaaaaaggaaaatgaggaggaggatgtgggatgaattatataggggcggagaggtcgggaacggccgggagtggctcgatttcgccggagttagtgggggaagttggaggtggggagagagagagaggcgggattcgaatttgaatcccgaccatctcgtgacgtgggcgcgagcgggagtgagggcgtggacgcggggaaggcggggcgtgtgggggtggggcgcggggaaggcggagaaggtgggcggcgcgcgcgtggcgtggctgtcgccggctcggggaggcggccggaggttggggaagggactgacaggtgggccccacctgtcagcgcccgagggagatagggggaggcggcctggacttcgggaggagaaggggaagcggaccggcccgatatgggaaggggcgcgggaggaggaggaaatgggccgacagcccatttggggaaaagaaggggaaaaaaggaaaaaggaaaagaatttccagggattaaatattgcttgtgctcaattttaa

SEQ ID NO: 39275 - DNA, 310 bp, Oryza sativa
  Clone ID: PAT_MRT4530_42831C.1
gtcgactctagaggatccccgcttttctgagcaacgcaacaagatctccgacattaccgacgacgttatcatcgccgccttcaccaagggaattcgtcacgaagatctagtcggcaagttcgggcgcaagcctcccaagacgtttgcagaacaatacgccaagaacgcacgtaagaaccacgtaggcctcgacggagatcaaagcacgtcgaagaagaagacgatgacgatgatgccccgactggttttcaagaccatcacaaggaactcaaccacatctttggcggacccctggcttatgaatctaaga

SEQ ID NO: 39276 - DNA, 2655 bp, Oryza sativa
  Clone ID: PAT_MRT4530_42832C.1
atgtccctaaagagatgggcaaagggcatctgctcagaagcaaaaatcaagtatcacatggcgctcgacataattcagaggcttgatgtagctcaggagcgccgggagttaacgcaggcagagtacaggttgagactgggcctaaaaagaaggctcttcggatttgcggtcatcgaaagagcatggaagaagcaagctgcgcgcttaactaatattaaagaaggggacgccaatacaaaatacttccatcgtaggataaatgcaagaaaaaggaaaaatcacatcttccgcttaaggaagcagaacggctgggctgtcacacacacagaaaaggaacacaccattgcagaacacttccggcaagtcatgggaagacctgagccaagagagtgtgatctcaactgccagtctctagggctcacccccgtcgacctctctgggttggacgaccccttcacaaagacagagatccacaaagcgttaagcgaaatgcctgtcgacaaagcaccaaggcctgatgggttcacagggaaattcttcaagcactgttgggacattatcaaaagcgacgtagtggccgtcttcaatgctctgcacgacatgaggcacacacactttaacctcctaaattccgccaatgtagtgctcatccccaaaatggacggcacggagggaatcggagactacaggccgattagcctgattcatggctttgccaagctcttctccaaggtcttagccatcaggttgcgaccactgatgcactcgctaatcccgacaaatcaaagtgccttcattcgcgaacgaagtatacatgacaacttcatgtacgtcagaaacatggtcaggaaacatcacaggactagaaggttgatccacctcttcaaacttgacatctccaaggcttttgactcagtcagatgggactacctcctcacgctccttcaaaatagaggatttccacaaaggtggcgggaatggattgcgggccttctatcaacttccacttccaagatcatcctaaatggtacaccgggagaggcaataaggcacggaaaaggcttacgacaaggcgaccccttatctccattgctcttcattctagcaatcgacccactccagcgccttttggacaaggccactgatctaggggcgataagtaaactgagaggaagggttatttgcttccgcacatccatgtacgctgacgatgcggtagtcttcataaacccacaaaaagaggacgtacgagttttcaccgaccttctacgtcgcttcgggcaggtgtctgggttatgcactaatctgcaaaagtcccacgtggtgccaatcaggtgtgacaacctggatcttgacgacatcctggatggcataccagtaaccagagcaaatcttccgatgaagtatctaggactacctcttaccacagcaaggctaagaagagtagacctgcagcctctcttcgacaaatcaatgaaccgcatagccgggtggaggggaagacatattgggcttgcagggcgttccaccctagtgaaatcggtgctcacttcacaacctgttttcctcctgacagggctaaaagcgtcaaaagagtctcttgaggctcttgacaagcagagaaggaagtttttgtgggcggggggagaagccttgacgggtggaaaatgcaaaatcaactggacccgaacctgcctacccactggtttcggaggtctaggaatcctaaaccttgagaagtttgcaagagctttgcgcctccgatggctttggcaggaatggaagtcaccggagaaagcatgggtgggttctggtacgccgtgcgatgacaccgataagctcctttttgcggcagcgacatccataacaatcggaaatggggcgactgtgagtttttgggagtcagcctggtggcaggggagaaggatgaaagatgtggcaccgctagtctacgcggtctccaagaaaaagaatagtaccctccaacatgccttgcaatcagatcaatggctgctcgatctgggattaccagtggacgtgggctggacaacagagctgattgaccaacttgtcacagtttggaccgccatccagacaatagagttgacagaacatgagaacgaccaaatatgttggaagctcactagccacggtcaatatacgacagcatcggcctataatgcacaactacttggaacaacgaccaacaatttcaacaacctaatttggaagccctgggctcctcgcaaatgcaaaaccttcgcctggctggtcattcagaatagagtctggacctctgatagactatgtactcggggatgatcaaatagatccatatgtcccttatgtcgtcgggtccaggagacggctctacacctcctcgcaggctgctgctacacaaagagaatatgggcaaccctagcggaatggacggcgtgcaacaatattcaccccaaccattgacggcaggcttcgtcggtgttagaatggtgggatcaaaccacaagtgtaaaagaggcacccaaaaaggctctacgctccctaacgctcctagtcgcctggttgatctggaatgaaagaaatcgcagaatattccagcataaggagctcccaccgagtggtcttctgacaaaaatcaaggacgaggccgagtgg

SEQ ID NO: 39277 - DNA, 533 bp, Oryza sativa
  Clone ID: PAT_MRT4530_42833C.1
ccgggctgcaggaatcggcacgagggtttgatcgatggacactccatagaagcagaatccagttccagcaatccaactttgcttggctcctgttctgtggaaatacgaatatagattgacttgcagaggatactaaatctataatcatcatactgaaatagttgtgtgtttattgtgcaacttgtgttgtttgatcagtggacgctcactacagtagaatgcattgatttgctcctgttatgtgtagactgtagtaggagtacagatttgacttgcacaggatacttaatagatacttctcaaattgaactggttgtgggtttgtgcaacatataaatatataatggtcattttgtcctaatacagttatactctacgttagtcaagaactttcagatggtttcgtagttaatatgtgtttcagagttgggtatagtttgaaggtccacttattcattgcttcctgattagtctagtaacatgtgaatatacaagataatcttaggatatccaaatgtccttacttcccaatt

SEQ ID NO: 39278 - DNA, 1971 bp, Oryza sativa
  Clone ID: PAT_MRT4530_42834C.1
atgactggcttcgtcttggagctgcggggcatgtgcgtggtcttggggtatccacatggagtggattaccaggccaggccgctcccggagcaagagggtgaggatgcagagcctcacgctggttgggaggtcactgcagtgattctctccggctctcccgagcggacttcgctggcagtcaccgcgggtggggattccttccccgccgcttgccagaacgccgctctcctcgccatcggcacccttcaccagcgctacccggacgagttgcagcactcgccctaccgctaccaccctcgtcgcggaggagcccgcgactacgccaccttccgagacgccagctcggaggatgacgccaccgtcgtgcacctggcacgcatggtggaggcgtacgacgcggctcgtatcgacttccaccagatggtgagccgtggcatggtggagaacaacttgaagatcctggagctgcgtcaggagaatctgcagctcaagaaggacctcgacgcgttggaggcgcagctgcaccagctcaagatcgcccagggagagatctgccgccccaagcgtcgccgcgtctgccgcagccagaagatcaccgcccgcaagagcacctccaggcctgagcttgtccgtcagtccctggcgtggacctgcttcgtcgagacccctcgtgccgagcctgcgcccgtggttccccaggagggggaagcctccggcgttggtagctcggaggctccttctctgtttgctggttctgggtggggttttcagatggtgacgaccaggagaaatgttaacaccggtgaaggcaaccaacccgaaggcagcaaccccaaccaccaaggcaatccacctccgccaccaccaccagacaccaacgccattctcacccagatcctcgcccagcaagccaacatgatgaatgctttcctccaccaccttcaaaacccgccacaacagaatgctcccccaccacctccccaacactctaaactcgccgagttcctccgcatccgcccacctaccttctctagctccaacaaccccgtggatgcgttggattggttgcatgccgtggggaagaagttagacactgtgcagtgcagtgacgaagagaaagtcatcttcgccgcccatcagctgcagggacccgcatctctctggtgggaccacttccaggctacgcagccagagggacagccgatcacttgggcccgcttcaccgccgctttccggaaaacccatgtgcccgccggagtcgtggctcttaagaaaagggaattccgagagttgaagcaaggcaaccgctccgtgatggagtatttgcatgagttcaacaatctggcccggtacgctccggaggatgtgcgggaagatgaggagaagcaggagaagttcttggcgggaatggaccctgagctgtccgtccgtctagtctctggggactatcctgattttcaacgactggtggacaagagcatccgcttggaagccaagcacaaggagctggaatcgcacaagcgtcgcttggcgaatttccgcaatcaacagggtgctaaccagagggtccgctacaccaatccctacccagggggatcctcctcgcagcagcagcagcagcagcagcaacctcgcccagcgccccgacctcaattcgtggtgcgcgtcccacagcagcaacagcagcagaatcagcaagggactcgtgcgccccgtcctcctacgccagctgggcagcccgttcaaggccgcagggacgcttcaggtccgcagcgtctgtgcttcaactgcttcgagcccggacactttgcggataaatgcccaaagccaaggcgtcagcaaggccaagcgcctccccgccccaacaacggtggccaggacgtcatccgtggtcgtgtgaatcacgtgacggccgaggacgtgctgacaactccagacgtcatcgttgaagttcagaactgcagcagatag

SEQ ID NO: 39279 - DNA, 1980 bp, Oryza sativa
  Clone ID: PAT_MRT4530_42835C.1
atgactggcttcgtcttggagctgcggggcatgtgcgtggtcttggggtatccacatggagtggattaccaggccaggccgctcccggagcaggagggtgaggatgcagagcctcacgctggttgggaggtcactgcagtgatcctctccggctctcccgagcggatttcgctggcagtcacagcgggtggggactccttccccgccgcttgccagaacgccgctctcctcgccatcggcacccttcaccagcgctacccggacgagttgcagcactcgccctaccgctaccaccctcgtcgcggaggagcccgcgactacgccaccttccgagacgccagctcggaggatgacgctaccgtcgtgcacctggcacgcatggtggaggcgtacgacgcggctcgtatcgacttccatcagatggtgcgtcgtggcatggtggagaacaacctgaagatcctggagctgcgtcaggagaacctgcagctcaagaaggacctcgacgcagtggaggcgcagctgcaccagctcaagatcgcccagggagaggacagccgtcccaagcgtcgccgcgtctgccgcagccagaagatcaccgcccgcaagagcacctccaggcccgagcttgtccgtcagtccctggcgtggacctgcttcgtcgagacccctcgtgccgagcctgcgcccgtggttccccaggagggggaagcctccggcgttggtagctcggaggtcgtgtggggcatggttacgccgatggtgacgaccaggagaaatgttaacaccggtgaaggcaaccaacccgagggcagcaaccccaaccaccaaggcaatccacctccaccaccaccaccagacaccaacgccattctcacccaaatcctcgcccagcaagccaacatgatgaccgctttcctccaccacctccaaaacctgccacaacagaatgctccaccaccacctccccaacactctaaactcgccgagttcctccgcatccgcccacctaccttctccagctccaacaaccccgtggatgctttggattggttgcatgccgtggggaagaagctagacacggtgcagtgcagtgacgaagagaaagtcatcttcgccgcccaccagctgcaggggcccgcatctctatggtgggaccacttccaggctacgcagcccgaggggcagccgattacttgggctcgcttcaccgccgctttccggagaacccatgtgcccgccggagtcgtggctctcaagaagagggaattccgggagttgaagcaaggcaaccgctccgtgatggagtatttgcatgagttcaacaatctagcacgttatgccccggaggatgtgcgggaagatgaggagaagcaagagaagttcttggcaggaatggaccctgagctgtctgttcgtctagtctctggagactacccggacttccaacgtctggtggacaagagcatccgcttggaagccaagcacaaggagctggaatcgcacaagcgccgcttggcgaacttccgcaatcagcagggtgctaaccagagggtccgctacaccaatccctacccagggggatcctcctcgcagcagcaacagcagcagcagcaacctcgctccgcgcctcgacctcaatccgtggtgcgcgtcccacagcagcaacagcagcagaatcagcaagggactcgtgcgccccgtcctcctacgccagctgggcagcccgttcaaggccgcagggacgcttcaggtccgcagcggctgtgcttcaactgcttcgagcccgggcactttgcggataaatgcccgaagccaaggcgtcagcaaggccaagcgcctccccgctccaacaacggcgggaaggatgtcattcggggtcgtgtgaatcacgtgacggccgaggacgtgctgacaactccagacgtcatcgttggacggtcatgtggtagcctatgcctcacgccaactacgacctcatga

SEQ ID NO: 39280 - DNA, 200 bp, Oryza sativa
  Clone ID: PAT_MRT4530_42836C.1
atatggagggaaaaattatattattggaaatcattttgaggagctagactagcgggccttattaacaaggggatatggaccattacatggatgattaacatattaaatcctggtagctcccatggaaattaaaggtgaggggcagcagcaggaggcaaggcatgataagacagacctcccaattctcccatgggatggga

SEQ ID NO: 39281 - DNA, 1995 bp, Oryza sativa
  Clone ID: PAT_MRT4530_42837C.1
atgactggcttcgtcttggagctgcgaggcatgtgcgtggtcttggggtatccacacggagtggattaccaggccaggccgctcccggagcaggagggtgaggatgcagagcctcacgctggttgggaggtcactgcagtgatcctctccggctctcccgagcggacttcgctggcagtcaccgcgggtggggattccttccccgccgcttgccagaacgccgctctcctcgccatcggcacccttcaccagcgctacccggacgagttgcagcactcgccctaccgctaccaccctcgtcgcggaggagcccgcgactacgccaccttccgagacgccagctcggaggatgacgctaccgtcgtgcatctggcacgcatggtggaggcgtacgacgcggctcgtatcgacttccatcagatggtgcgccgtggcatggtggagaacaacatgaagatcctggagctgcgccaagagaatctgcagctcaagaaggacctcgacgcgttggaggcgcagctgcatcagctcaagatcgcccagggagaggacagccgtcccaagcgtcgccgcgtctgccgcagccagaagatcaccgcccgcaagagcacctccaggcccgagcttgttcgtcagtccctggcgtggacctgcttcgtcgagacccctcgtgccgagcctgcgcccgtggttccccaggagggggaagcctccggcgttggtagctcggaggctccttctctgtttgctggttctgggtggggttttcagatggtgacgaccaggagaaatgttaacaccggtgaaggcaaccaacccgaaggcagcaaccccaaccaccaaggcaatccacctccgccaccaccaccagacaccaacgccattctcacccaaatcctcgcccagcaagctaacctgatgaatgctttcctccaccaccttcaaaacccgccacaacagaatgctcccccaccacctccccaacactctaaactcgccgagttcctccgcatccgcccacctaccttctctagctccaacaaccccgtggatgctttggattggttgcatgccgtggggaagaagctagacacggtgcagtgcagtgatgaggagaaagtcaccttcgccgcccatcagctgcaggggcccgcatctctatggtgggaccatttccaggccacgcagccagaagggcaacctattacttggactcgcttcaccgccgctttccggagaacccatgtgcccgctggagtcgtggctcttaagaaaagggaatttcgggagttgaagcaaggcaaccgctccgtgatggagtatttgcatgagttcaacaatctagcccgttatgccccggaggatgtgcgggaagatgaggagaagcaagagaagttcttggcaggaatggaccccgagctgtctgttcgtctagtctctggggactatcctgattttcaacgactggtggacaagagcatccgcttggaagccaagcacaaggagctggaatcgcacaagcgccgcttggcgaatttccgcaatcaacagggtgctaaccagagggtccgctacaccaatccctacccagggggatcctcctcgcagcagcagcagcagcagcagcaacctcgctccgcgcctcgacctcaattcgtggtgcgcgtcccacagcagcaacagcagcagaatcagcaagggactcgtgcgccacgtcctcctacgccaactgtgcagcctgttcaaggtcgcagggacgcttcaggtccgcagcgtctgtgcttcaactgcttcgagcccgggcactttgcggataaatgcccaaagccaaggcgtcagcaaggccaagcgcctccccgctccaacaacggtggcaaggatgtcattcggggtcgtgtgaatcacgtgacggccgaggacgtgctgacaactccagacgtcatcgttggacggtcatgtggtagcctatgcctcacgccagctacgacctcatga

SEQ ID NO: 39282 - DNA, 1921 bp, Oryza sativa
  Clone ID: PAT_MRT4530_42838C.1
atgtcatggcacagggccggtgtcctgctgctaggggctcagtcctgcctgcctgtcccgggggttccggccatggccggcagcatcaaccgtcgtggtctggacctgactggcttcgttttggatctgcggggcatgtgcgttgtcctggggtatccgcatggagtggactaccagggcaagcagctcccggagcaggagggtgacgatgcagagccccacgctgcttgggaggttaccgcagtgatcctcactagctcacccgagaggacttcgttggcagtcaccgcgggtggagattctttctccgccgcttgccagaacgacgctctcctcaccatcgacactcttcaccagcgctacccggacgagttgcagcactcgccctaccgctacaaccctcgccgcggaggagcccgcgactacgccaccttccgggatgctagctcggaggatgacactaccatcatgcacctggcgcgcatggtggaggcgtacgacgcggcccgtatcgacttccatcagatggtgcgtcgcgggttggtcaagaacaacatgaagatcctggagctgcgtcaggagaatctgcagctgaagaaggacctagacgcgctggaggcgcagctgtgtcaactcaaggtcgcccagggagaggtctgccgtcccaagtgtcgccgcgtctgctgcagccagaagatcaccgcccgcaagagcacctccaggcctgagcttgttcgtcagtccctggcatggacctgcttcgtcgagacccctcgtgccgcacctgcgcccgtggttccccaggagggggaagcctccggcgtagctctctctctgtttgctggttccgtgtggggttttcagatggtgacgaccaggagaaatgttaacaccggtgaaggcaaccaacccgagggcagcaaccccaacccccaaggcaacccacccccaccaccaccaccagacaccaacgccattctcacccagatcctcgcccaacaagccaacatgatgactgctttcctccaccacctccaaaatccgccacaacagaatgctccaccaccccctccccaacactccaaactcgccgaattcctccgcatccgcccacccaccttctctagctccaacaatcccgtagatgcgttggattggttgcatgccgtggggaaaaagctagacacggtgcagtgcagcgatgaggagaaagtcatcttcgccgcccaccaactgcaggggcccgcatctctatggtgggaccatttccaggctacgcagccagaggggcagcctattacttgggcccgcttcaccgccgctttccggagaacccatgtgcctgccggagtcatggcccttaagaaaagggaattccgagagttgaagcaaggcaaccgctccgtgatggaatatttgcttgagtttaacaacctggcccggtacgccccggaggaggtacgggaagatgaggagaagcaagagaagttcttggcaggaatggaccctgagctgtccgtgcgtctggtctccggggactatccggatttccaacgtctggtggacaagagcatccgcttggaagccaagcacaaggaactggagtcgcacaagcgtcgcttggcgaatttccgcaaccaacagggggctaaccaaagggtccgctacaccaatccctatccagggggatcctcctcgcaacagcaacagcagcagcaacctcgctccgcgccccgacctcaattcgtggtgcgcgtcccacagccgcagcaacagcagagtcagcaagggactcgtgcgccccgtccccctacgccagccgtgcagcctggccaaggccgcagggacgttcaaggtcagcagcgtctgtgcttcaactgcttcgagcctgggcactttgcggataaatgcccaaagctga

SEQ ID NO: 39283 - DNA, 1029 bp, Oryza sativa
  Clone ID: PAT_MRT4530_42839C.1
atggtcgccggcggcggccataggcacggcggagcggcggccgggagaggggagggaagggggaaacgaaatgggcggtccacggttcaccccgggtcgacggcgacgacgggaacggcgaccggagcggaggaaggcggcggcgcggctcgggtcgacgaggacggcggtgttccggcggtcggcgggcgaaacggaggggtggacgaggtcggcgaggacgcggcgaagccgaagaaggcgacgccgaagcaggagaagatggtgacaaccaggagaagttctgctaccggtgaaggcagtcaccccgaaggcagcaaccacaacaaccaaggcagcccacctccacctcctcccccgcctccaccaccaccaccagacaccaactctatcctcacccaaatcctcgcccaacaggccaacatgatggctgctttcctccatcacatccaaaatccgccacagcataatgctccacctccaccaccacccccgcaacattctaaactcgccgagttcctccgcatccgtccgcctaccttctctagctccaataaccccgtggatgccttggattggttgcatgccgtggggaaaaagttggataccatgcagtgcaacgatgaggagaaagtcatcttcgccgcccatcaactgcaggggcccgcatctctatggtgggaccacttccaggctacgcagccagaaggacagcctattacttgggcccgcttcaccgccgctttccggaggacccatgtgcccgccggagtcatggcccttaagaaaagggaattccgggagttgaagcaaggcaacctctccgtgatggagtatttgcatgagtttaacaacttggcccgatatgccccggaggatgttcgggaagatgaggagaagcaggagaagttcttggcaggaatggaccctgagctgtccgtgcgtctggtctccggggattatccggatttccagcgtctggtggagaagagcatccgcctggaagccaagcacaaggaactggagtag

SEQ ID NO: 39284 - DNA, 2005 bp, Oryza sativa
  Clone ID: PAT_MRT4530_4283C.1
cgcacccgcccgggttcggcccgcaccaccctccttgttacagctgtgccgcctcttgcttcctcctcctcatcgtccgccatggcttctctcaccgatctcgtcaacctcaacctctccgacaccacggagaagatcatcgccgagtacatatggatcggtggatctggcatggatctcaggagcaaggctaggactctctccggccctgtgactgatcccagcaagctgcccaagtggaactacgatggctccagcaccggccaggcccccggcgaggacagtgaggtcatcctgtacccacaggctatcttcaaggacccattcaggaagggaaacaacatccttgtcatgtgcgattgctacacgccagccggagaaccgatccccaccaacaagaggcacaatgctgccaagatcttcagctcccctgaggttgcttctgaggagccctggtacggtattgagcaagagtacaccctcctccagaaggacatcaactggccccttggctggcctgttggtggcttccctggtcctcagggtccttactactgtggtatcggtgctgacaagtcttttgggcgtgatattgttgactcccactacaaggcttgcctctatgccggcatcaacatcagtggaatcaacggcgaggtcatgccaggacagtgggagttccaagttggcccgtctgtcggcatttctgccggtgatcaggtgtgggttgctcgctacattcttgagaggatcaccgagatcgccggagtcgtcgtctcatttgaccccaagcccatcccgggagactggaacggtgctggtgctcacaccaactacagcaccaagtcgatgaggaacgatggtggctacgagatcatcaagtccgccattgagaagctcaagctcaggcacaaggagcacatctccgcctacggcgagggcaacgagcgccggctcaccggcaggcacgagaccgccgacatcaacaccttcagctggggagttgccaaccgcggcgcctcggtccgcgtcggccgggagacggagcagaacggcaagggctacttcgaggatcgccggccggcgtccaacatggacccttacatcgtcacctccatgatcgccgagaccaccatcatctggaagccctgaagcggcttcttgacgccacgacatcctcgtcatcgtcctccccagctcgccgtgtcgctccggttgctccattgatcggacgatctggtgaattgcatttgtgctgggagaagtaaaaaaaaaaggaaagagaaaaaaaagaaaatcacgccaaaaaaaattctcattccatttcgatttggttgcatgctaccactactactacattgctcatctgccatttagattagctcctttttcttcgtcttttgggtgagtgcgtttgggtgctcttgtgtaatcctccaataatggccgtacctacggtacttgtcccatcctgtggatcatcgtcctcctttccacatgtggttttatcatcattgttattagtgatcacctttatataaagttcttgctgggcttccaatagccgtggcttttgcgttcaaaaaaaacaaaaaaaagaaacgtacgcgtgcgtgcatcagccgtgatgtgtcaacgttggatttcggtctcggtctatccttggcgtcgacaaggccctttgaattttattactagtctgtcctgttcaccgagtgtcattttgtgtactctgaataataatgctttgtaaaacggatttgctttttccgtagggacggatgttcttgattttcctatatcgtgatttatatatatggaaaaccgctgtctttttttgttcgatccagcctgtctgtgtgttcgatcgggttacatcttccgcgctcgttacatgtcgctctgactgatgcgaatatcttccatgtatggatgtatacgtctgtggcaaatgtgcacagtgttgcactttcagctagcgtgttacaggctataaccatcagag

SEQ ID NO: 39285 - DNA, 326 bp, Oryza sativa
  unsure (1)..(326): unsure at all n locations
  Clone ID: PAT_MRT4530_42840C.1
cccacgcgnccgcggacgcgtgggaaaaaaaaaaaaaaaattttaaaaaaaaaaaaaaaaaaaaaaaaagcgcgggggggaaaaaaaaaaaaaaaaaaaaaccccaacccaaaaaaaaaaaaaaaaggggcgcccggacacggggcacccggcacccgaccccgggccggcgccggaaccgccccccatgggggccccctggatgcacttccttgcccctcttttaacacctctttggtttggcaaacccttggctttccccatctaaacggcctttgggcacatctccctttcccccgctgcttaatcccgaaagggcccccacc

SEQ ID NO: 39286 - DNA, 2161 bp, Oryza sativa
  Clone ID: PAT_MRT4530_42841C.1
ggtggttgtactcagtcttgctcaatttttcccaagtccagaagaggagctccttggagatgaaggctttggtgtctagctcgtgcctgccgtcaagcgcctgtggtcgtcgccctagtcttccgttgtttcccgtttgtctttgtgtgctgggccttcgctttgaaatgttgttttttttgttttgtttgtagatggccggcagcgtcacccgtcgtggtttggacatgactggtttcgtcttggagctgcggcgcatgtgcgttgtcctggggtatccacatggagtggactaccagggcaggcccgttccggagcaggaaggtgacgatgcagagccccacgctgcttgggaggccactgcagtgatcctcgctggctctcccgagcggacttcgctggcagtcaccgcgggtggagattctttccccgccgcttgcaaaagcgccgctctcctcgccatcggcactcttcaccagcgctacccggacgagttgcagcactcgccctaccgctaccaccctcgtcgcggaggagcccgcgactacgccaccttccgggatgctagctcggaggatgacgctaccatcatgcacctggcgcgcatggtggaggcgtacgacgcggctcgtatcgacttccatcagatggtgcgtcgtggcatggtggagaacaacatgaagatcctggagctgcgtcaggagaacttgcagctcaagaaggacctcgacgcgatggaggcgcagctgcaccagctcaagatcgcccagggagaggacagccgtcccaagcatcgccgcgtctgccgcagccagaagatcaccgcccgcaagagcacctccaggcccgagcttgttcgtcagtccctggcgtggacttgcttcgtcgagacccctcgtgccgagcctgcgcccgtggttccccaggagggggaagcctccggcgttggtagctcggagggtgcgctgttgctcaccttccgccctggcccgtcgcagcggagaaatgttaacaccggtgaaggcaaccaacccgagggcagcaaccccaacccccaaggcaatccacctccaccaccaccaccagacaccaacgccattctcacccagatcctcgcccaacaagccaacatgatgaatactttcctccaccacctccaaaacccgccacaacagaatgctccaccaccaccaccccaacactctaaactcgccgagttcctccgcatccgcccacctaccttctctagctccaacaaccccgtggatgcgttggattggttgcatgccgtggggaaaaagctggacactgtgcagtgcagtgatgaagaaaaagtcatcttcgccgctcaccagctgcaggggcccgcatctctatggtgggaccacttccaggctacgcagccagaggggcaaccgattacttgggctcgcttcaccgccgctttccggagaacccatgtgcccgctggagtcggggctcttaagaaaagggaattccgggagttgaagcaaggcaaccgctccgtgatggagtatttgcacgagttcaacaatctggcccgttatgccccggaggatgtgcgggaagatgaggagaagcaagagaagttcttggcagggaatggaccctgagctgtctgttcgtctagtctctggagactatccggatttccaacgtctggtggacaagagcatccgcttggaagccaagcacaaggagctggaatcgcacaagcgccgcttggcgaatttccgcaatcaacagggtgctaaccagagggtccgctacaccaatccctacccagggggatcctcctcgcaacagcagcagcagcagcaacctcgcccagcgcctcgacctcaattcgtggtgcgcgtcccacagccgcagcagcagcagaatcagcaagggactcgtgcaccccgtcctcctacgccaactgtgcagcccgttcaaggccgcagggacgcttcaggtccgcagcggctgtgcttcaactgcttcgagcccgggcactttgcggataaatgcccaaagccaaggcgtcagcaaggccaagcgcctccccgctccaacaacggcgggaaggatgtcattcggggccgtgtgaaccacgtgacggccgaggacgtgctgacgactccagacgtcatcgttg

SEQ ID NO: 39287 - DNA, 1283 bp, Oryza sativa
  Clone ID: PAT_MRT4530_42842C.1
caatccttgccaacagggcaaaataatgatgcttccctccccaatccaaaatccgcaaaacttattgttccacacaccccccacaacatatacctggcggagttcctcggaatcgccccacttctttttttagctccaacaaccccaggatgcgttggattggttgcatgccgtggggaaaaagctagacactgtgcagtgcagcgatgaggagaaagtcatcttcgccgcccaccagctgcaggggcccgcatctctatggtgggaccatttccaggctacgcagccaagaggggcaacctattacttgggcccgtttcaccgccctttcgggagaacccatgtgcccgccggagtcgtggcccttaagaaaagagaattctgagagttgaagcaaggcaaccgctccgtgatggagtatttgcatgagtcaacaacctggcccgttacgccccggaggatgtgcgggaagatgaggagaagcaagagaagtacttggcaagaatggaccctgagctgtccgtccgtctagtctccggggactatccggatttccaacgtctggtggacaagagcatccgcttggaagccaagcacaaggaactggagtcgcacaagcgccgcttggcgaattgccgcaaccaacagggtgctaaccaaagggtccgctacaccaatccctatccagggggatcctcctcgcagcagcaacaataacagcagcaacctcgctccgcgcctcgacctcaattcgtggtgcgcgtcccacaaccgcagcaacagcagagtcagcaagggactcgtgcgcctcgtcctcctacgccaactgtgcagcctggccaaggccgcagggacgcttcaggtccgcagcatctgtgcttcaactgcttcgagcccgggcactttgcggataaatgcccaaagccgaggcgtcagcaaggccaagcgcctccccgctccaacaacggtgggaaggatgtcattcggggatgggtgaaccatgtgacggccgaggacgtgctgacaactccagacgtcatcggtggtacgttcctcattcatttcattcctgctaccatttttgttcgacttctggagcttcccactcgtttatatttgtgccattcgtggggaggaatcagtttgggatagaaaagcttaagaaaccctctgcttcataaccacccctggaggggttatgacaacaaagtattataattcctgccggccctatagaaattaaggggattcctttttccttccccctctctttgttccgcgcg

SEQ ID NO: 39288 - DNA, 172 bp, Oryza sativa
  Clone ID: PAT_MRT4530_42843C.1
atggagctcggcagttgggcaagcaaggtcgccgccaagtggaggaggctgacactgatgagagctgttgtggtggtacttgaccagatgtcgacgttgggggcgccgggcgataatcgggttggggaaaaggaagcgtggcaagggcgccattgcagatttgcagatatag

SEQ ID NO: 39289 - DNA, 478 bp, Oryza sativa
  Clone ID: PAT_MRT4530_42844C.1
aacatgggtactacaggtagagggggtcgaaggaggagggctactactacacacgcagcagaactcatgccgctgtatgaccttaagtgaggctgccagggcgaggctactcgcggcgcaactgtcgacgatgtgccaccatgagcaccagtggggcccatggtatccgcgtcggccagtacatagaggtagctggcttgcactgataggtagcacgatcacgccgatgctgtgttgaatgcagctagagagggatcaatgcagatagcgaatactgagatggatggaaaacagacactgtggcgaccaagtgctatatgatgactatgagccatctggacattagagactgaactaaaagggcggccgatgatgaggatgcagactcacatgccctacctggcgacatgtaccttgtcaatagccgactctattactgaggcagtggccgatcaatcgacagcgtacatgacacggt

SEQ ID NO: 39290 - DNA, 126 bp, Oryza sativa
  Clone ID: PAT_MRT4530_42845C.1
gaagagtgatgttgcaacataacatattgactgaacacaggcggtaaatccacgcaggattgatatttccgcacacgacgctggtacgagcatcacttatgggtaaacccactcgaataagaaaag

SEQ ID NO: 39291 - DNA, 184 bp, Oryza sativa
  Clone ID: PAT_MRT4530_42846C.1
gcaagaggaaacactaatattgtgttatatctaaaatgggtaatacaagatctgaggggttttcgcgcgttacaaaaatcatacctatggtgtcttactcaaactattaaaactgcggccttcattgattctcttttgggccccaataacaatttattaggactacttcgctttcaatcaaact

SEQ ID NO: 39292 - DNA, 243 bp, Oryza sativa
  unsure (1)..(243): unsure at all n locations
  Clone ID: PAT_MRT4530_42847C.1
tgcaaataccccgcagctaaaagggcccgtgtaaatnttttccgccacactcgccccgcccacgaaaagtggcgcgggaaacccgtcgtgccagctgcattaatgaatcggcccaaccgccgcgagaagccggttgcctattgggcgcctctccgaataggggaaaaaccaggaaagaaccgtgaaccaaaggccgcaaaaggccggaacccgaaaaagccccttgctggcctttttaaaagg

SEQ ID NO: 39293 - DNA, 385 bp, Oryza sativa
  Clone ID: PAT_MRT4530_42848C.1
aaaccaatacacaaattttattggcagttcctccgactgactaaactgacatgagaaggggttaaggacaattgccacggacatgaatgtccaaatgactgggctaaagcaaccacgggccatttttttagacaaaggaaaaaaagccaaagaaggtcaaatggggaaaaaaaattgccttggttatggccacaaccaaactaacagaatttggcagccggggaagcaaattcaggggttatccatgggggggttcctgaaggtgccaccggggggggacaagggggcgccaccgggcacccttcccttcggaacgggacaacctccctttttgcccccatgcacgggggggtcggacgaccatgggggcattatagaggggggg

SEQ ID NO: 39294 - DNA, 821 bp, Oryza sativa
  Clone ID: PAT_MRT4530_42849C.1
atgtcgacctccaccaatccctcaagcgctccaatggccgagtttcccgagcatctttcccatcagatcgcaattcctagtctgtgctatccaaatcagtttttcttaggcccaatcggcaatccagatcccactctatttactaatgctgaaaccaacagaaatcccctttagatagaccaaccctagccttggtcattggagtggaacctttaaatcttggccttctagtgtaaaaccctggccagattggtacataagggtatcagctagcaaacaaacccactgggaagaacttgggattttcacagtgcttagccctcactatagccaatacgaacaaagatgaatctatgctatcggctgcaacctacttctggtcagataccttcaatgctttcttattcggccaagggcagatgacaccaactctcttagatattaccatgctcacaggcttggatatcacttcatcggctaacccagtcagcttaaacaccaaaagcaaattttcctacaagactagaagtattgggggttggattggttatatcaaaatgaacatgggaaatgggcctgtaaccctgcaggaacatgtaacttttctgatgatgtggctggagaagttcctgttttgtggtcctagctgtagtcctaccaccaattggcaacacctagccgaagccttagtcgacgagagacaatttcctctaggcaaatatctcctaggggcaatttaccaaactttgagctcagcaacgactagaattgcttcagacgttgttatctgtcacgccctaaagtttcctctctcttgcttt

SEQ ID NO: 39295 - DNA, 358 bp, Oryza sativa
  unsure (1)..(358): unsure at all n locations
  Clone ID: PAT_MRT4530_4284C.1
gctttacacttccnatcttgctagggggaggtcgtcgcacccnagctggagtacagactgtacagtgacccatccagacccttccgttatgcttctggtatcttacagagttatncctttttattatcatttcagataggcaatcgaagtaagaagagagtatgtgaccgtgcttggttgaggtgtttcatttcagtttgtaatgcaattgagagaggatggttcatgcagtgaacaatttgtttcatttcatttaactgcttaggaccgttaccctcaatcttataggtttacatttcttcttatttgaggcaatgctcaatatggaagcccacttggaaccgaaaaaaaaaaaaaa

SEQ ID NO: 39296 - DNA, 262 bp, Oryza sativa
  Clone ID: PAT_MRT4530_42850C.1
tatacaaattacatagacatacattcagtaccaactaatgataataatagagtaaagtccatcaccggtccctaaacttgtaccgctgtgttatcccggtccctaaactcacaaatcgactgttcaggtcctcaaacttgttcgattgtgtcatcccggtccctaaacttgcagatcactcgtttaggtctaccaacttgtttagttgtgtcactccggtccctaaacttggatttgaatatcatatagatcaaataggacg

SEQ ID NO: 39297 - DNA, 1265 bp, Oryza sativa
  Clone ID: PAT_MRT4530_42851C.1
ctgcaggaattcggcacgaggcgtcgcgatcccacctgaaaactctcgccgcggccatgaccaccgacctcctcctcctcctgctgcttctgtcgtcatcccgcctcgccctcgccgccgcgttcggcgtctggatcaatggcgccgcctcctcgtcgccgcagagccaggagtacgaggcgctgcaggcgctgaaggcggcggtggtggaggacccgcgcggcgcgctggcgtcgtggcaggggcccaacgtgtgcgcgtacaggggggtgtactgctcggcgccgcccgacgacgccgccgcgtcgggcgcggtggtcgccggcatcgacctcaaccgcgccaacctgagggggacgctcccggcggcggtgtccctcctcgcccacctcacgttcctccacctcaacagcaaccgcctcgccggccagccccccgactcgctccgcgacctccagtacctcaccgagctcgacctcagcaacaacctcttctccggcccgttcccggcggcggcgctgctcatcccgtcgctcgtctacctcgacctccgcttcaacgccttctccggcgggatccccgccgaggccttcgccaagagcagcctcgacgcgctcttcctcaacaacaaccagttcgacggcgagatcccggagacgctctggtcgtctccggcgacggtgatcacgctcgcgaacaaccgcctcaccggccccgtcccgtcggcgtacggctacggcggccgcgtccgggaggtgctgttcctcaacaacaagctcaccggctgcattccggaggagctcgggttcttgcccaccatcgaggtgctcgacctgagctacaactcgctctccggccacctcccgcccacgctgtcctgcctcgccggcatcgaggtgctcaacatcgcgcacaaccagttcaccggcgagctcccggacctcgtctgcgacctcaagcggatcaccaacctgtccgtctccttcaacttcttctccggcatcagccagcactgcaaccgcctcgccggccgcagcgtgttcgacttcgtcggcaactgcgtccccggccgcggcctgcagcgcccgccgccggagtgcgacggcggcccgggcgacggcggcctcagctgcctgcgcagcatccccgtcacccgccccgtcccctgcgcccaggcctccgtctccgtcggcgtcggcgtcatcgtcggcggcgcgatgccatcgttcggcgccggcggcgtggtcacggtcaccgtgccatga

SEQ ID NO: 39298 - DNA, 638 bp, Oryza sativa
  Clone ID: PAT_MRT4530_42852C.1
atatatttatctaagtatattataaatcttcatctgaaatgggtaaatatatgtataactatatatggactccaaatctcaacgtattccaagtctttgatagctagcgccatatatctaagatgctctcaccttcaactaggggtggacaaaaagctcgggctcgtgagctcggctcgggcttggctcgagctcgtgaagctcggctcggctcgaagattaaacgagccgagcccgagctctctccacagctcgtttgcaaatcgagccgagcccgagctagctcgcaagccgcacaagaaacagagaaccctaccctaccctaaccgctcgctgaccctccccattccccatcccacgcaggcgcaggcacgccgccgctcgcgcgcacgaatagcgtctggcggcgattggcgagaggagttgccgggccgccgcctccggctccctcccctgcgccgccggcccgccgtctccctccccagtgccgccgcggcaccgcctccctcccctacgttgcctctggcctccctccccagtgccgctcgagctcgacgtcccctgcgtcgccggccctacttgttgcttacatcgcaagccggctcgagccggctcaagcttttatacaagccaagccg

SEQ ID NO: 39299 - DNA, 589 bp, Oryza sativa
  Clone ID: PAT_MRT4530_42853C.1
agtagcagcggagagagagagggagcggccaaccaaaagcccaagccaagccaacgccgcgtcgcagcctctagttcctcttattgtgaaatctgtcaagaatccaaggagtgctgtctgtaaaaccgcactcatgacctgcgctgatattttcaaggcatacggtgacctaatggttgactcaattgatccactgttagtgcagctatttctgaaatcttcacaagataagcgttttgtctgtgaagctgctgaggcagccctcatatcgatgacaagctggatcgccccttctgctctgttgccaaaaatgcaaccttaccttaagaacaggaatccacgaattcgagcaaaagcatcaatgtgcttcagcaagagcgtcccaagcttggaggctgctcgcaagctggctttggagctacaagcattctatgagaaatcccaagcttcgagttctggtgaagctgatgctggtgctgaatcatgggaagctttctgccaatcaaagctttccccattaagtgcacaggcaatccttcgtgtcacctctacgacgaaagagggtgtggctgtgggtgtcacctctacc

SEQ ID NO: 39300 - DNA, 1806 bp, Oryza sativa
  Clone ID: PAT_MRT4530_42854C.1
ttttttttcttttttttttttttttttttttttttttttttttttttggaaaaattactgtgtagtaatattgaatagtggaagaaattctacaattcgcctgaccaatcaataccaagcagtgggagaaaaggaagatcatacagtcaactataacaggtatatctcgcaccaatattaacacccacaggtcacacctcaactctcgaaccgatgcttaacgaacgaatcccagattggatgtagagaaagaacaaccataaccatgtacagcaaaaggtgaatcggatggaaaaaccacaacctcattgcatctactacctcctgatgctagcaaccaacagtgacgccttctttcggaggggtagaggtgacacccacagccacaccctctttcgtcgtagaggtgacacgaaggattgcctgtgcacttaatggggaaagctttgattggcagaaagcttcccatgattcagcaccagcatcagcatcagcatcaggtgaggtagcaggtgcgtcgtcaacttcaccagaactcgaagcttgggatttctcatagaatgcttgtagctccaaagccagcttgcgagcagcctccctggattcaggaagctggtcactaagctgagttgctgcgatctgaacaagcttatccattccatattctttaattccctccacacccaagcgtgggacgctcttgctgaagcacattgatgcttttgctcgaattcgtggattcctgttcttaaggtaaggttgcatttttggtaacagagcagaaggggcgatccagcttgtcatcgatatgagggctgcctcagcagcttcacagacaaaacgcttatcttgtgaagatttcagaaatagctgcactaacagtggatcaattgagtcaaccattaggtcaccgtatgccttgaaaatatcagcgcaggtcatgagtgcggttttacagacagcactccttggattcttgacagatttcacaataagaggaactagaggctctagaagttcctgcaatctatccttgtgaaatattgccaactgacgaacattatttagagcttcacatgtcataacccagtcttttgaatccaaccttgcaactaaagtactaagggttgcaccagcatcttcaagatctgtcagactctcagaatcaatatactcaacatctgcatttccagcttcacacccattagtcacagcatcagggagtacaggtggagcattttcttccgtattgttgcatttgttgccattcaagacaggcttggtgatgcaagacttggcagaactgtccttggttttctccagctctgctgactgagctagattcagatctttcaacgcactgtccgacatattcacaccttcagccagtggcgtcaacggcagtcggcggggcgagaccgacaatggattccggggcgtccaggccgggcgtgaggcgactggcggagaagacgggatggtgactgcgggagcgggataacctggggcgaccggcggcggcggagatccgggtgtcggcggcgagaggcgatctccggcacggcggcgcccgacgaaccctagccgccctagtcgccgcccgtggggaggaattacggcgtccggaccgaaatggagtcggccgggggaagggacgggatcctgcctgcgggagcgggataacctggggcgaccggcggcggcggagatccgggtgtcggcggcgagaggcgatctccggcacggcggcgcccgacgaaccctagccgccctagtcgccgcccgtggggaggaaccccctcgtgc

SEQ ID NO: 39301 - DNA, 720 bp, Oryza sativa
  unsure (1)..(720): unsure at all n locations
  Clone ID: PAT_MRT4530_42855C.1
ccccaatccttctcccggccgacaccatttcgttccgacgcgagtaattcctccccacgggcggcgactagggcggctagggttcgtcgggcgccgccgtgccggagatcgcctctcgccgccgacacccggatctccgccgccgccggtcgccccaggttatcccgctcccgcagtcaccatcccgtcttctccgccagtcgcctcacgcccggcctggacgccccggaatccattgtcggtctcgccccgccgactgccgttgacgccactggctgaaggagctggatgcaaatttggcagaccaagtccaaaacacgacagccagcagcagcagcaggacaccaacgcgacgccaccacagtgtgaatatgtcggacagtgcgttgaaagatctgaatctagctcagtcagcagagctggagaaaaccaaggacagttctgccaagtcttgcatcaccaagcctgtcttgaatggcaacaaatgcaacaatacggaagaaaatgctccacctgtactccctgatgctgtgactaatgggtgtgaagctggaaatgcagatgttgagtatattgattctgagagtctgacagatcttgaagatgctggtgcaacccttagtactttagttgcaaggttggattcanaagactgggttatgacatgtgaagctctaaataatgttcgtcagttggcaatatttcacagggatagattgc

SEQ ID NO: 39302 - DNA, 579 bp, Oryza sativa
  Clone ID: PAT_MRT4530_42856C.1
gtgcacgatgtgctacattgattggctcattgtgtcacctcaaacacttgagatacttggaactagggtacacaaacatatctgcactgccccagaacattggtaagatgaaatttttagagcacatcggtcttcgaggatgtcacagtttggcagaacttcctagcagtattacagagctaccaaagttaaggcacctcagtattgatgaaacaaagattaatgctattccgaggggttttaaaagattagaaaatttggagatgctttgggggtttcctgtccacattattattgaaaacactggagaatacagatgtagtttggaagagttagggcctctttcaaaactcaggaagcttaaattgattggtctagagaatgtaccttatagctctatggcaacactagctaagcttaaaaccaaggaaaatctcatatgccttgaattatggtgcacaagtggagtgacagtcagtggtagggtcaaagaatctattgccatggctgatcaggaacaaattgtagatgtctttgacaagctttaccctccactctgcttggaggagctaactatcg

SEQ ID NO: 39303 - DNA, 505 bp, Oryza sativa
  Clone ID: PAT_MRT4530_42857C.1
tgggcgtgctctggccatggcaggaccggcggctccagcgcggcggcatcggcggctttcgtcggcgatggcgcatggcggctgcagcaaatagtggtggaggcagaggaggtggaggccaacgcggtggcgtagcaccgagctccgggacggcgtggagatggcgcacggcgatgagaggcggacgccggagttgaggtggagagagaaacggcggctcgaaagggagagagggctcagcctcggggctttaccagcggcggcggcacgggaaggagatggtgacgacgacggcgcggctcccgacggcggcacgaagcaacggtggcggcggctgctcacgcgtcggccgtgtgggcttgcggcgcggccggcgcgggctcggtcggcggcggcttgggccggcgacatagagaggaggaggaggccgggccgcggcggcacgtgggctcggggcttggcctccccgggcctgcagctcaagaaggagagagagagctggagg

SEQ ID NO: 39304 - DNA, 258 bp, Oryza sativa
  Clone ID: PAT_MRT4530_42858C.1
attcgtcaagacgcaattgggaattattaataattcgttctacacgtcaagacactgttatcgccctttaaggttgggaactaaacatagcttcctggttccaaacactagtactctaaataacgggtttacctctctgcactgcacgatctaaagtatcgttggataaaataggagcagacaacggcatttattactctggcccagctttcctcttcttcaaagaatcgacgagggtagcctattacttcctgcttt

SEQ ID NO: 39305 - DNA, 1968 bp, Oryza sativa
  Clone ID: PAT_MRT4530_42859C.1
atggagcagggcgggccctgtgacggcctctgtcgcttccggattcacctaggcacgagaggggactgcccgttgcccgctggggacggggtgaaacctgaggtgtggtgtgcttggctagagggggttatgcgaagagtcctgtcacggcctctttccgagtatcataaagctgcatcggtttcgatcttcaacaagagaaggcagccgattaggttagatatcgatgttgacttagattgtataaggatcaaatcaactggcatgctagtacacccgaaggcgagctttggacctgcactggagttaagcagatctcccaggcctcgtgttttctctcaacactaccccaacgtgccggagtactcgaccgttcctccactcagtggcgagcttccccaccattttcgtctggaggttcatggctatgtgggcacctgcctcgctaatacggtggttgaggcatctggaggctccgcagatcacgcttgtcaggaggcagcatatctgatgatggctagacttcgtgatcgccacaactacatcttctacaacacggcgtaccgcttccaccctcgccgagcaagtggcgacgacgccagcaccttccgcccgacagccggcgagaacaacaccaccttcggccacatgtgcgccgtgatgaggggaatggacaggatgcactctgacctgcacaaggcatccaaggccttgaatgatgggaagcttgtgaggatcatagctctaaaggatgagatagcacgcctgaagaaggagaacgctcaattgaagggtcttccagcgccaggaggagttcggatccgcaccacgccccgcaagtctacgactgctcccgtgcgcattcagcttgcacccaagaacccacctcttcccgcagctcctcccgcagcacccgtagctccagctccagccccagctcctgtgccagtgtcagctcccgcgtccgctctctccttcgctccagcgtcagccgccaggggtccagccagtggcaacggaggttggttgcctactactcctagtggcagccgcgaccatagcagcagcagttccagtggctcagagctgggcagcggcccggggaggccaagccccgagcccacgtgccgccgcggcccggcctcctcctcctctctatgtcgccggcccaagccgccgccgaccgagcccgcgccggccgcgccgcaagcccacacggccgacgccaaatcccgcaagccgcgccaccaaattcggagccgccgcttttccaaagcttgcaccgtgcgccctaaccctagctactccctcccctataaataccatcggccaccgcccctttttccccctttttccaaagccgccgccatctccaccgtgagcagccgccgccaccgttgcttcgtgccgccgtcgggagccgcgccgtcgtcgtcaccatctccttcccgtgccgccgccgctggtaaagccccgaggctgagccctctctccctttcgagccgccgtttctctctccacctcaactccggcgtccgcctctcatcgccgtgcgccatctccacgccgtcccggagctcggtgctacgccaccgcgttggcctccacctcctctgcctccaccactatttgctgcagccgccatgcgccatcgccgacgaaagccgccgatgccgccgcgctggagccgccggtcctgccatggccagagcacgcccaggccgtgtgatggagcagctgctgcttgccttctcccctatcgtggcacaaaagaagagagaattccgagccctccaccagggcaacaggacagtgtctgagtatctccatgagttcaatcatctagcgcgatatgcaccggaggatgtccgcactgacgtagagaagcaggagaagttcctagcaggcctggatgacgagctgaccaaccagttgatctctagagactacgccaactttgagaactag

SEQ ID NO: 39306 - DNA, 479 bp, Oryza sativa
  Clone ID: PAT_MRT4530_4285C.1
gcttctttttcatgcctcgaaatgtggctccggcgcctggtaatgtaggagatgatggggaagcaaactccctaaagctccttaacctaatccatcgtactcgtctggcctcagcacagcgggttactgacgacccatctgacgggaacaggcatggtggcctctaaacttcttttgtcctgttgcagcagctgagaacgcgaatcaggagcacttgaagcgggcttcccatgatcgcccgcagcagtcctggagccagttcttacctgcaagatcattctggtgctgctcgccctccgacttgcaattgaggccctcacgcagcatccaatagatagacagcttgcttagaacaccaccagttgcaggtgatggccatcctgtgcttcttccaccgggacgtgcgccccgtccacaatctcatgaaacctgttgggttatggtacgacaacacggggaactgacgcacactgctacgc

SEQ ID NO: 39307 - DNA, 978 bp, Oryza sativa
  Clone ID: PAT_MRT4530_42860C.1
atgcgcaagtgtcacacttcaagttgtctccgtcctaacactgccttcccccatgagacacctttccctcacacagacaagaaagtccccatggcgaacctaaactcctatcatcttgccacctgggctgacagtgccaagactcggaatcctactgggccaggttcttcccatgagaacatgtggttgcacgttaggctcagatccatgacttatgaagtgaagtccttaattgaccaaggcaacttgccaaactacaatagcacacagctcaacagtaggctcacacagagaccgtacccggcaacgatcacacagatacattaccacctaaccaggaccggcggctccagcgcggcggcgtcggcggcgttcgtcggcgacggcgcacggcggctgcggcaaacagcggcggaggcagaggaggtcgaggccaacgcggtggcgcagcaccgagctccgggacggcgtggagatggcgcacggcgacgagaggcggacgccggagttgaggtggagagagaaacggcggcgcgaaagggagagagggctcagcctcggggctttaccagcggcggcggcacgggaaggagatggcgagaagaacagaaagcgaaaagtcaggacgtgacactgttaaaaaattcagaagagttgactaaaaaagaacaccctttcattacctacattaataagacagaggttaacaaagtgatggtgcatattgaagaagtggaggttaatcagatatcaatgaaagtactaacacaaccacaattcttgaatgatgatgtcatggatgcatacatccaatgtctccgctataaagagaaagaaatcaggggagatggcaaggccttcctagagctggccctaaaaataggtctactaaatgtagagggagctcatgtcgaaattttcctcccaattaatattaaacaaacacactggcacctagccgttcttaacaccaagtga

SEQ ID NO: 39308 - DNA, 2714 bp, Oryza sativa
  Clone ID: PAT_MRT4530_42861C.1
cttcgtaccccctgtcacgtattcttgtttactctttccattaggtgtcacaggtttcttctcctcttatccttcctttccatcggttcttgtacttggtggtatacccctagctgctcgcctttgtgttaatttggttggattgggagtttcttgttctctctttagccttgagcgatcttggtttcttgcaattagcctttgactgcttcttcttcttccacttgccgccggcagctagaagtggtccatcgtaccaaccctttcgtcctcattgaaccattccgcctcgctcccagctccattactagaagcactagagctagcgtgaatgcgtgatccttgatgcgtagttagcagctagctcctgcccccaatctgccatctccgcattgcgattttgagtttttgagattgtaatttgcgaacgatctcggttgtgctgagagcttagcgttgacttcgatgggtgcatcgcgttcgatcgccgattctgatttggtcgcgtgatccgggggtgatcggtgattactccgagcgggaggggagatcgtcgcttggcgcggttgcgcttcgccgcgcggagggagagacattcgcggcgtaatccgaaggtgtttgttggatcgaggcgtggtgtccgagaaagattcggagcggcggcaatggggaacacgtgcgtcggccccagcatcagcaagaacggcttcttccagtccgtctccacggtgctctggaaggcgcgccaggacggcgacgacgcgctgcccggcgccaatggcgcccctgacggcggcggccagggccggttgccggcgccgccgccgccgacttccgacgcgccgctcgccgtccaaaacaagccccccgagcacgtcaagatcgtctcgaccacggacaccgcctccgccgagcaggacgcctccaagtcgagcgccggctcggactccggcgaggccgccaggccgcggccgagggtgccgccggtgaagcgcgtctccagcgccgggctgctcgtcggctcggtgctgaagcgcaagacggagagtctcaaggacaagtacagcctggggcggaagctcgggcaggggcagttcgggacgacgtacctgtgcgtggagcgcgccaccggcaaggagttcgcctgcaagtccatcctgaagcggaagctggtcaccgacgacgacgtcgaggacgtccgccgcgagatccagataatgtaccacctcgccggccaccccaacgtgatctccatcaggggcgcctacgaggacgccgtcgccgtgcacctcgtcatggagctctgcgccggcggcgagctgttcgaccggatcgtccagaaggggcactacaccgagcggaaggcggcggagctcgccagggtcatcgtcggcgtcgtcgaggtgtgccactccatgggcgtgatgcaccgtgatctcaagcccgagaacttcctcttcgccgaccagacggaggaggccgctctcaagaccattgactttggtctctccattttctttcgcccaggtcaagtattcactgatgttgttggtagcccttactatgtcgcgccagaagttctgaaaaagaaatatggtcaagaggcagatgtctggagcgctggtgtgataatttacatcttgttgtgtggtgtgccgccattttgggcagagaacgagcagggtatatttgaagaggttttgcatggtagacttgactttcagtcagaaccatggcctagcatctctgaaggtgccaaagatctcgtaaggagaatgcttgttagggacccgaagaagagattgacagctcatgaagttttaaggcatccatgggtccaggttggtggtttggctcctgacaagcccctggattctgctgttctatctcgtatgaagcaattctcagctatgaataagctgaaaaagatggctcttagggtcattgcagagaacctatctgaagacgaaatcgccggcctgaaagaaatgttcaagatgatcgacacagacaacagtggacagatcaccttcgaagaactcaaggttggtctgaaaaaagtcggtgctaacctccaagaatccgagatctacgcactcatgcaagccgcagatgtagataacagcggcacgatagattacggtgagttcatcgctgcaactctgcatatgaacaagatcgagcgggaggatcacctgttcgcggcgttccaatacttcgacaaggacggcagcggctacatcacggccgatgagctgcagctcgcctgcgaggagttcggcttgggagacgttcagctcgaggagatgatcagagaagtcgacgaagacaacgatggtcgcatagattacaacgagttcgtggcgatgatgcagaagccgacgatggggctcccggcgaagaagtccggcgggctgcagaacagtttcagcatcggcttcagggaggccttgaggatgtcttgagaaacagccactagagtcagtcacacacttgtagaggcgacgacaacgagatcgatatgttgtcttccatagggctggtaatttcgaaacggggaaaaaaatggctggaggagatgtgcgtgtacgtacaggcgtagaggggggtgggtcactcttgggtcattggttcgattgttttcttccgacgttaaaaatacaagagaggtttttcgttcaaaaaaaaaaaaaaaaaaaaaagagaaaaaaaga

SEQ ID NO: 39309 - DNA, 480 bp, Oryza sativa
  Clone ID: PAT_MRT4530_42862C.1
tcggacaagcgtaggggccggccgctggggggcattttcgcctcatcctccgtcgccgggcgtcggcgccggctcccctcaatcgccggcccgctcccggcccccccctcagatccgtcggctgcccgccttctcttccactgtgaagtcctcgttctctccgttgagcccatcttcttcgtcggttttcttcctcacgccctctcctcttcggttctctccgtcgagctctccggtaactccaaggatggtatgccgccgcccattttggggatgggaatcctctcccctttcctacccccttcaatggtcttcacactctttctttgatcactgaaaagcttttacgatgagagcacatgtccccttcataaacaaacctagatctactaaaatgtggtggattttaggctgatctgggtgcaacaaagtgctgcataggcttggattttgctatatatttttgccatgttatgcact

SEQ ID NO: 39310 - DNA, 385 bp, Oryza sativa
  Clone ID: PAT_MRT4530_42863C.1
ccgggctgcaggaatcggcacgaggggtaaacttagttctgaaactgcaaattatggtgtaaagtgcgttgttttggcagtatgtagtaacttctaatgctgtgtagtaagtagtagatgggaagcgggtttagacagtagacttggggaagccctatccatgtcgttagcaattcgactggaaattttgtacctgatacactacagaagatgatatagctagatgtaaatacatgttctgtgattgtatcttttacggcctcccagtcccaattggtggagctatacagtgtaattttttgtgctaggtatacaatgtaatttagcatcagcaatgacaaaactgtatctttcttctgtgctggtgtttgctttcttgttagcc

SEQ ID NO: 39311 - DNA, 595 bp, Oryza sativa
  Clone ID: PAT_MRT4530_42864C.1
tgcaggaattcggcacgagggtccatgagtacagcctcatctaacaaccgatgtggaactaatgcaacactatttggtagtacaatgcttgtacctattggtgctagctgatttgacatttgggcatgaactgctaaaatatatatagtgttactgtgtaagaacatgcaagatataatagattaattgtggagtataatgtaatttatccaattgtgcaattaggggaatgattttatgaaaaggccatacatactaggataaattttgtcatacatagattcttgaagaaaaggacttctgtggaatatgttatcttgcagttgcatgttttgaagaaaactagtgactgaaaatgaatcttggaggcagcacaacagtaaaacatctattcatcgccacaaaaaatagtagaaaataaaaacatccatatcgctacaagattgtaccacaagacttcagaacatttacctgctgatgcagcctggacattattacttccagaatccctgatgtggagaactatctttgtgctgtagtttgtgtgtgccgcgtagaaatcatccagcgccatcaaaatactggtccgtgctat

SEQ ID NO: 39312 - DNA, 910 bp, Oryza sativa
  Clone ID: PAT_MRT4530_42865C.1
atggcgaaggcaggggcgcgcggcgccgggcaatggtggatgaaggcggcggggatggcgtcggccgagggcgcgaaggcagcggcgacggactttgcgaccggatctgtgtcggccgccggtggatctagagttaggcgcggggaggaggtggtaagcagcggtgatggcggagggtggtggagaggtttgctgtgcaggcgacgtggaggccgacggcatgtggaggctgtcgtgcggcctcgtgggtggcgaggtcggcggcgtgtgcaggcgtcggaggccgggagcggtgcatgcggtagcggaagggcgtcgtggaggccggtggcggtgtggagtagcggctagcggcgtggagctcgcgggcgacgactgcgcgtgcccggcggctgcagctaccgtgggcgaccgtggctgcgggtggaggaggcatggcggtctcggacggctagccgagggcgtggcaaacggctgcatctggcccgcgcagcagtgttttgaggagaggtcggagaccggcttggcgctgagaggcgtggccgatggtagtggaggccggtacgacgctagaggcgtggccggcgaagatggaggctggcttcgcgcgagaggcacagccgatggcgggaggccggactggcgcgagaggcgcacccggtggaggaggccggcgtggcgcgagaggcgcggccggcggtggaggaggcgaccacggtgcgaggaggagctgccgattggtgtggcacggtctacggcgcacgaaggcttgccggcggggggcgccggtacacagtggtcccacatgtcgacagaggttgagcggtggtggagcttggtgagttatgaaattagtttttttattcgtgtccaaaaactcttttgccaatatccggtcaaacatatgatg

SEQ ID NO: 39313 - DNA, 427 bp, Oryza sativa
  Clone ID: PAT_MRT4530_42866C.1
ctgtcgagaatcagacttgaagacaaatgggctgagaacaccaaatttacaagacccaggaagaccaaaattcacaagtctgcggagaggagcggaagaggaggccgcctgccaaagtttgggccgattgggccagcccagggttcggccgaaccagccgtaacgccatccgatgcagggtttggctggatggtctggattgcttccctatggtggttggagggattgtagagtagtatttggtagataagcgaggtgcataggctattgaatatcattatttgcggttatatgctgtggatacgtcaagatgggccgttgatggtgacaactcagtacggtgtttctgcgccattgctggtaattatatttctagtaatgtcgttaagaaataccaacatagggattacatttttttctctttctt

SEQ ID NO: 39314 - DNA, 2056 bp, Oryza sativa
  Clone ID: PAT_MRT4530_42867C.1
aggatctcacccccaccacattacatgcccccaactacaagattgatgtgggtctcttatttatctactatgtataaatacataagtacacatatattgcctttacacgatctcttcatcgatctctgactctctttttacagaactagatcaggctagctgcgtgccatgcatattctcatgtcgtctatgcaactttatctttttctcactacatcaacaaaggaagatttgaagaggagatgggcaagaaaaaagtagtagattacaagcagggactagctagttacagctgctgatgctgctgtcaatgtgcagggaagaaaagaggagacgggtccctctgcatcttgccctgagccgggtcgactttgaccctgttcatcttctcctcgcaccagtgcagctgctgatcggtgatctccggcattcgcagcactctggccacgatcttgaggtcgattaagcccagcagtattgacatctcctcttcttccctcagcttcgtcctcctcagacaccgtcttggcctcgtcaggtccttgagccggctcttctttttcttgttggccttcttgagggtgatgaccagagtctgatccatggagctggtcctcctcttcaccatttctctgaacatttggtagtggctcctcttgtctgcacgcaggaacgccatgaacgttctgatcgactcctccagtatgtacaagaactgcaccgccgatatcagatcgtccttctcgtcctcctcatctctgaactctgggacgaggagaagcttgggggatgagttcttcatccgggcgtacacctccgggcggagtccgtactcgtagggctcgttctcgatgaaccggtgaagaagaacttggaattgctggaactcctgcgcgacgcgcgccgggcagcacctcgccgcgatgtcgccggcgtggcggcggaagctggcgtagttccagttgagcgcctcccaggtgaggcagatctgcgccacgtacacccgctccagctccgggtacgggtccctcagcccgatcgccggccgcggcttcggcgtcagcttctgcacgatccgctccgacaccgatcgcggctgatactttatcgacctgtacgactctgtctcggtgagcttctgggcgccgacgcgatggaagtagaccatgtcctcgtcgtacttgcggaagagagcgtacgactcccaccgcgacgagctccggcgagacgacgacgagaaggggtactccgtctccgagtccttggtcaccgtcgagctccgccactccaccgagctcttcgacgtcgactcgctcgtcagcgtcgacgcgcccaacctgctctcctcctcgcgctcgcgctgcactcctcctttcccggccatggcgccctccagaagcagcttcttcgtgtcggcgagcgcccggctgttcacgaacagcttcacgtcatctcccctaaacctcttctcctcctcatcgtcttcttctccgtgttcgccatggccgtcctcttccccggcttcgacgggaacgttctccggtgatggcacggcggccggaatgatatccttctggctcgacgcagtggcggcggcggcggcggcggcggccttgggctcctcatggctgaagctgcactggcgatggtgcggcgagattcgtcgggtggattccaccatgggaaaggtgctctccacctgcaagcaacgtgcaggtgtaggtgtaggtggtgtggtggcagcgtcgtacatgagctgatcctttccttcgccaccaagcagagcagtgtcctcgaacacggcctcgtcgaaccagaacagcatctccgcttgctgctgctgcactccggcgatgtcgtcggcgccggcgaactcctccctcccggaggtctccgtgacctggtgctcgtcacagctaccatggcctcggcggtgaaggccggcggcgagcttggcgaggaggaagaggaggaggtaggcgacgaggaggaggacgttgagggaggccagtgcatggagaagagacggcggcgccggcgtcgtcagtgccagcat

SEQ ID NO: 39315 - DNA, 194 bp, Oryza sativa
  unsure (1)..(194): unsure at all n locations
  Clone ID: PAT_MRT4530_42868C.1
ntttttnnnttttatattttttattattttttattttttccaaagggagttttctcatgacacattcttttatatttattgtcccgttttccattcaccctaaaggtgcattaaaaggcccggaaaccccccggttaaaaaaccctaaacctcttaatcaccccttctttataaaaccccctggattttccctc

SEQ ID NO: 39316 - DNA, 343 bp, Oryza sativa
  unsure (1)..(343): unsure at all n locations
  Clone ID: PAT_MRT4530_42869C.1
atgaactgcttcactcatctttggtggtggtagttgccggcaacgcgntgagctcaccggggtaaagcaggtccagcgacggatccgggaggccggctgtgaggttcttcgtgtagatcatgctggtggtatggaggaggggcatgctaagcatggccgagcagattggggctaaattacagaggccggtnagtttggntgctttgttcaatcggtgatggggttttggcgggttgagatgactactttgtnatggccagacagagcaagtgttacatccccaatcatattgcttantgtgcgaaganttcgtgaagggatacagagatttggggattgacag

SEQ ID NO: 39317 - DNA, 1394 bp, Oryza sativa
  Clone ID: PAT_MRT4530_4286C.1
atgagatgggacgcagcggaggcggaggaggtgctggagcggatctgggacctgcacgaccgcctcagcgacgccatcctcgccgtctcccgcgcgcacttcctcctcccgccgcctccgcctcctccgcctccgccgccgtctcagccgtcggcgccgcccgcgcgcgaggggaggaacgggtacgtgttcgtgaaggggttgaaggggggtggaggaggaggaggaggcggggtgggggatggtgtgggcgtgggctcggcgaaggccgcggcggcggaggcgatggcggaggcgaggagcctgcacgccatacggacggcgctcgaggacctcgaggagcacctcgagttccttcataccgttcaatcacaacagcgggcagagcaggatgctgcaattgctagattggaacagagccgactagtccttgccatgaggctagctgaacatcaggggaagaagtatagagtcattgatgaggccttggcgtttgtaggcgaagttggtgacaagagtcgattcatctcaccggaagatgttcgtgcaactcataaccagtcaggggaggatgtaatggacagtgggagcaacggttcaagtattatggggaatgtgttatcttgtagtctatctttggccaagaactcatttcgagtggacaaaatcggtagtgctctgggtaacgctgcagcgtttgctgtaagtatgtttgctttcttgcagctgcatcaagttgcctttggaagcaaatctccagcaatggattacaggaggcacagttaccattctgggagctcactacagagtggcaaaggaaagcaactcgaagtgtacctagccagaggttgaggaatcatcaagtcacttgctgttgcctgtacagaagttttgaccaaataccagttttcaccggttttgttagggcactaatcattctttatgacgaaatggactatgtttcaggctactaggatactaattgttaattcgtttggacgtgttggactacgttccaattaatagacgtcatacctctaaacctgtaaatggatttttcattagagatggatggaatgcttgtaagtctgtattctgtcagccgattggaattgctgtgttaggtttgttgtgtcctcatgagttatgaggattgaggagtgttgaaaggacaactgtttgttgtgccctcatgagttatgaggattgaggggtgttgaagcattcaaggattcaaggttctttgcttaactgagaaaaaaaaaaaaaaaaaactcgagtccagttttttcttttcttttcttgattattgactattttcgacatcggctaccttacaagtacatgtgatgcttcatgcttgtgttcttttaagccagtgcacttgagggtat

SEQ ID NO: 39318 - DNA, 244 bp, Oryza sativa
  Clone ID: PAT_MRT4530_42870C.1
gtacagctagaaaaaccaagtgcattcgtaggtattgtctatacacatatgcctgacccaagggtatttaccaatcgtcatgggtacaaatcgaaagcatattttaatcgaaacgtacatcacagttatatatcacggctgatcggtgacatccaaggacgattgactaactggtaacatactaaacatggtgggagacatcatcgaatcagagatgaacaattaaacaaggctatatatgacg

SEQ ID NO: 39319 - DNA, 1350 bp, Oryza sativa
  Clone ID: PAT_MRT4530_42871C.1
atgagggtatttggaagaggagaccttatcacggatccaaaggaaattgcgtggcaatatttgagatctgacttcgtagtcgatgcagtggctgcattgcctttaccacagatcttaatctggtttgtgataccagctattaagtattccactgatgagcataacaacaatattctggtgctgatagttcttgctcagtattttccaagactatacctcatattccccttgacttatgaaattgtcaaaactactggagttgtcgcaaagactgcttggcaaggggctgcatacaatatgttgctttacatgatagccagtcatgtatgttgctatggccagactattactgtgagtacctatattggtgagactctatactgtatattcttggcagtacttggtctcgtcttgtttgcacatttgattggaaatgtacagacctacttgcaatctatcactgtgagggttgaggaatggagattaaaacaaagagatacagaggagtggatgaggcatcgtcaactcccacatgaactacgagaaagggtgagacggtttatccagtacaagtggctcgcaactcgaggagtgaatgaagaatcaatattacaggctcttcctgcagatcttcgtcgtgacattaaacgtcacctttgcttgggtcttgttcgccgggttcctttcttctcccagatggacaatcaacttttggacgccatctgtgagcgtcttgtatcatcgttgtgcacacagggcacatacattgtccgtgagggtgatccagtgaccgagatgctcttcatcattcgtgggaaactcgaaagctctacaacaaatggtggccgcactggcttcttcaattcaactaccctgaaatccggtgatttctgcggcgaggaactgcttgggtgggctcttgtccccaaacctactgttaatttgccgtcatccactcggacagtgaaggcactcatagaagttgaggcattcgcactccaagctgaggatctcaagtttgttgcaaaccaattcaggcgtctgcacagcaaaagattgcaacacactttccggtactactcgcaccactggagaacttgggcctcatgcttcatccaagctgcttggcggcgatacaagaggaggaagatggcaagggacctgagcatgagggagtcattctgctccatgagatcagatgactcaaatggtgaagatgactcgccacctaagcagaatctcgctatgaagatcatgagtgggagtaggaaaggacctcagaacatgaaagagttgcctaagctaagaaagccggatgagccagatttttcagctgaaccctgtgagtaa

SEQ ID NO: 39320 - DNA, 906 bp, Oryza sativa
  Clone ID: PAT_MRT4530_42872C.1
cgggctgcaggaattcggcacgagggagagaactagtcagttttttttttttttttttagatgttaacctgcagttttggccacaaaaatacattgcacaatacaacgaaatgtctatcagttaaaagcaaaaaatagccgccctaacgctttacagactcccaaaaatacagactgcctttacgtttgatctttcttcagttcttttacgctctttctctgcagtcaaatgtaagggtgcggccgtttctaagatctcaagaatgttacaagcacagacgtgtatatctggatgtacaagttgccaacgcctaaaacatctagtcaactcaaagcctcgatcccttcgtgaattcgctgcttctccatgttttttagtttccaagttaatgaactttctcatcaacaattggacaactcgtgccgtcgatccaacagtatatggtagtatagcaatggttaactggtagcagcagagttagcagaagcaatggctgttgcattttagaccttactcacagggttcagctgaaaaatctggctcatccggctttcttagcttaggcaactctttcatgttctgaggtcctttcctactcccactcatgatcttcatagagagattctgcttaggtggcgagtcatcttcaccatttgagtcatctgatctcatggagcagaatgactccctcatgctcaggtcccttgccatcttcctcctcttgtatcgccgccaagcagcttggatgaagcatgaggcccaagttctccagtggtgcgagtagtaccggaaagtgtgttgcaatcttttgctgtgcagacgcctgaattggtttgcaacaaacttgagatcctcagcttggagtgcgaatgcctcaacttctatgagtgccttcactgtccgag

SEQ ID NO: 39321 - DNA, 1199 bp, Oryza sativa
  Clone ID: PAT_MRT4530_42873C.1
tgccagcgatctagagatggcaagacaaccaaccaaacaatggcacctcagtcacctcacggctttcctctgacagatgccaagagctgtggtacaaaaggattttggacccatcaagtgacttcatcttgacatggaaccacattttccttttttcgtgcttcgttgctctatttatagaccctctgtacttctacgtgccaaaaatctcctatggcaccccaaattcgtgtattgggacagacaggcatttagccatcactgttacattcttccgatcaatctctgatttactatatttcactcacattataataaagtttagaccggcatatattaatccgagctcaaccatgagggtatttggaagaggagaccttatcacggatccaaaggaaattgcgtggcaatatttgagatctgacttcgtagtcgatgcagtggctgcattgcctttaccacagatcttaatctggtttgtgataccagctattaagtattccactgatgagcataacaacaatattctggtgctgatagttcttgctcagtattttccaagactatacctcatattccccttgacttatgaaattgtcaaaactactggagttgtcgcaaagactgcttggcaaggggctggatacaaaatgttgctttacatgatagccagtcatccattcatcttctttcaggtactaggtgctctatggtatttgctatctgtcgatcgccaaactgcctgctggaagagcaattgcaagaatgaaactggctgtgatattaaatttctagattgtgatgtgataccaaatcaaaactgggcaagcaaaactgctatcttcaatacctgtgacgcaactaacacttcaatcagttttgattatggcatgtttcagcctgcattgtttaatcaagccccagggcaacgtttcttgatgaagtatttctattccctttggtggggtttgcagaatctgagttgctatggccagactattactgtgagtacctatattggtgagactctatactgtatattcttggcagtacttggtctcgtcttgtttgcacatttgattggaaatgtacagacctacttgcaatctatcactgtgaggggtgaggaatggagattaaaacaaagagatacagaggagtggatgaggcatcgtcaactcccacatgaactacgagaa

SEQ ID NO: 39322 - DNA, 429 bp, Oryza sativa
  Clone ID: PAT_MRT4530_42874C.1
atggctgaacaacagtggtcaaaccagtattcttttctataccatgataagaaaattgtgttgcatcccatgtctcctaaagatattttgcatgctgatgttgctaaagctgccaaatccaagggtgggagtcataaaaatgcccaatctgctggcaagaaaactgagatcaatttgaaaacaaagtgtttacttgctactaaatctgatattaatgaattgattgccttaccttcggttgcctatgcttcggagtactcttatgtgtttcccaaggaagtaccaccggggttgccaccagtgcgtggaattgagcatcaaatcgacttgatcacaggtgcttcactacccaactgtgcgccataccgaaccaaccctgaggaaaccaaggaggttcagcgtcaaattcaggaattgcatgataaaagg

SEQ ID NO: 39323 - DNA, 582 bp, Oryza sativa
  unsure (1)..(582): unsure at all n locations
  Clone ID: PAT_MRT4530_42875C.1
atccaaatgtaattttttcaatcctacatggcatgccatgtgtacaaagtatgctcgcgtggatagttagatgggtaagtgactcacttacctcatattagtgacccaaatatgtattttaaaagtagagtgacctatatgacacacttaaacaagtttaatgacccatcatgtattttactcttttttttaaggggaagtaactctgtcaagagagaccagagtgacgttcgctttgtagatatcctccatcgtaatcgtcagcactcgtgtccccangtggcggcgcccagacgccacgtcaccatcacgctgctactcagtgtatgccaggtggggcccacctccgtccacgtcgtcgtcgtcacacggtcgccggcgcgggaggctcgccctcgatcagcagcgccgagcgccagacggggtccacctcgccgtcgccggcggggcgagccacgcgcccacgtcgtcgaagagcgcgcgccgcagctcggccggcggcggcggggagacgagggcggtcgcccggcaccccgatggccgccgcgccgggtccacganggagcggaagaacacgtcccg

SEQ ID NO: 39324 - DNA, 379 bp, Oryza sativa
  unsure (1)..(379): unsure at all n locations
  Clone ID: PAT_MRT4530_42876C.1
cggggcggaatagttgggatgacccacgcggggactcaaagaacgcgagcggccaccctaganaggggggggtttttgaaagggtatcctccgttgtccccccnggaaaaagattgagtgggaagaaaaaaaaaaaaaaagggggctaatgggggtattctccaaggaggggaaacctatttaaaaggaaagacggaaagtgggacctaaagaaagaaaaaggggggggaaaaaaactaaaggggaaaaaaggggacacttccaggtgaaaagacagggtagggacaaaaaaagcaacagacatatgaagggcagagggggcccctttttgcgaggcactaaggaagggcaccaccagggaaaaaaaagaagcgcaaaa

SEQ ID NO: 39325 - DNA, 1345 bp, Oryza sativa
  Clone ID: PAT_MRT4530_42877C.1
gcaccgggccccagccgttccgcgcctcgccggagaccagaggccgcggccgctggagttcgccgggcggcgagcgagggcatgggctgctccatctcggggctcaacgccctctacgacgcggcgacgggcggcggcgacgtgtggatcaacgagcgccgcttccgcgtcctgcgccagattggggagggcggcttcgccttcgtctacctcgtcagggagcaccaggcctccgccgacgccgcccgcggccggagcccctccctcgcctcagaggatgggacatatgctatgaagaaggtgctgatacagagcaaggaacagctagatctggtgaaggaggagatccgtgtttcgtcattgttcaaccatcctaacctgcttccgcttcttgatcatgccgtgatagcagttaagaatcaacagggagattggaaccatgaagcctacttgctcttccctgtctatatcgatggtactctgtttgacaatgccaaagtcatgcaatccaggaaggaattctattcaacaatcgatgttttgagaatattccaacagctctgtgaaggactgaagcacatgcacagttttgatccaccatatgcccataatgacgttaagactggcaatgttcttataactcacagaaaaggacaagcacctcttgcaactttaatggattttggaagtgcaaggcctgcaagaaaagaaatccgttctcgtgctgaagcattacgattgcaggaatgggccgctgaacattgctctgcgccttaccgtgcacctgaactgtgggactgcccaagtcatgccgatatcgatgagaggacagacatctggtctctaggatgcaccctttatgctatcatgtacaatgtttcaccatttgagtatgctctcggtgaatctggaggaagcttgcaattagccattgtcaactgcacgctgaagtggccggcaggacccagccctccttaccctgatgcacttcatcagtttattacctggatgcttcagccacaacctgcaatgcgccctcacatcgatgacataattctacatgtcgaaaagcttatggaaaaatattcgtcttaaacctgctgaacatactactgactttgtttacacagttacacaattgaatatattgcaaattgtgaacattgttcatgtctgaggtctttccttactgagaattgagattgagtaggcacaatttattctttgtggatctttcagattgtaattgacatgcctcctaactgttgttaattctggtattcagttttcttgtaaaatattcggtgaataccacaagttttctcaaaaaaaaaaaacaaccaac

SEQ ID NO: 39326 - DNA, 276 bp, Oryza sativa
  unsure (1)..(276): unsure at all n locations
  Clone ID: PAT_MRT4530_42878C.1
cgcgaattcaattcnattcngctncaccaccancacctcgcgccgcccagctgctccgattcgcgctgcggacttccctttttccacccgctgatcgattnattcgttgttttttgggggggattttttttctggtgtgtgtgttttttttcccgatcggatcggtccagatcgggtcgatttgggcggggtggaggangtggagggaaaggggagatgcggatcgaggagcttccgggtgattccggcggaggangtgnggatggtggtggtggt

SEQ ID NO: 39327 - DNA, 392 bp, Oryza sativa
  Clone ID: PAT_MRT4530_42879C.1
aaaaacctgggcgaccttacaatacaagcatttcacacgtaaaaaataatagtcatccccatgaccttttcccacgtactccaaccacaaacatgcaaaattttgttaatagattgctaatgctcccaaataaaacacattcccaatggccggtttgaacatgaacacagggtttatggaggacctttaattacacaaccaaattgaggccctgcataatttagtccatatttttgaattttcatccaccaaattaaattggatcaaaggggaacccagagtcggcgttgcctttcttgaagccccggtctgaaggatcttaaaaattatttccagatttttgtcttccatgacaatgaccggtttaagaaggttgtgggggacaccaaaaa

SEQ ID NO: 39328 - DNA, 684 bp, Oryza sativa
  Clone ID: PAT_MRT4530_4287C.1
atggcggcggcggcgcagcgcgacgacgtggagtcacggcgtgatggtggtgagaatgagaagcggccgctgctggagaagcgatccgccggcgacggcggcggcggcagcggcggaaatggcatgagcccggtgcagagggcgatcagccagacgtaccagagcacggcgcacctggcgaagctgctgccgacgggcaccgtgctggcgttccagctgctgtcgccgatcgtcaccaaccaggggcactgcgacgtcgaggccaaccgcgccatggcgggcgcgctcatcgcgctctgcgcgctctcctgcttcgtcctcagcttcacggacagcttccgcgacgccgccacgggcggcgccgtgcggtacgggttcgccacgccggcggggctctgggtcatcgacggcggcgcgccgctcgacccgcaggccgccgcggcgtaccggttgcggctactcgacctggtgcacgccgtcgtctccgtgatggtgttcgccgccgtcgcgctgttcgaccagaacgtggtgtcgtgcttctacccggtgccatccgagggcacgaggcaggtgctcacggcgctgccgatcgccatcggcgtcgtcgggagcatgctgttcgtgagcttcccgaccacacgccatggcatcgggttcccactctcgccgcgctaatatttagta

SEQ ID NO: 39329 - DNA, 260 bp, Oryza sativa
  Clone ID: PAT_MRT4530_42880C.1
cttccttcaattcccttcccacccaaaccctaaaacccaaatggtcatcgcaggacgcctggacagtgagccgttcccgagacacgtcagtgaggaaccaattgcgtgcggccccgagggggacatgatgaagaactgaagagctaaaagaacatctgctgtgaaacaattgaaagcacaacaccgtcttatccctagcggtccttcaatctagaataaagctctggagctctggtcactatttgacctctctaacgccc

SEQ ID NO: 39330 - DNA, 174 bp, Oryza sativa
  Clone ID: PAT_MRT4530_42881C.1
atggcgcagtgtgatgggggcccaccagccattgggcttggcgcccccgaccacggcgcggtcaagccggtcggctacctcaacgccggtcacaagtggccgggcttctcatcagcagtcagctccttcctcggcttcttcaatttcaggttcaaatataggacccccgtttga

SEQ ID NO: 39331 - DNA, 206 bp, Oryza sativa
  Clone ID: PAT_MRT4530_42882C.1
acgcccacgcgtccgcccacgcgtacgtatacttactccctcctccttctacgcccctagcctcctactccttctttgcgctccttgctacttcttcacctatcgacgtcggcaacaaatactccggctaactggcgacgacgacggcagtgaccacgactggcggtaggggggcggcgcggtgctcgtgatatcacagctgagag

SEQ ID NO: 39332 - DNA, 568 bp, Oryza sativa
  Clone ID: PAT_MRT4530_42883C.1
aaaccaaaactcaggaatagccaccacagattttagtacccatcccatcatttggttccataacacaaaaaacagcagcaacagcacaaaggtagtttttttttgtttggtcttccaccccaccaggagataaaaaaagaagctacccttttaaatagatagcaggaagccaaaacccttagttcccgagtacctagggggggaggaggacggccccgccgggggccttgatttttttttggggaaccttggaaatgagctgggccttgacaacaaggggcctttttggggggagcatccctttgccgagcaccttggggtacccaaactgggggacgtcaataacgggggccttgccggcgccggcgccggcctggggggccaccatggaccaaaggcgctcgacgttgacgggggggcagggaaacctgttgctgaccctgggaaagtagcgcatcccgaccttgccaaagtaccccggggggtacttgtcaaaaggatgcggggggggggcatcccgccggggttcccgcgccctccggggggcttcgggggcttcccgatccgc

SEQ ID NO: 39333 - DNA, 279 bp, Oryza sativa
  Clone ID: PAT_MRT4530_42884C.1
ggtccttgcccccctaatagtctatccattgcggcgtcatttccggcgtcgtcgacggcttcaccacctgcgactgccgcctacgacgtcgattggaggcaccaaagccggccgcctgcgctgggtggccgacttactgttcccacgcgggcacccagtatgtcttgcgcggccgagtgtgacacccgtacattcaaacatccttcaacacgccgacgacggcgaccgagatgtctacaactccgccgtgggcccggacaggctgccgccataggggct

SEQ ID NO: 39334 - DNA, 525 bp, Oryza sativa
  Clone ID: PAT_MRT4530_42885C.1
tctctctgtgtgtttgtgtcacactcacgctgagcttgcgagcttgcttgctcagaggaggtaaagaaaccgaccgcgaggaggtctcgtcggccgcccccgccggtgtcccgccgccggggaccgccgcaagaggcggatgatcaagaaccgcgagtccgcggcgaggtcccgcgcgcgcaagcaggcccgcgtcaacaaccgggagaccgaggtggagcagctcaagcaggagaacaagatgctccgcgtcaagtacgagcagctgaggaagacggtggaggtgccggcgccggtgaggaggactctgcagagggtgctctccgcgccattctgattcttcctcctcatcgatctcctgctgctgctgctgctgctttgtgatgatcttggatttgtttttggagatggtggtggattagtagcttgtgttgctgtgatgatgcttaattagcagcaaagctagctaatccaggcatgtacattcaggtggacgaacttagctactatggttactactactac

SEQ ID NO: 39335 - DNA, 2567 bp, Oryza sativa
  Clone ID: PAT_MRT4530_42886C.1
atggatgcactggcatctgaagaatacgcttcacagtcgaaactacttcaagagttcaccaatgctcccagcattgacggtgcttgggttttccagaccaacaatgaagacagatccacagcaatgtattcgattagccaaacaaacctactggcaaacaacaagagaaaatatattttgttttctcatattatgagaaatggtactaaccttctggactttcaatggtctcctttccctattcaaatggatggagtgtcggctgtcgtaccatctccatcgggatcaaagcttcttgtggtgcggaatggagagaaaggttcccctacaaagcttgaaattgttgatcaatcacatgtggagaaagagatacatgtagctcagtctgtccatggtccactttatactgatgagtggtttcatgggatttcctggaaccaagaagagaccttaatagcatatattgctgaagattcacctgaaccaaaaccagtttttgatgatactggatatagaaaagaaggttcttctgagaaagactgcaataactggaaagggcaaggggattgggaagaggattggggtgaaacttactccaaaaaagggagaccttcattgtttgtccttgacattaatagtggagaagtacgagctgcaaaaggcatttcaagatcattgagcgttggccaagttgtgtgggctccaccatcttcatgtggaaggcagaagtatctgatttttgttggatggttagagcacaatgggtttcagaatactcctagaaaactaggcatcaagtactgttctaataggccatgttctctatactcaactctttgccctttcgaagaatcagatgttgataatgcaccagctagtgattctaaattagagcctgcttcagtagcaatcaacttaactccaagcataagcagtgctttctttccgcggttcaggaccttaaaccatgctagaaaaattcttcacggaaaatctctaattattttcaacagcaaggatggaaaacttctggtgtttctatctgcaaatcgtgctgtagacagtggagcgcacaatgcaacagattcactgcataagatcaactggccttctgactggaaaatggatcaatacctcgaaatcactgatgtgtcaatttatttaacttctgaactgtgccagattccaattgtaatgtgtcctcaagatggttgttttcctggtttgtattgttcttccatgctatcgaatccttggctttctgatcgatgtacaatgattctgacatctgcttggagaagcactgaagtgatattatcaatcgatgtgttgagtggaaaagcaacaagaataagcccagaaaattcagagtactcatggagtgctcttgcagtagatggccacaatgttcttgttggcccaagcggtcccatcgacccacctcaaattaagtatggccatcaagtgtcattgaaggatcagacatgtacatgggtctgggacgaagttaataataatccattgatggcagctaacaataaggtaaaggctttgttgtcacatcaccaattcagcatactaaaaattccagtcactaacccctctgatgacctctctgatggcagtaagcttccatttgaagctatctttgtgtcctgcaaggacagttcgcacaaaccaactattctagtccttcatggtggcccacactcagtatctgtatcaagctattcgaaaacatcggcgttcctcgcatcacttggatttaacctacttattgtaaattatcgagggacaccgggttttggagaggaggctttgcagtcacttcctggaaaggttggatctcaggatgtccaagactgccttacagctctagactatgtcattgagggaggacttatagacgcatctaaagtagctgtcatcggaatttcgcacggtggattcttgactacacatctgattggtcaggctccagatagatttatggtggcagctgctcgtaatccagtctgcaacctatcactgatgattggcaccactgacattccagattggtgttatgcagtggcctgtgggagtgaagggaggcaacatgcctctgaatctccttcacctgatcatcttcgcctcttctatcagaaatcaccaattgcccatatttcgaaggtgaaagcgcccctgcttatgcttcttggaggagcagatcttcgagtccccatttctaatggcctacagtacgcaagagctctgagagaaagaggcggcgagatcaggatcatgatgttcccagacgacatacatgaaatcaacataccacaatcggattttgagagcttcctcaacattggtgtctggttcaagaagcatcttagcatatcagcatcagatgcatctgcatgaagtcaacttgaagaaggggaggaagaaattacgtggtttaatctagtccaacaggtagatgccattgtaagccttgttcatggagctcgtccgtagacgagtgctccaaaatattagagacttccctattgaaaaaagtaaatggagactttaattggttt

SEQ ID NO: 39336 - DNA, 297 bp, Oryza sativa
  Clone ID: PAT_MRT4530_42887C.1
ctcgaggatcggtgcgaacaggggggacgacttcttgctatacatggagttagaccaaaatcctatggtagtcaaacctgatgaaggcatcaacaagacagacaatgctgagaggctgcagggtaacaccaccatgggagagggccagttggccagacacaaggactatggcgccaggagaagggagggacaacttactactctgttggattactggagaaggaaagagagctggcgagagctatcattgactacttgcgccagagcaccagggacaagcggctctggacctgggtg

SEQ ID NO: 39337 - DNA, 3447 bp, Oryza sativa
  Clone ID: PAT_MRT4530_42888C.1
atgaatccgcaggcggagggcgatgcggcggcggcggcggcggtgctgggggcggacccggcggggctgacggcgctgctgggggacctgacgtcgccggcgaacgaggcgaggtcgagggcggaggggatgttccacgcgctcagggcgtcccacccggacgcgctcgcgctccgcctcgcgcacctgctgctctccccggcgcacccctccgcgcccatggcggccgtgctcctgcgccgcctcatctccccggggtcgcaggcgttcgtctacccggggctctcccccgccacgcagtcctcgctccgcgcgctcctcctctccgcggcgtccgcgacggggctctccaagtccatctcgaagaagctctccgacgccgtcgccgagctcgcgtccttcctgctgccgtccaacgcgtggcccgacctcctcaccttcctctacaagtccatcgcctccccatcctcgcctccggcgctgcaggagtcggcgctcaacatcctagcccggctggcctcccatctcgccgcgggcttccccaacctccacgccctcctcctctccgcgctctcgcacccgtcgtccgcagatgtccgcgtcgcggggctcaacgccgctatcagcctcatacagtctctcccctctgccgccgaccgtgaccagtttcaggatctcctcccagccatgatgcgcgccctcgctgaatcgctcaactgtgggaacgagggctctgcacaggaggcgcttgagatgatgatcgagcttgcaggtgcagaaccacggtttctccgccgccagctgcctgacgtggttggttctatgttgcaaattgctgaagcccctggattagaggatggtacgcgacaccttgctgtcgagtttgttgttacccttgctgaggcaagggagcgcgcgcccgggatgatgagaaagctgccacggtatgtgggccggctatttgcggtgctcatgacaatgctgctcgatgtccaggatgaacctgcgtggcatgcagcggtgtcggaagaagaggatgctggggagactgggagctatgttttcgcacaggaatgtcttgatcggcttgcgattgctgttggtgggaatacgattttacctgtggcagctgagttgctcccatcattttttgcttctgaagagtggaagagacgacatgcggcactggttacgatagcgcagattgcagagggctgtgctagagtaatgattaagaatctggagcaggcacacgcagcttctgcgattctaaacttcagcgaaaactgcaggcctgatattttgacaccatacttggatgggatagttgggaaactactgtcattgcttcagactggaaaccaaatggtgcaagaaggtgctttaactgctttagcatcagctgcagattcttctcaggaacacttccaaaaatattatgatgcagtcatgccatatctcaagtctatactcatgaatgcaactgacaaatcaaatagaatgttgcgggccaaatcgatggaatgcattagcttagttggtatggctgttggaaagcaaaaatttaaggatgatgctaagcaggtgatggaagttttgatgacattgcaaggatctcagatggaggctgatgaccctataacaagttacatgctgcaagcatgggcgagattgtgtaaatgccttggtcaggacttcttaccatacatgaatgttgttatgcctcctctgctccagtctgctcagcttaaaccagatgtgagtgtcacatctgctgggccagaagatgaaaatggtgaatctgatgatgagggtgttgagactattacgctaggagacaagagaattggcatccgaaccagtctgctggaggaaaaagcaacggcatgtaatatgctatgttgttatgctgatgagctcaaggaagggtttttcccatggattgatcaggttgcaactactctggttcctctcctcaaattctattttcatgaagaagttaggaaggcagccgtttcagcaatgcctgagcttctacgttcagcgaagttggcaatagagaagagccatcgcaaggaacctgacacacaaatatgtgcaagcatgctggaatcgctgaatgaatcaatacagttatctggaacacttcttgaggaaggccaggtcagatctatagtagatggaattaaagaagtaataactgcgagtgctctcagaaggagagaacgaacagacagggcaaaagctgaagattttgattcagaagaagaggatctactcagagaagaaaatgaacaggaggatgaaatcttcgatcaaattggtgattgtttgggcactcttgttaagacgttcaagacttatttccttccattctttgatgaactttccgtctatttgacacctatgttggccaaggacaaaacagtagaggaacgaaggattgccatatgcatttttgatgatgttgcagagcactgtcgcgaagcagctgtcagatattatgatacatatcttccttctttattagaagcctgcacaagtgaaaatccagatattagacaggctgcagtttatggtattggcatttgcgctgagtttggtggctctgcatttaggcctcacactggtgaggccctgtccagactatacaatgtaatcaaacatcccaatgcgttggacttggataatgcgatggcatatgacaatgctgtttctgctcttgggaaaatatgtcagtttcatcgtgatggcattgatgcatctcaggttgttcctgcttggttaagttgtttgccaataaaaaatgacttaatcgaggccaagatagttcatgaacaactctgtacgatgcttgagaagtcagatagggagcttttgggtcataacaaccagtatcttccaaagattgtctctatttttgcggagatattatgtgcgggtaaggatctggcaacagaacaaacttttagtaagatggttaatttgctaagacagcttcagactacattgcctccttcagtactggcgtcaacatggtcttctttgcagccgcagcaacagcttgccctacagtctgtgttgtcatcatagctgaacagtaacctcagcaatgttgagcatgtggccttcacatattgccttcttttttgggttttcatgtggttttgtgcttgggttcctggagtttgtgcagcatacaaatgccctgagcttttgtatgaagggcatggtttgcatcagaagtgtatactgtcacagaacatcatggatgtgtatggggctgagcaatctctgcttcacagcaagtgaagttgtaaagcaatatgttcattttactaggaattagttgggttgaagaaaatgtaaattaacaattttgatcgttgatgttttgatatcatattatttcaaacctaacagcccccataatgtcaaaaaaaaaaa

SEQ ID NO: 39338 - DNA, 1113 bp, Oryza sativa
  Clone ID: PAT_MRT4530_42889C.1
cagggaccttactagtagatgttccccgttcccacttcgccggagcaccaccgcggccacggcgcgcgacgcgagcacccaccccgccgccgccggcggctgaccaacttcctcctcgccgcctcccaatcatctcgagattttaactgaactcctctcttgaacttcacgagtttttgttcaacaaagaacaatggaaggccagtcccagttgaatccagatgccagtcctttcataccttcctcactaagtcttttcacatacaatgattctaagagacaagcagagtcatcctcgatgaacgatccttctgctagagcttgccgtccttccatgtgcgaggaaaatgatatggatccacttgctttgaccaaatctgtccttttaatgttcccgaatatctcagaggaattcattgatgagttactccaggcaaatgaatttgacatatgtctcacggttgatatgcttcatgagctgaattcacaaaatatgcttcatggtgatgccataatgggcttcccaacattcccagatgtgaagaaatttcacggcaacctaggcctacctgatggtgatttgtctgaaagcaacagcagtcttgatcaatctcttcagaagggtatgtcactgacgacttctggtgcgaaatctgcctcggcaatgattccagataacatttctcttcatgataaactgggtgtacagaaagacgataagccagcaattgcttctaccacaaattaatctgcaatgcatcctgctgtagattctgtattcttttactgctagtttgggtgcctgactgaaagtagtgcaaagtgcagacagtgcaaaactgcaaacaatgattgtcttcttaatccatgtttgaaggactacttggttttctgggtttgagcttttgaaagtgtgcatcgcagtttcagtttgcttgttagttgttaccgagagttgtataggtcttttgatgtattcgtcagtcactattatgtactctgaacccagtggattgtgcagcagcggcagctctcgtgtaccccctgcgagtgcaacctatggttgtcaaatttaccacagaattagcagtaacacttgttaattgcatttct

SEQ ID NO: 39339 - DNA, 1992 bp, Oryza sativa
  Clone ID: PAT_MRT4530_4288C.1
ctagccaaatatggtgggccccacaccgatttgtgtctccggctccgccgccttctcgatggcctcggagcagtggcgtggacagggatgtagctgaggatccaccatcgccgtcgccgccacatctcgatggcgtgagcagcagctgaggatcctcaacgtcgtcgtcaccgctgatttctgccgcatatgccaatttccgccgccatcgtcagatccacctgttcgcccgccgcctcccttgccggcgcgagtagccgcagcccgcggcatcgcctccgcctcttgttcgtgccaccaacagcaatgtcgtctccgctgcgagtagctgcagcccgtagcctccgccgccgacaccgtcatccgtttcgcccgcacgtccgctcctgcccgcttgcccgctcgcccgccgacagcacgggggaatcgacgagggacggggacggctacgtcgctgcctcccagttgtcggctgccgcccagatccacttcccaaccgcttgagatcgcgaatccggatgcacggtcgccgccaccgagtagaaaatgttggaggtcgaaccaaaatgaagcatcagcggtggaaatcgaagtaccctgatcgcttaaccaacttcttgccgtccggaagacatcatcacatgcctgatttggacaatcttctggtagataatgtaacatttgatcaattttcatgcctatacacttcaatgcttcatcatccggtagacgctgcatcagcctgttaattgttgtgcgcaaattcttcgtagttaccttccgttttggtctacgcacaatactggccttcttgtatgaatccaatcgtacaagtgatttcacaaaggtgtagacttgcatactccctggtttgcggggactgaaatctaacagcttctccatattactcaatttaacctcgacgttctttccaagcagctcataagaacataggttcctggcatcatgttgcaacacaatcttatccctatgaacaatatttggtccaggtatgtgctgtgctgagggctgaataatgtacttctggatccacttttgctctagattgatgtcaagagcccagatctgaatctcacctctaagcaatatgggttgattatcactagtttgacatgttgcaatgcatacctttccatctatctctttgatccagtaccgacgaggaccataaaatgcagagtcttcaagtgctgctgttggcagttgtatgcgtccaaaactttctttgttaagatcgaaggacatgactgcatgatgccaactggttccctggtcttcagttagccaatacattgttccatcaacattgactactccagagttcttcacacagttcaagcttagagcctctggggctcctatatatttccatttctcatcaccaagtgtgtaaacttgaacgccatcgaagctgtcaacttttgcacggatgcgagtctcatgactactagcaaggaagtgtgtaaccttgtattcttttgtcaatgggtgaaatccaaagctgtagaacgagaagtgatcgtccgtcaaattctttgccggtttcgcaagatgcaggcattcaccagttgcaaggtttgctatcttgattgttgtagtgtgtgtgtataagcaaacaagcccattggaggaaccacacaggaaatcatctggcccaatcactggcacatcccatattgactgtgaccaggcttcatcgatgaggatggcttcgctcgggtacagcccacatgaagaaaccaactctcgagggaagaataggagcgcacaatggggcgcaagctggaggtgtgatgttacaaatttgggatcttggattatgctgcgccactgcttgcagacaccaatgcaattcaacaaagttttcactggaaggctcagaaatacctgctcgatcaagtctcttgggaggcggctgattatgcattctaactttttccgcttatttgatttggctttctcagataccat

SEQ ID NO: 39340 - DNA, 933 bp, Oryza sativa
  Clone ID: PAT_MRT4530_42890C.1
atgaagggcggggtcatcaggagcggcggcggcgtcggcggcatcggcgtcggcggcggcggcggaggcgggggagccggcggggggctgatgcgcacgcggctgcgcctccccgtcgtgctcctctcctgctccctcttcttcctcgccggcttcttcggctccatcctcttcacccaggatccgcagggggaggaggagctcgacacgccgatgaggagggagcggctgatggaggcggcgtggcccggaatggcgtatggcgagtccggcgagccggagccgtccttgatcccttaccagattttgagttggcaacctcgtgcactatattttccacaatttgcaacatcgcaacagtgcgaaaatattgtaaaaactgctaaacaaaggcttatgccatcgacattggctttaaggaaaggagaaactgaggagagcaccaaaggaataaggacaagctcaggcacatttctaagttctgatgaagatccaaccggaacccttgctgaagttgaaaagaagattgcaaaggccaccatgatccctagacatcatggggagccctttaatatcctgcgctatgagattggacagaggtatgcttcgcattatgacgcattcgacccagctcagtatggtccacaaaaaagtcaaagggtcgcgtctttcttgctttatctcacggatgttgaagaaggcggagaaaccatgttcccatatgagaacggggaaaacatggatatagggtatgactatgaaaagtgcattggcttaaaggttaaaccaaggaagggtgatggtctcttgttttactcccttatggtaaatggcaccattgatccgacatctcttcatggtagctgcccagtgatcaaaggagaaaaatgggtcgccacaaaatggattagagacaagagtaaggcagtgtaa

SEQ ID NO: 39341 - DNA, 861 bp, Oryza sativa
  Clone ID: PAT_MRT4530_42891C.1
atggagctgcccgagtgctcgggcgagcagggcgagcgacgatgtgggtcgcgtcacccctctcaccgtgcgagaacagcggcgacaacgcgagggaggcagtgggatgcgagctcggcggccggcgcgggaagaggggacaacggcgcagcgggaagaggcgggagaggaggaggccggcagccggcaggagaggagacggggcggcgagcccgagagctcgaggcggcgaccagatctggacgacgacgaccgaccgactgggacgacgacgacgacgaccgagacggcgatttggagacggggcggcgaccggtgggagaggaggacccgcttgtcggcggctcggctcaccgtgagcgaggagcacgcgacgcggcgctagggttcggagggggcgcggtgcacgcgcgcggctcgcagtgggatgcggatgcggcgagcccacgcgcagcctcacggctcgcggtggaccgtgcgagcgagcagagcggaggggagcggcggaccggggtcagcttgacccggtcgcggccgaggtggcgcctatgtggttgccacgcggaccggcgagaggaagacgacgacgcgcccgcaaacagacggccgacggcggcggcgagcggcggggcgataaacggcgatgcgggcgagggcgagcacactgggagagcatctacgcgactccgggaatccattccttgcgccggattaggaggaaacgcaccgagggaggccggcgacgagaggcgctaccgagctcgggcggcgacggtggcgagcacacagcgggcggcggcaaggcttggggcggcgccagctgactacggggggtctactcatgctactaccgaaagctag

SEQ ID NO: 39342 - DNA, 544 bp, Oryza sativa
  Clone ID: PAT_MRT4530_42892C.1
cttaaatccgttagacgcttataaccaaaaattggtaaaacaaatcgaagtcgaacctgtgctggcagaaaacgatgtgaacggggcttatgtggtgctaaaagagcctgtggttggcaaaggtaaactcaaagccaaaattgaaattcacgttcaaacggagaaagaaacgaagaaaaaagtagttaccattcaagcaggtgatgatctctatgaaaaatcaggcaaaaatgagagttatcgacacgggtttattatcaatgaattatgcgtctgccgatttcccccatttggagagatccacttatctaatgggcaagtgcttacacaaagtgaagatgatgatctcttgcgtgatgaaattatgaaaaagcagatggagtgcaccattaaagagcatttagccaaagaaaaatggctgaatagcaaaggcattaaagtgctttcgctgttttttattgataaggtggcaaattaccgtgataacggtaaattttatcgctggttcaatgaaatctatgagcgtgaaacaggaaaaagtgcg

SEQ ID NO: 39343 - DNA, 1215 bp, Oryza sativa
  Clone ID: PAT_MRT4530_42893C.1
atggaggaagaacgagaggtgcaagagcaagtgcctcaggttgcaggtgtcgaatcccagagtaaacgcgcgagcgcgagcttgacgccggcctcgtcgaaagcaacggcgggagcagcagctgtaggacgggccgcacggatccctgcaagccgtagtcgaggatctgcaaccacgaacaaggcaatggcaacaccgacagtggcaccaagttcacgagctaaagcctctaatccctctatgtccgtggaaatggtgatcatgtcggatggagaggaggatgaagaaaacagctttgacttgaacgatgagatgattgttgagcataaaggttttaataccttgatgaagtggatgaatagtagctatgaattcattggtagaaagaccataaaaaatgaatgcatgaagtctaagcttgctgctagaaagaatggacagtttgattcagactattcccatgttcgttgtgctgcccacatagtaaatttggtggttaatgatggcctgcaaccaattcaacctttgataaacaatcttaggaacactgtgaagtactttaagaggtctccagcccggtcaacctaccccactgccaatgtcttctatccttacattgtaaaagttaaaatatcaatattagctgcacaaacacaagcacaagctaggcttgcagaagctgcaaagttaggacaacagactggattgtatgaacctgatcctaatgatgtatttttgctgaatatgactgatgcaatgatggacaaattcaataaatattgggagaacacaaacaatatcatggttattgctacagtccttgaccctaggttcaaaatgaggtacattacatggtgctttggtcaattatttgacaagacaaggtctgaaatagaggttgctgccataactaatgagttgggaaagctatacaacatgtatgaggcaatatgtcgccaaaagcaaggtgagaacagcccacacattgctcactctgcctcatcctcaagggatacaagaatgtcgttggtttcaattgttccaagtggactccagtcctttttggaatcaaatgctgcagaatcctcaaagtccgagttactcatatatttagatgaactaaatgtgcccatagatgatagcacattcaacgtgctgaatttttggaaggttgatgctcataggttttctgttgtgtctaacatggcaaagtga

SEQ ID NO: 39344 - DNA, 824 bp, Oryza sativa
  unsure (1)..(824): unsure at all n locations
  Clone ID: PAT_MRT4530_42894C.1
cttcggaatgcgaaattatgaaaagtacatgactaaaaaaacaaaattcgattatacctcaaatcatatggattgaagaaaatacaagaaagttataggaatgatcatttaaatgcaacgtacaagaaaacacaggaattagaaaaaagagatagatataaatacccccccccccccacacacctccccctccaaaaaaagagaggttggaccttatgtcaaaattcctctaaattttttatgttttgagccaatccaagaaaattttataggacttttagcagctattcctttgataaaataggaccgtacaccacaagattgaattcctacaaaatttcaaaaagaaaaacctttgttctaaaggagccttcaacctcgttgtttattgctaagcattgaaatagttgtgttgatcgaaatatgatatttagcgtcacacataaatataaatacggtactagtttgcatcttgttgcttgcacatgtaacttatctaatcacataagcatctgagcttatcttgtccatgtagctcacaagtgtgtggtgttatactagcatggtgtccaacttagcagtgaagaccaacatggcacgtgtttaataatatgcgccccccccccctcctgcctaaacaggatggcagtgatttgtttaagcaaaatgcaagataaatggttaaattatggtattatggtattgcctgtgtatcttactattcattntaattntgaaatggatgttgcatttcttatctaaagaattgntggagaagaaacagcgcagaacaactacttatcgtattggacatcgacacatgt

SEQ ID NO: 39345 - DNA, 936 bp, Oryza sativa
  Clone ID: PAT_MRT4530_42895C.1
atggagttcatcacgccaatcgtgaggccggcatcggcggcggcgggcggcggcgaggtgcaggagagtggtgggaggagcttggcggcggtggagaaggagcacatgttcgacaaggtggtgacgccgagcgacgtggggaagctgaaccggctggtgatcccgaagcagcacgcggagaagtacttcccgctggacgcggcgtccaacgagaaggggctcctgctcagcttcgaggaccgcacggggaagccatggcggttccgctactcctactggaacagcagccagagctacgtgatgaccaaggggtggagccgcttcgtcaaggagaagcgactcgacgccggggacaccgtctccttcggccgcggcgtcggcgaggccgcgcgcgggaggctcttcatcgactggcgccgccgccccgacgtcgtcgccgcgctccagccgcccacgcaccgcttcgcccaccacctcccttcctccatccccttcgctccctgggcgcaccaccacggacacggagccgccgccgccgccgccgccgccgccggcgccaggtttctcctgcctccctcctcgactcccatctacgaccaccaccgccgacacgcccacgccgtcgggtacgacgcgtacgccgcggccaccagcaggcaggtgctgttctaccggccgttgccgccgcagcagcagcatcatcccgcggtggtgctggagtcggtgccggtgcgcatgacggcggggcacgcggagccgccgtcggctccgtcgaagcgagttcggctgttcggggtgaacctcgactgcgcgaattccgaacaagaccacgccggcgtggtcgggaagacggcgccgccgccgctgccatcgccgccgtcatcatcgtcatcttcctccgggaaagcgaggtgctccttgaaccttgacttgtga

SEQ ID NO: 39346 - DNA, 597 bp, Oryza sativa
  Clone ID: PAT_MRT4530_42896C.1
atgaatggtccggcagaaattgattgcacagtaacttttacgattgctggcaaaaatccggttacgttgcgtatcactggttcacgctctaccgactgggaatttttccccgattggtctgaagacgtgaccgaaaaactggagtttttaacgacggtgcatcaatctattaccgaatgtcagcggttagaaaatatgctctacgcttacggtgcaagggtgtgggcattgccaatttttactcatcaagtctatttagacaagccaactaaaccaggcgataaaacgttatcacttgccaccacgggctttgacttttatgtcggtgggcgtgcggttttgatgaacgggaacaaacgtgaaatggtggatattaccggcattgagcctgataagcttgaaataaaacgttcgttactgaatcgctttgataccagcaccgtggtttatccgctacgctccgccgtgctgaccgatatgccacaacttactcgtttaagtgatgaggtggcaaccgcacaaattcgcctgcaaattcacgagcacaatggctatgccgctgatattcgtcacttgccgacttatcgcggacatccg

SEQ ID NO: 39347 - DNA, 383 bp, Oryza sativa
  Clone ID: PAT_MRT4530_42897C.1
aaaaaaaatgttcgggagcacaaaagtctcctattaaccaaaatcattaactcagtgaaggacatgttaccaaaatttgtaactcagtgaaggacatggtataaaaaatattattgagcatttcggatgcaggcaccagcatcaaacagttaaacaggtctggtgtttatatgcccaacaaaattcaatgtctgaaagctccataaaagataaaacctaagtgtgcaactcaagcagcaggatgagttgtagaaaaaggatgacatgttccacccaaccacacattggaggatgacatgtcccctagaaaaagtcatttgaaagccataacagacacttatggccgccatgggggatggtggtggcaacccccattgtttcaa

SEQ ID NO: 39348 - DNA, 788 bp, Oryza sativa
  Clone ID: PAT_MRT4530_42898C.1
ctgcaggttgattggtaagatcagtctttttttttttatgatgtgatgtcaaaatatactaaaaagagtccaacatgctaaaaattgatcatgggcacacagaccaaaatttacaggacatcaactgcaactaaaatatcagtgtactgtgaacccatcttgtagttaaacaaaaactagatgcataatgatgcttacgaactttgaattcaaccttccaaaggtacagcacatttatgttcagtgttttgagtggataatatctttctcggagcaataaccatgaatcatttagccttgacactctccgttgtagcttgctccttgacaggcggactctccggtgtaccttccttgttgacaggctgaatccgttcataccgcttcctcgtcagtgtctcccctttgagggcagcaacatatctgtcatttgtgtcctctttcctttgcagctctccaagaaactctgccagtctctcccggttcacttgccccatcatcgcggtctcggggcgggcggtggagcggaggtgggcctcgagctggtcgttgcgggagctggtgagctgcatcacgccgtagccgacgacgcccgggacaacgccgcacagcgccgcgaaggtgaagaagaagggcttggagtcgcgcgtccgccgcaccagccccccccaccccccgccctccccccacgggatcgacacccccctccccctctccctctccctcgcgcctcgccccccccccccgctcccccccccgccccgccgctcctctcctcagccgctgct

SEQ ID NO: 39349 - DNA, 553 bp, Oryza sativa
  Clone ID: PAT_MRT4530_42899C.1
aaaagacccagggcccctatcaaaaaaataaagggtcaggcccaaacctggccccgggaaaaaagaaacaaaggggggcgggcccataattatcccggaaaaaaacctggggggggggaaaaaggtctattaaaaagttttttttcacccttaatttcgttttttccccccgggtttaaaaaaaaaaaaaacaaccccccatgcctatgcaagggggcctatgggcaacttgcaaccccatgggaggagggggaccttacaaaatttgaaaacccgcccaagggaggggagcaaaaaatcagggaggggggaaaaaaaaaacccgggagactataaacaaaaccctttaaaaccccttggcaggggggggaaataaaaaaaaacgatatgggggggatctccaatccaaagcccatccctccattggaactggaccccaagttccccattgggaaaaacgccaacaaccccacctttactttaaaagggcccccccccccatccccaacggggggtaacaaggccagggcgaatccgaactctgccccctaaa

SEQ ID NO: 39350 - DNA, 180 bp, Oryza sativa
  Clone ID: PAT_MRT4530_4289C.1
gtgtttttttttttttttttttttttttttatattactagctcgtagttaaaagtttgagaagtgaacaacaagctcacacgctgctttgttccatactacagtgaaaataaaaagtacagagaggaaagcaaaaatagttttctcttttctgcagactacaagacgagacgaacagcgg

SEQ ID NO: 39351 - DNA, 138 bp, Oryza sativa
  Clone ID: PAT_MRT4530_428C.1
atggagtacgaacatcagggcaatccaggaaggtgcgcattcactttatggatcgacaatgtcaatcccacatatgatggccaaaagataactgagtctgaaacactggtagagtaccagcgagagaaggagcattaa

SEQ ID NO: 39352 - DNA, 477 bp, Oryza sativa
  Clone ID: PAT_MRT4530_42900C.1
atgtcgatcctgtgggagaagagcgcggggtggcggtggctggtgcggcggacgcgcgactccaagcccttcttcttcaccttcgcggcgctgtgcggcgttgtcccgggcgtcgtcggctacggcgtgatgcagctcaccagctcccgcaacgaccagctcgaggcccacctccgctccaccgcccgccccgagaccgcgttgaaatcaggaaaatctctatttgcagttaatgctgattaccagccatatgagttacccaagatgatggggcaagtgaaccgggagagactggcagagtttcttggagagctgcaaaggaaagaggacacaaatgacagatatgttgctgccctcaaaggggagacactgacgaggaagcggtatgaacggattcagcctgtcaacaaggaaggtacaccggagagtccgcctgtcaaggagcaagctacaacggagagtgtcaaggctaaatga

SEQ ID NO: 39353 - DNA, 821 bp, Oryza sativa
  Clone ID: PAT_MRT4530_42901C.1
gcgatattgagctacctatgattttttaaaccatttttgcacctgttttctttatattatttgaaataccgggatataacacttgactagcaattctagttttgcttgaaatccggcaaaaagttgattggtttctagatgagtttattctacatttaaggctttacgggtcaaaacatatgttttctgtttccagttttgttcctgctatgataatctgtatttccctctgttccagcttcgctacaacctaccacggacatacaagtttcacaaacaaaacgaggttgatatcgccgtcgatttttggcggttcgtgccacgagcccgagacgaaggtagcactgcatgctctgttaccaaccttaaacagagaagaatgcacagatgatcctaaaacattttcgtagcggttttttagcggttcagccgtgttgtgtcatctctcgcgcagttggccatgtgatgaacttggatcttttgattgcgaatttgtgattgcaacgaaggtatatgtgttcgtccccggcaagtgagcgccgccgccgccgtgctgccatggcgacgcttcgccttcagctaagctagctaggttgacgacaatgcgcgtctctgcagaaaagtgtgcgtgtgtgtacccggtgcagtagatgtacgtacgtgtaccgtatagatgtacgtattcgtgtggaccgcgtggatggatgtcccagtattggagaaaaggtgagatctgaaccggtagtgggtatttctgtgcaggttctgaacctgaacaatggaagagagctccgaggaatcaaaaaaccccccggaaaaag

SEQ ID NO: 39354 - DNA, 596 bp, Oryza sativa
  unsure (1)..(596): unsure at all n locations
  Clone ID: PAT_MRT4530_42902C.1
ctattgagagtcgcaccccgggatactgctaatactgcctttcatcgaattgaagtagggatgcacactaccctgcattcgcctctggacagcaacgtgagacagacagaggaagacgcaagacaccagcggcattgctgaacttgtgcacccagattacgagaattgggaagcgtcgtttacanagaaccaagaagaagtaatttagcaagaatcaaggaagcggccagattagttgcacttgcaatgtcagctaatgagacaatcctctggccatgtgccaagagcttgagacaaggtgctcgacgacttgagagaggtcgatgtttacatgttaaaacttgaaggcgaaaacaagggttccaatctccccgtcgttttttgtaggtacatttttgtgctccaggcttagagaagaccaggacgcagtcaagtcaaatgtacaaattaagatttttaaagatttcgtcagcaatgacatttcctggaaaaaaaaaaaaaaaccaatgaaatttacatcaactctagatgcatgacttagtcgctgaaaaggaataataatataatataagctctaaaaaaaaaaaaaaaaaaaa

SEQ ID NO: 39355 - DNA, 360 bp, Oryza sativa
  unsure (1)..(360): unsure at all n locations
  Clone ID: PAT_MRT4530_42903C.1
aagaggcacaaggacaaacacaaacannacaacacacaccacgaccggcgaacacaggagcancagacaagannngagggnccgccgagagaaccgagaggacacgagganacagaaaagccccaagaccccccaggcgggccaaagggcccnagccccgacaaaaancaggaacagagcccaannngcaaccaaccggaaacacgcaacaacagcggncaccggngaccccagacgacacccccaagaagcagcggcggccacnnaaaagcaaacacgcncgacccaaggaaggggggacaaagcaggaaaanccagggaacaaaaagaacaaccgagncancacacggggaagaggac

SEQ ID NO: 39356 - DNA, 787 bp, Oryza sativa
  unsure (1)..(787): unsure at all n locations
  Clone ID: PAT_MRT4530_42904C.1
gagatatattgcaatattttgagaattatgtgaaatgatgatttaacgtgcttggatttttgtaagctctaaaattttaagtgaggataaactatataagcatataggatattataaaaagtgaaggagaggtatattgaaatattatgtggattatgtgggatgataatttaattaacatgcttgcattttaaagttctaaaacttaataaattagcatgcttgcatgagatttaggatgtattaaatgttagtggatgatgtggcatctttgcatgttgagctttaagatgtagtgggctttaactttatagaaatataggattaattcctatagaatgtcatgatgcaggatgtcattaataatcctccaagctgttcccttttaacttttttccctgttacttgaaacttgactaaggattctcttcgtattaatgtggattgtgtcactgaccatatggtcgtatctttctttcagcgcttcgctgggacttggaatgtttgttggttttcagtgctttcatggccatggaactcagaatgtctccaacgtgcaaattcttggttgtgatctagaagatggttatttgtttgaaacaatggaagcacttgatgttcccttagcatatacacttgtgagcttgtgttgatagaattgtaaagcttacatatgttttagttctactattattttgaanagggaaatgtgcagctggatgctaacatcggttgcaaggactgaagtgtacgtaccaatgaaaaaaaaaaaaaaaaaaaaaaaaaa

SEQ ID NO: 39357 - DNA, 456 bp, Oryza sativa
  Clone ID: PAT_MRT4530_42905C.1
atggggggaaccggcgcggcgggggtcggcgggcccgcggcgcatctctctcgcgtgcgcacgggggcagagaagaagagagcgcagcgacagcgggggatcgaggggaaggagcgctccgcggcgcatctctctcacgcgcgctcgggtgcgaagcagaaaagagcgcgagcgcggcgccgtgcggggcggagaaggagcacgggtgcaggagaagggagcgcgaccacatctggtggcggtatcggtagggcggatggcaatgaacggcttgtttggcgaagtaaaggaggaattccctcccaattaccaccccctatccaggatggtgatgacgccgatgacaaggatgagggggccatggaggaagaggtgaccggggatggcgtggaggcagaggccaaggccgaggcggagttaatcagcggggcggagtgtatacgatggtctgcatag

SEQ ID NO: 39358 - DNA, 3168 bp, Oryza sativa
  Clone ID: PAT_MRT4530_42906C.1
atggcgcagtctatggttcctgtatttgcaagagaaaattatgatatatggagcatcaagatgcggacgctgctgctatctcaaggattgtgggatattgttgagaatggctatcaagagtattccgctggagaaactcttacggcggaacagaagaagtctttggtagaggatcggatgtcggacgccaaggccttgttcttgatccaacaaggagttgcggaaagtctatttccacgtattattggcgccaagaaatccaaggaagcatgggacaagttgaaggaggagtttcaagcatctcagaaggtacttgcggtgaagcttcaaactttgagaaggcaatttcagaatttgcaaatgaaggagtcagagaaggtaaaagactatttctcaagagttattgagatcgttaatcagatgcgcctctatggtgaagatataaatgaccagaaggtcgtgaagaaaattttaatcagtctgcctgaaaaatacgagtatattgttgctgcaattgaggagtccaaggatctgtcaactctcacaattcagcaacttatgagctcgttggaatctcacgaagaaagaaagcttcaacgtgaagggagctctgttgagaatgcatttcagtcaaagttgagcttcaggcctcaaaactcaaggtttcgtgggaattttcagaaaaatggatttccaatgcgagaccgtggttttcagaaaaatggtttttccaggcagaacgaatatggtcaagagagaagagaaaaaggtacgtccagttcaaatttgtggtgtgacatttgccaaaaatctagtcatactacatatatgtgctggaagaaaatgacctgcaacaagtgcaaaagaaagggtcatattgcaaaatattgcagaactcgggaaattaaccgggctaatttttcacaagagaaggaaaaatctgaagaaatggttttctcttgccatactgctcaagaagaaaaagatgatgtttgggttattgacagtggttgtacaaaccatatggccgctgatccaaatttatttcgagaaatggattcatcgtatcatgcaaagatccacatgggaaatggctctatagcccaaagtaaaggcaaagccttggagatattcaaaaaattcaaggccatggtggaaaatcagagtaatcgaaaaattaaagtattgcgcagcgatcaaggaggagaatatatctcaaaagaatttgagaaatattgtgaaaatgctggcatccgaagacagctgacggcaggctatagtgcgcaacaaaatggagttgcagaacggaaaaatcggacgatcaatgatatggccaattctatgctccaagacaaagaagtcctaccaaggcagtaccaaaccgtacaccttttgaagcttggtatggccaaccacatatgcaaggtactcatgaagtggaatatcatcctccaagtccacagtcatcaagtccaaggtcaagctcaagtgctagttcagattcaagcccaagcagtgaagagcaaatttcttacaccggaatcagctccaagacgggtaagaagtatggttgaattattagaatctacttctcaacaaagagggtcagaacaacatgaattttgcaattattctgttgttgagccacaaagtttccaagaagcagaaaaacatgataattggataaaggccatggaagatgagattcatatgattgagaaaaataatacatgggagttggttgatcgtcctagagacagagaagttattggagttaagtgggtttataagacaaaattaaatccagatggctcagttcagaaatacaaggcaagacttgtggcaaaaggctttaagcaaaagcctgggattgattattatgagacatatgctcatgttgccaggctagagacaattcataccataattgctctagcagctcaaaagaggtggaagatatatcaacttgatgttaaatcggctttcttgaatggttatcttgatgaagaaatctatgttgaacaacctgaaaggttttcagtccaagggggagaaaataaggtattcagactcaagaaggctttatatggattaaagcaagcgcctagagcgtggtatagtcaaattgacaagtactttattcagaaaggatttgccaagagcataagtgagcctattctatatgtcaagaaaacaggtacggatatcctaatcgtctcactctatgttgatgatttgatatatactggcaatagtgagaagttgatgcaagactttaaaaaagatatgatgcatacatatgaaatgagtgatctgggcttgctccactattttctcggtatggaagtgcatcaaagtgatgaaggaatatttatatcacaaaggaaatatgctgaaaatattctgaagaaatttaagatggataactgcaagtcagttacaacccccttgttgccaaatgaaaagcaaaaggctagagatggagctgataaggcagatccaacaatttacagaagcttagttggaagtttattatatttgaccgcaacacgaccggatattatgtttgcggcaagtttattatcaagatatatgtctagcccaagtcaattaaattttaccgctgcaaagagagttttgcggtatatcaaagggaccgcatattatggtatatggtataagccagttaaagaatcaaaattaattggctacacggacagcgactgggctggatgtcttgacgatatgaagagcacatcaggctacgctttctcacttggttcaggtatgtggtcctggtctacaaagaaacaaaatattgtcgctttatcttcagccgaagcagaatatgtagcagcatcaaaagctgtttcacaagttgtttggttgaggagaattatggaagatctgggtgagaagcaatatcagcctactacaatttattgcgacagtaagtctgcaattgcgatcaacgaaaatccagtcagtcatgacaggacgaaacatattgctatcaagtatcattatatccgggaagcagttgatcgccaggaagttaaattggaattttgccgaactgatgagcagttggcagatatatttacgaaggctttatccaaagaaaaattcatctgtgacagagagctcatcggagtttgcaagaaataa

SEQ ID NO: 39359 - DNA, 3597 bp, Oryza sativa
  Clone ID: PAT_MRT4530_42907C.1
ttatttcttgcaaactccgatgagctctctgtcgcggacaaatttttctttggataaagccttggtaaatatatctgccaactgctcatcagttcggcaaaatttcaatttaacttcctggcgatcaactgcttcccggatataatgatacttgatagcaatatgtttcgtcctgtcatgactgactggattttcgctgatcgcaattgcagacttactgtcgcaataaattgtagtaggctgatattgcttctcacccagatcttccataattctcctcaaccaaacaacttgtgaaacagcttttgatgctgctacatattctgcttcggctgaaccaagtgagaaagcgtagcttgatgtgctcttcatatcgtcaagacatccagcccagtcactgtccgtatagccaattaattttgattctttaactggcttataccatataccataatctgcggtccctttgatataccgcaaaactctctttgcagcggtaaaatttaattgacttgggctagacatatatcttgataataaacttgccgcaaacataatatccggtcgtgttgcggtcaaatataataaacttccaactaagcttctgtaaattgttggatctgccttatcagctccatatctagccttttgcttttcatttggcaacaagggggttgtaactgacttgcagttatccatcttaaatttctttagaatatttttagcatatttcctttgtgatataaatattccttcatcactttgatgcacttccataccgagaaaatagtggagcaagcccagatcactcatttcatatgtatgcatcatatcttttttaaagtcttgcatcatcttctcactattgccagtatatatcaaatcgtcaacatagagtgagacgattaggatatccgtacctgttttgttgacatatagagtaggctcacttatgctcttggcaaatcctttctgaataaagtacttgtcaatttgactataccacgctctaggcgcttgctttaatccatataaagccttcttgagtctgaataccttattttctcccccttggactgaaaacccttcaggttgttcaacatagatttcttcatcaagatagccatttaagaaagctgatttaacatcaagttgataaatcttccacctcttttgagctgctagagcaattatggtacgaattgtctctagcctggcaacaggagcatatgtctcataataatcaatcccaggcttttgcttaaagccttttgccacaagtcttgccttgtatttctgaactgagccatctggatttaattttgtcttataaacccacttaactccaataacttctctgtctctaggacgatcaaccaactcccatgtattatttttctcaatcatatgaatctcatcttccatggcctttatccaattatcatgtttttctgcttcttggaaactttgtggctcaacaatagaggcttctggagacttccaattccatgtagcactctcatcaaaaatcacatctctgctaatgataattttctttttctccaaattataaagtctatagcctttgataccatcagcatagccaacaaatatgcaccgatcacttttattatcaaattttactctcttttgtgctggcacttgagcatagcaaatgcaaccaaatactctcatatgaccaatgacaggctttttaccataccaagcttcaaaaggtgtacggtttggtactgccttggtaggacttctatttaaaatataaattgcagtattaactgcttcagcccagaaagatttaggcatacctttgtcttggagcatagaattggccatatcattgatcgtccgatttttccgttctgcaactccattttgttgagcactatagcctgccgttagctgtcttcggatgccagcattttcacaatatttctcaaattcttttgagatatattctcctccttgatcgctgcgcaatactttaatttttcgattactctgattttccaccatggccttgaattttttgaatatctccaaggctgcagatttttcttttagaaaatatacccagatcattcttgtataatcatcgataaatgtgataaagtaccaatttcctccttctgaaattgttggcactttaccaactatatcagtgtgcactagttccaatggtgcacttgctctccaagctccactgtggggaaaagaagcccgaatttgttttccaaatacacatccttcacatgggtcagacttgagagtaataaatggaaggccttgaaccataccttttgtcctgagtagcttcaatgctctgtaattaagatgacccattcttttgtgccataaatcggaaatatcaatttcactcctgagagccatttgagttggatgattcatccttaatagaaaatttatgttcttctccatatttattttggcaaccagacgattatttttacggtccaatattttgcaagaaaaatcttcaaaataaaccgcgtacccgtgttctagaagctgcccaatacttagcaaattttgctttaaatcgggtaccaacaaaacatcttttataaattttggaccgtctgctgtttgaacagcaaccgtacctttgccttcactttgggctatagagccatttcccatgtggatctttgcatgatacgatgaatccatttctcgaaataaatttggatcagcggccatatggtttgtacaaccactgtcaataacccaaacatcatctttttcttcttgagcagtatggcaagagaaaaccatttcttcagatttttccttttcttgtgaaaaattagcccgattaatttctcgagttctgcaatattttgcaatatggccctttcttttgcacttgttgcaggtcattttcttccagcacatatctttttctcttctctcttgaccatcttccttctgccttgaaaagccatttttctgaaaataaccacggtctcgcattggaaattcatttttttgaaaatttccgcgaaaccttgagttttgaggcctgaagctcaactttgactgaaatgcattttcaatagagctcccttcgcgctgaagctttctttcttcgtgagattccaacgagctcattagttgctgaattgtgagagtcaacatgtctttcgactcctcaatagcagcaacaatgtactcgtatttttcaggcagactgattaaaattttctccacaaccttctggtcgtttatatcttcaccatagaggcgcatcttctgagatccttgaaactcctccttcaacttgtcccatgcttccttggatttcttggcgccaataatacgcggaaatagactttccgcaactccttgttggatcaagaacaaggccttggcgtccgacatccgatcctctgccaaagactttttctgttccgccgtaagagtttctccagcggaatactcttgatagccattctcaacaatatcccacaatccttgagatagcagcagcgtccgcatcttgatgctccatatatcataattttctcctgcaaatacaggaaccatagactgcgccat

SEQ ID NO: 39360 - DNA, 3429 bp, Oryza sativa
  Clone ID: PAT_MRT4530_42908C.1
atggcgcagtctatggttcctgtatttgcaggagaaaactatgatatatggagcatcaagatgcggacgctgctgctatctcaaggattgtgggatattgttgagaatggctatcaagagtattccgctggagaaactcttacggcggaacagaaaaagtctttggcagaggatcggatgtcggacgccaaggccttgttcttgatccaacaaggagttgcggaaagtctatttccgcgtattattggcgccaagaaatccaagaaagcatgggacaagttgaaggaggagtttcaaggatctcagaaggtacttgcggtgaagcttcaaaccttgagaagacaatttcagaatttgctaatgaaggagtcagagaaggtaaaagactatttctcaagagttattgagatcgttaatcagatgcgcctctatggtgaagatataaacgaccagaaggttgtggagaaaattttaatcagtctgcctgaaaaatacgagtacattgttgctgctattgaggagtcgaaagacttgtcgactctcacaattcagcaactaatgagctcgttggaatctcacgaagaaagaaagcttcagcgcgaagggagctctattgaaaatgcatttcagtcaaagttgagcttcaggcctcaaaactcaaggtttcgcggaaattttcaaaaaaaatggatttccaatgcgagaccgtggttatttttagaaaaatggcttttccaggcagaaggaagatggtcaagagagaagagaaaaagagcattgaagctactcaggacaaaaggtatggttcaaggccttccatttattactctcaagtctgacccatgtgaaggatgtgtatttggaaaacaaattcgggcttcttttccccacagtggagcttggagagcaagtgcaccattggaactagtgcacactgatatagttggtaaagtgccaacaatttcagaaggaggaaattggtactttatcacatttatcgatgattatacaagaatgatctgggtatattttctaaaagaaaaatctgcagccttggagatattcaaaaaattcaaggccatggtggaaaatcagagtaatcgaaaaattaaagtattgcgcagcgatcaaggaggagaatatatctcaaaagaatttgagaaatattgtgaaaatgctggcatccgaagacagctaacggcaggctatagtactcaacaaaatggagttgcagaacggaaaaatcggacgatcaatgatatggccaattctatgctccaagacaaaggtatgcctaaatctttctgggctgaagcagttaatactgcaatttatattttaaatagaagtcctaccaaggcagtaccaaaccgtacaccttttgaagcttggtatggtaaaaagcctgtcattggtcatatgagagtatttggttgcatttgctatgctcaagtgccagcacaaaagagagtaaaatttgataataaaagtgatcggtgcatatttgttggctatgctgatggtatcaaaggctatagactttataatttggagaaaaagaaaattatcattatcagagatgtgatttttgatgagagtgctacatggaactggaagtctccagaagcctctagtactccattattgccaaccactaccatcacactaggccaaccacatatgcatggcactcatgaagtggaagatcatactccaagtccacagccatcaagtccaatgtcaagctcaagtgctagttcagattcaagcccgagcagtgaagagcaaatttctacaccggaatcagctccaagacgggtaagaagtatggttgaattattagaatctacttctcaacaaagagggtcagaacaacatgaattttgcaattattcagttgttgagccacaaagtttccaagaagcagaaaaacatgataattggataaaggccatggaagatgagattcatatgattgagaaaaataatacatgggagttggttgatcgtcctagggacagagaagttattggagttaagtgggtttataagacaaaattaaatctagatggctcagttcagaaatacaaggcaagacttgtggcaaaaggctttaagcaaaagcctgggattgattattatgagacatatgctcctgttgccaggctagagacaattcgtaccataattgctctagcagctcaaaagaggtggaagatttatcaacttgatgttaaatcggctttcttaaatggctatcttgatgaagaaatctatgttgaacaacctgaagggttttcagtccaagggggagaaaataaggtattcagactcaagaaggctttatatggattaaagcaagcgcctagagtgtggtatagtcaaattgacaagtactttattcagaaaggatttgccaagagcataagtgagcctactctatatgtcaacaaaacaggtacggatatcctaatcgtctcactctatgttgacgatttgatatatactggcaatagtgagaagatgatgcaagactttaaaaaagatatgatgcatacatatgaaatgagtgatctgggcttgctctactattttctcggtatggaagtgcatcaaagtgatgaaggaatatttatatcacaaaggaaatatgctgaaaatattctaaagaaatttaagatggataactgcaagtcagttacaacccccttgttgccaaatgaaaagcaaaaggctagagatggagctgataaggtagatccaacaatttacagaagcttagttggaagtttattatatttgaccgcaacacgaccggatattatgtttgcggcaagtttattatcaagatatatgtctagcccaagtcaattaaattttaccgctgcaaagagagttttgcggtatatcaaagggaccgcagattatggtatatggtataagccagttaaagaatcaaaattaattggctatacggacagtgactgggctggatgtcttgacgatatgaagggcacatcaggctacgctttctcacttggttcaggtatgtgctcctggtctacaaaaaaacaaaatattgtcgctttatcttcagccgaagcagaatatgtagcagcatcaaaagctgtttcacaagttgtttggttgaggagaattatggaagatctgggcgagaagcaatatcagcctactacaatttattgcgacagtaagtctgcaattgcgatcagcgaaaatccagtcagtcatgacaggacgaaacatattgctatcaagtatcattatatccgggaagcagttgatcgccaggaagttaaattggaattttgccgaactgatgagcagttggcagatatatttaccaaggctttatccaaagaaaaatttgtccgcgacagagagctcatcggagtttgcaagaaataa

SEQ ID NO: 39361 - DNA, 3504 bp, Oryza sativa
  Clone ID: PAT_MRT4530_42909C.1
atggcgcagtctatggttcctgtatttgcaggagaaaattatgatatatggagcatcaagatgcggacgctgctgctatctcaaggattgtgggatattgttgagaatggctatcaagagtattccgctggagaaactcttacggcggaacagaaaaagtctttggcagaggatcggatgtcggacgccaaggccttgttcttgatccaacaaggagttgcggaaagtctatttccgcgtattattggcgccaagaaatccaaggaagcatgggacaagttgaaggaggagtttcaaggatctcagaaggtacttgcggtgaagcttcaaaccttgagaagacaatttcagaatttgctaatgaaggagtcagagaaggtaaaagactatttctcaagagttattgagatcgttaatcagatacgcctctatggtgaagatataaacgaccagaaggttgtggaggaaattttaatcagtctgcctgaaaaatacgagtacattgttgctgctattgaggagtcgaaagacttgtcgactctcacaattcagcaactaatgagctcgttggaatctcacgaagaaagaaagcttcagcgcgaagggagctctattgaaaatgcatttcagtcaaagttgagcttcaggcctcaaaactcaaggtttcgcggaaattttcaaaaaaatggatttccaatgcgagaccgtggttattttcagaaaaatggcttttccaggcagaaggaagatggtcaagagagaagagaaaaagaagaaaaagatgatgtttgggttattgacagtggttgtacaaaccatatggccgctgatccaaatttatttcgagaaatggattcatcgtatcatgcaaagatccacatgggaaatggctctatagcccaaagtgaaggcaaaggtacggttgctgttcaaacagcagacggtccaaaatttataaaagatgttttgttggtacccgatttaaagcaaaatttgctaagtattgggcagcttctagaacacggagcattgaagctactcaggacaaaaggtatggttcaaggccttccatttattactctcaagtctgacccatgtgaaggatgtgtatttggaaaacaaattcgggcttcttttccccacagtagagcttggagagcaagtgcaccattggaactagtgcacactgatatagttggtaaagtgccaacaatttcagaaggaggaaattggtactttatcacatttatcgatgattatacaagaatgatctgggtatattttctaaaagaaaaatctgcagccttggagatattcaaaaaattcaaggccatggtggaaaatcagagtaatcgaaaaattaaagtattgcgcagcgatcaaggaggagaatatatctcaaaagaatttgagaaatattgtgaaaatgctggcatccgaagacagctaacggcaggctatagtgctcaacaaaatggagttgcagaacggaaaaatcggacgatcaatgatatggccaattctatgctccaagacaaaggtatgcctaaatctttctgggctgaagcagttaatactgcaatttatattttaaatagaagtcctaccaaggcagtaccaaaccgtacaccttttgaagcttggtatggtaaaaagcctgtcattggtcatatgagagtatttggttgcatttgctatgctcaagtgccagcacaaaagagagtaaaatttgataataaaagtgatcggtgcatatttgttggctatgctgatggtatcaaaggctatagactttataatttggagaaaaagaaaattatcattagcagagatgtgatttttgatgagagtgctacatggaactggaagtctccaaaagcctctagtactccattattgccaaccactaccatcacactaggccaaccacatatgcatggcactcatgaagtggaagatcatactccaagtccacagccatcaagtccaatgtcaagctcaagtgctagttcagattcaagcccgagcagtgaagagcaaatttctacaccggaatcagctccaagacgggtaagaagtatggttgaattattagaatctacttctcaacaaagagggtcagaacaacatgaattttgcaattattcagttgttgagccacaaagtttccaagaagcagaaaaacatgataattggataaaggccatggaagatgagattcatatgattgagaaaaataatacatgggagttggttgatcgtcctagggacagagaagttattggagttaagctagagacaattcgtaccataattgctctagcagctcaaaagaggtggaagatttatcaacttgatgttaaatcggctttcttaaatggctatcttgatgaagaaatctatgttgaacaacctgaagggttttcagtccaagggggagaaaataaggtattcagactcaagaaggctttatatggattaaagcaagcgcctagagtgtggtatagtcaaattgacaagtactttattcagaaaggatttgccaagagcataagtgagcctactctatatatcaacaaaacaggtacggatatcctaatcgtctcactctatgttgacgatttgatatatactggcaatagtgagaagatgatgcaagactttaaaagagatatgatgcatacatatgaaatgagtgatctgggcttgctccactattttctcggtatggaagtgcatcaaagtgatgaaggaatatttatatcacaaaggaaatatgctgaaaatattctaaagaaatttaagatggataactgcaagtcagttacaacccccttgttgccaaatgaaaagcaaaaggctagagatggagctgataaggtagatccaacaatttacagaagcttagttggaagtttattatatttgaccgcaacacgaccggatattatgtttgcggcaagtttattatcaagatatatgtctagcccaagtcaattaaattttaccgctgcaaagagagttttgcggtatatcaaagggaccgcagattatggtatatggtataagccagttaaagaatcaaaattaattggctatacggacagtgactgggctggatgtcttgacgatatgaagagcacatcaggctacgctttctcacttggttcagccgaagcagaatatgtagcagcatcaaaagctgtttcacaagttgtttggttgaggagaattatggaagatctgggcgagaagcaatatcagcctactacaatttattgcgacagtaagtctgcaattgcgatcagcgaaaatccagtcagtcatgacaggacgaaacatattgctatcaagtatcattatatccgggaagcagttgatcgccaggaagttaaattggaattttgccgaactaatgagcagttggcagatatatttaccaaggctttatccaaagaaaaatttgtccgcgacagagagctcatcggagtttgcaagaaataa

SEQ ID NO: 39362 - DNA, 270 bp, Oryza sativa
  Clone ID: PAT_MRT4530_4290C.1
gtcgctcggcggagagcgctggtgcgggaaacggaggcggcgggcctgctcagcttgttcgcgtcgtggcgggcgagcagctcgttcgttgtcgtggaagacggtgatgatgacgaggtcgtcagccatggccgcatcaagcccgacaccctggacgacgagtcaagcagcctcgtgatgctggaccgcgagtggcggatggcggagcacggggacatcaacggcctcctcgccaaacggccctcttcgtcgccgcccactccgccctaa

SEQ ID NO: 39363 - DNA, 4053 bp, Oryza sativa
  Clone ID: PAT_MRT4530_42910C.1
atggcgcagtctatggttcctgtatttgcaggagaaaattatgatatatggagcatcaagatgcggacgctgctgctatctcaaggattgtgggatattgttgagaatggctatcaagagtattccgctggagaaactcttacggcggaacagaaaaagtctttggcagaggatcggatgtcggacgccaaggccttgttcttgatccaacaaggagttgcggaaagtctatttccgcgtattattggcgccaagaaatccaaggaagcatgggacaagttgaaggaggagtttcaaggatctcagaaggtacttgcggtgaagcttcaaaccttgagaagacaatttcagaatttgctaatgaaggagtcagagaaggtaaaagactatttcccaagagttattgagatcgttaatcagatgcgcctctatggtgaagatataaacgaccagaaggttgtggagaaaattttaatcagtctgcctgaaaaatacgagtacattgttgctgctattgaggagtcgaaagacttgtcgactctcacaattcagcaactaatgagctcgttggaatctcacgaagaaagaaagcttcagcgcgaagggagctctattgaaaatgcatttcagtcaaagttgagcttcaggcctcaaaactcaaggtttcgaggaaattttcaaaaaaatgaatttccaatgcgagaccgtggttattttcagaaaaatggcttttccaggcagaaggaagatggtcaagagagaagagaaaaagaactagagaaattaatcgggctaatttttcacaagaaaaggaaaaaatctgaagaaatggttttctcttgccatactgctcaagaagaaaaagatgatgtttgggttattgacagtggttgtacaaaccatatggccgctgatccaaatttatttcgagaaatggattcatcgtatcatgcaaagatccacatgggaaatggctctatagcccaaagtgaaggcaaagatttttcttgcaaaatattggaccgtaaaaataatcgtctggttgccaaaataaatatggagaagaacagaaattttctattaaggatgaatcatccaactcaaatggctctcaggagtgaaattgatatttccgatttatggcacaaaagaatgggtcatcttaattacagagcattgaagctactcaggacaaaaggtatggttcaaggccttccatttattactctcaagtctgacccatgtgaaggatgtgtatttggaaaacaaattcgggcttcttttccccacagtggagcttggagagcaagtgcaccattggaactagtgcacactgatatagttggtaaagtgccaacaatttcagaaggaggaaattggtactttatcacatttatcgatgattatacaagaatgatctgggtatattttctaaaagaaaaatctgcagccttggagatattcaaaaaattcaaggccatggtggaaaatcagagtaatcgaaaaattaaagtattgcgcagcgatcaaggaggagaatatatctcaaaagaatttgagaaatattgtgaaaatgctggcatccgaagacagctaacggcaggctatagtgctcaacaaaatggagttgcagaacggaaaaatcggacgatcaatgatatggccaattctatgctccaagacaaaggtatgcctaaatctttctgggctgaagcagttaatactgcaatttatattttaaatagaagtcctaccaaggcagtaccaaaccgtacaccttttgaagcttggtatggtaaaaagcctgtcattggtcatatgagagtatttggttgcatttgctatgctcaagtgccagcacaaaagagagtaaaatttgataataaaagtgattggtgcatatttgttggctatgctgatggtatcaaaggctatagactttataatttggagaaaaagaaaattatcattagcagagatgtgatttttgatgagagtgctacatggaactggaagtctccagaagcctctagtactccattattgccaaccactaccatcacactaggccaaccacatatgcatggcactcatggagtggaagatcatacttcaagtccacagtcatcaagtccaatgtcaagctcaagtgctagttcagattcaagcccgagcagtgaagagcaaatttctacaccggaatcagctccaagacgggtaagaagtatggttgaattattagaatctacttctcaacaaagagggtcagaacaacatgaattttgcaattattcagttgttgagccacaaagtttccaagaagcagaaaaacatgataattggataaaggccatggaagatgagattcatatgattgagaaaaataatacatgggagttggttgatcgtcctagagacagaaaagttattggagttaagtgggtttataagacaaaattaaatccagatggctcagttcagaaatacaaggcaagacttgtggcaaaaggctttaagcaaaagcctgggattgattattatgagacatatgctcctgttgccaggctagagacaattcgtaccataattgctctagcagctcaaaagaggtggaagatttatcaacttgatgttaaatcggctttcttaaatggctatcttgatgaagaaatctatgttgaacaacctgaagggttttcagtccaagggggagaaaataaggtattcagactcaagaaggctttatatggattaaagcaagcgcctagagcgtggtatagtcaaattgaccagtactttattcagaaaggatttgccaagagcataagtacggatatcctaatcgtctcactctatgttgacgatttgatatatactgccaatagtgagaagatgatgcaagactttaaaaaagatatgatgcatacatatgaaatgagtgatctgggcttgctccactattttctcggtatggaagtgcatcaaagtgatgaaggaatatttatatcacaaaggaaatatgctgaaaatattctaaagaaatttaagatggataactacaagtcagttacaacccccttgttgccaaatgaaaagcaaaaggctagagatggagctgataaggcagatccaacaatttacagaagcttagttggaagtttattatatttgaccgcaacacgaccggatattatgtttgcggcaagtttattatcaagatatatgtctagcccaagtcaattaaattttaccgctgcaaagagagttttgcggtatatcaaagggaccgcagattatggtatatggtataagccagttaaagaatcaaaattaattggctatacggacagtgactgggctggatgtcttgacgatatgaagagcacatcaggctacgctttctcacttggttcagccgaagcagaatatgtagcagcatcaaaagctgtttcacaagttgtttggttgaggagaattatggaagatctgggcgagaagcaatatcagcctactacaatttattgcgacgacctcgccggcggcccgcgctggcgcgtccagctcggccgccgcgacgccaccgccaccaacatccccagcgccgacaacctccccggcttcaccgacacgctcgaggacctcgtcgccaagttcgacgccgtcggcctcgaccacggcgacctcgtggcgctccagggcgcccacacgttcgggcgggcgcagtgcctgttcacgcgggagaactgcacggcggggcagccggacgacgcgctggagaacctggacccggtcacccccgacgtgttcgacaacaactactacggcagcctcctccgcggcaccgccaagctcccctccgaccaggtcatgctctctgacgacccctacgccgccgccaccaccgcgcccttcgtccgccgcttcgctggcagccagaagagcttcttcaggagcttcgcggcgtcgatgatcaagatggggaacatcagcccgctcaccgggatggacggacagatcaggcaaaactgccgcaggatcaacacctattactag

SEQ ID NO: 39364 - DNA, 424 bp, Oryza sativa
  Clone ID: PAT_MRT4530_42911C.1
aatagggtggtggggtttttttttttttttttttttttttttttttttgggaaaaacccgcctgaaatttttattcaaaattggatcacccccatgtttaaatttggcacacacaaagaggcaagactttatttttttttcctggcccactaaacggggacaattaaaaaccaaaaaccccccccggggggaatgctacagggagcaaggttttaccttggggaaaaacccaaaattgacgggttgtttagggccaaaaaaacttgggcttgagcttgactttaatcaaaaaaaaccctacaaaactgttgtagccctaattgttggacaaaaacctgaacacttttaatggcccggcaaaaaaaatgtttggcaaacatcctgagctggtggcaaaactggtgccgcaagaattggcaatttt

SEQ ID NO: 39365 - DNA, 2182 bp, Oryza sativa
  Clone ID: PAT_MRT4530_42912C.1
agtggatccccgggctgcaggaatcggcacgagggcaaaatctttacttgctcccatggcctccggctcagagcctatagagtgtcaggttcttgtgctgagggtgtccattcattgtgaaggatgcaagaagaaagtgaagaaagtgcttcaacatgttcctggagtgttcagatgcgacgtcgatgcccggagcaacaaggtcatagtcacggcctcaagaaatatggacgccaacatcctcgttgcgaagctgcgcaagtccggcaagcaagctgagccatggccagaggagccaaagcagcagcagccaccgccaccgcctgcagagagccaaagccaagagactaagaaccaaagcgacgaatccagcaagccgagtgatcaaccagccgaaaagcccggtcccgacaaagctgaaggcagcgcagcggagccaaacaaccctcagccatcgccagagccgacgaagagcaccgatgagaccccaaagccaaatcaagaaatccaggagccatccaacgccaaggccaacaccgatgccaacgccagtggcaatgcaagtgacgagaccaaggaagcagcagcaacaggagagcaatccagtgagccaaaagggaaagtaaagcaacaccgggagaggccgatcgatgcgagggtgacaatggaatacggcggaggcagccacgtgaactacatgccgcaaccgcagccggtgcccgtcatgagctacaatgtggcacggccgacggcgagcgcggcctactacgccgccccaccggcaccggcgccgatgtcaatgccgatgcccatggcaaggcctggaccatcatcacaaggctacattgacgaggagtactcgccttcctactacaaccgttcatcgccatatgagccttactactatcctcaaccttcgccataccgctaccagcattatcagcaatcttcagctgacgactactactatggagcaccccagcagaggagcgccttctcgccgccacgggatgcttacgacgagggttcgccgcgcgcagccacaggagaggacgcacgtcaagtggtcgtcgacgagacggacaccggccattctctcggtttccgagcgactcgactgcagcggagagcggcggcggcgagtaggatggggtttgattttggggttcgtggggtcgagaggaagggtattgaggccggggcggcggagtggagaggaaggcgagcgagacggcggcgggcgggcggggcgggcgacggcgaggcgcgccgccgcgtccaaacgctgaccggccgcgccgccctgcctcgcgaggaaaccgcaaaagcccaagctgagttgggcctcagcgggattgccgggatggcccattggaccgagacgcgcgtgggctggaacgtgaatcccatccgcgtccgtgttgggccggaatgggattcccaggtccgttccgaatgggccgggtcgcgattgcgtggagggaaaaagtacaccgaagccggcgacgggcggcgctgttgggaggaggccgccggggggaggggggaggaggaggtccggcagccggcgtcgcgccggcgaaggcaacgccgccgtcagcatcctcgtttccgccgccgtggcacagcgttgcttggcggccgcggggggagcaagtcgcggcacccacgcttccccgaccacgatgccgccgcctccgccatggcgtccgtgaaggcccccgcgccgcaggagcagaaggtggagggcgagtcgtcggacgcgtcgttagcggtggggggaggctttgagctcccgcccgcgtgcggcggccactcggcggcaatcggcccggccgaccgtcatggtctcctcctcctcctcctccgcggcggggggcggcttcgagctcccgcccgcgtgcggattccactcggcggaacctggcgcggccgaccgccgtggtctcctcctccttctccgcttggcggccgccgtggcatccacggtcgtcgtcgtcgccgcggcgagcgacgccggcaagctgtcgctgtgggcgctggtgaaagtggtggcgccactccctcctctcccgccgacgccgccgcgcgctgctccctcctcttccgctggcgcccaccggggagaagggcggcggacttggtgcggccgccgcgtcgccatcttgctccctttacgcgg

SEQ ID NO: 39366 - DNA, 4029 bp, Oryza sativa
  Clone ID: PAT_MRT4530_42913C.1
atggcgcagtctatggttcctgtatttgcaggagaaaattatgatatatggagcatcaagatgcggacgctgctgctatctcaaggattgtgggatattgttgagaatggctatcaagagtattccgctggagaaactcttacggcggaacagaaaaagtctttggcagaggatcggatgtcggacgccaaggccttgttcttgatccaacaaggagttgcggaaagtctatttccacgtattattggcgccaagaaatccaaggaagcatgggacaagttgaaggaggagtttcaaggatctcagaaggtacttgcggtgaagcttcaaaccttgagaagacaatttcagaatttgctaatgaaggagtcagagaaggtaaaagactatttctcaagagttattgagatcgttaatcagatgcgcctctatggtgaagatataaacgaccagaaggttgtggagaaaattttaatcagtctgcctgaaaaatacgagtacattgttgctgctactgaggagtcgaaagacttgtcgactctcacaattcagcaactaatgagctcgttggaatctcatgaagaaagaaagcttcagcgcgaagggagctctattgaaaatgcatttcagtcaaagttgagcttcaggcctcaaaactcaaggtttcgcggaaattttcaaaaaaatggatttccaatgcgagaccgtggttattttcagaaaaatggcttttccaggcagaaggaagatggtcaagagagaagagaaaaaggtacgtccagttcaaatttgtggtgtgacatttgccaaaaatctagtcatactacagatatgtgctggaagaaaatgacctgcaacaagtgcaaaagaaagggccatattgcaaaatattgcagaactcgagaaattaatcgggctaatttttcacaagaaaaggaaaaatctgaagaaatggttttctcttgccatactgctcaagaagaaaaagatgatgtttgggttattgacagtggttgtacaaaccatatggccgctgatccaaatttatttcgagaaatggattcatcgtatcatgcaaagatccacatgggaaatggctctatagcccaaagtgaaggcaaaggtacggttgctgttcaaacagcagacggtccaaaatttataaaagatgttttgttggtacccgatttaaagcaaaatttgctaagtattgggcagcttctagaacacgggtacgcggtttattttgaagatttttcttgcaaaatattggaccgtaaaaataatcgtctggtcgctaaaataaatatggagaagaatagaaattttctattaaggatgaatcatacaactcaaatggctctcagaagtgaagttgatatttccgatttatggcacaaaagaatgggtcatcttaattacagagcattgaagctactcaggacaaaaggtatggttcaaggccttccatttattactctcaagtctgacccatgtgaaggttgtgtatttggaaaacaaatccgggcttcttttccccacagtggagcttggagagcaagtgcaccattggaactagtgcacgctgatatagttggtaaagtgccaacaatttcagaaggaggaaattggtactttatcacatttatcgatgattatacaagaatgatctgggtatattttctaaaagaaaaatctgcagccttggagatattcaaaaaattcaaggccatggtggaaaatcagagtaatcgaaaaattaaagtattgcgcagcgatcaaggaagagaatatatctcaaaagaatttgagaaatattgtgaaaatgctggcatccgaagacagctaacggcaggctatagtgctcaacaaaatggagttgcagaacggaaaaatcggacgatcaatgatatggccaattctatgctccaagacaaaggtatgcctaaatctttctgggctgaagcagttaatactgcagtttatattttaaatagaagtcctaccaaggcagtaacaaaccgtacaccttttgaagcttggtatggtaaaaagcctgtcattggtcatatgagagtatttggttgcatttgctatgctcaagtgccagcacaaaagagagtaaaatttgataataaaagtgatcggtgcatatttgttggctatgctgatggtatcaaaggctatagactttataatttggagaaaaagaaaattatcattagcagagatgcgatttttgatgagagtgctacatggaactggaagtctccagaagcctctagtactccattattgccaaccactaccatcacactaggccaaccacatatgcatggcactcatgaagtggaagatcatactccaagtccacagccatcaagtccaatgtcaagctcaagtgctagttcagattcaagcccgagcagtgaagagcaaatttctacaccggaatcagctccaagacgggtaagaagtatggttgaattattagaatctacttctcaacaaagagggtcagaacaacatgaattttgcaattattcagttgttgagccacaaagtttccaagaagcagaaaaacatgataattggataaaggccatggaagatgagattcatatgattgagaaaaataatacatgggagttggttgatcgtcctagggacagagaagttattggagttaagtgggtttataagacaaaattaaatccagatggctcagttcagaaatacaaggcaagacttgtggcaaaaggctttaagcaaaagcctgggattgattattatgagacatatgctcctgttgccaggctagagacaattcgtaccataattgctctagcagctcaaaagaggtggaagatatatcaacttgatgttaaatcggctttcttaaatggttatcttgatgaagaaatctatgttgaacaacctgaagggttttcagtccaagggggagaaaataaggtattcagactcaagaaggctttatatggattaaagcaagcgcctagagcgtggtatagtcaaattgacaagtactttattcagaaaggatttgccaagagcataagtgagcctactctatatgtcaacaaaacaggtacggatatcctaatcgtctcactctatgttgacgatttgatatatactggcaatagtgagaagatgatgcaagactttaaaaaagatatgatgcatacatatgaaatgagtgatctgggcttgctccactattttctcggtatggaagtgcatcaaagtgatgaaggaatatttatatcacaaaggaaatatgctgaaaatattctgaagaaatttaagatggataactgcaagtcagttacaacccccttgttgccaaatgaaaagcaaaaggctagagatggagctgataaggcagatccaacaatttacagaagcttagttggaagtttattatatttgaccgcaacacgaccggatattatgtttgcggcaagtttattatcaagatatatgtctagcccaagtcaattaaattttaccgctgcaaagagagttttgcggtatatcaaagggaccgcagattatggtatatggtataagccagttaaagaatcaaaattaattggctacacggacagtgactgggctggatgtcttgacgatatgaagagcacatcaggctacgctttctcacttggttcagccgaagcagaatatgtagcagcatcaaaagctgtttcacaagttgtttggttgaggagaattatggaagatctgggcgagaagcaatatcagcctactacaatttattgcgacagtaagtctgcaattgcgatcagcgaaaatccagtcagtcatgacaggacgaaacatattgctatcaagtatcattatatccgggaagcagttgatcgccaggaagttaaattggaattttgccgaactgatgagcagttggcagatatatttaccaaggctttatccaaagaaaaatttgtccgcgacagagagctcatcggagtttgcaagaaataa

SEQ ID NO: 39367 - DNA, 659 bp, Oryza sativa
  unsure (1)..(659): unsure at all n locations
  Clone ID: PAT_MRT4530_42914C.1
attcggctcgagatgagttttctctctcccccccctcccgagtttctcgcnacagaangaattccccaagcgcgggcattggtgttttatccagatcggcgcacgactccattcgctcaagcagcatcggggatggatcctaatctcccaacagtggaagaaagatctagggttcctcctgctgaagccacagctgtctcaagcgcattgcttccattccgatatagaagctaattcacgcacgcggtttcgattcaaattcagctcgctccagcaggtttcgctacgtgaatgagaagagatacggttacggcttaaaacgagcatggaggtcattagcgatacggcgtcgttggaggtcgattcgctgcagctccctgaggagtcctctctcgcactcaaatctaacctaactttcgtcgagacgctcttcgagcagtggctttcgcttcccgaaagcaatcgattggagacatcattggtaaatgaagcaaagtcgggcgctccctcgaatgtccccgggaattgctctagtccaaatgctgcaagcaattctttgccttccatgtttcctgctggcactgcaccacctctttctccaagaagtacatctggggcccctcgcatagtgaaacagagagccggcccatctaacttgg

SEQ ID NO: 39368 - DNA, 2361 bp, Oryza sativa
  Clone ID: PAT_MRT4530_42915C.1
atggatgagaaggtgaagatggagagcaagctgtcctccgcggcggcgttcgtggagggaggtgtgcaggacgcctgcgacgacgcctgcagcatctgcctcgaggccttctgcgacaacgacccctccacggtgacgagttgcaagcatgagtaccatctgcagtgcattcttgaatgccaagaactacttgaggctgttgagcaagagaggaacattcgagctaaccgtttgaacactgccgctgtttttcaccatccagtattgggtgattttgaggtccctgtaggagctgatgatgctgaacttgaggagcgcattatacaacacttggctgctgctgctgcaatgcgccaagatgaagaccatgaacaatcttctgacttaggttctgctcatccttttgctgctcttgctgctgtagaccaaggacatatgagtggtggttcgcagctatacgtgggtcattctgaccaggaaggatccctcgccgacgagggcgcggtagcagcagcacaagcaattcgcgcaggagagaagtggccgcaggccgcagcgatgggcgcgccggtttgtggcgcactcgtgtgcttcttcgttctcctcgttgcccgtgcggccgcggagacggcgccggtggaacgtcccacattgccctcagccgacgtcgccatcgacggtaatggcaacggcgctcgtgctggtgcgggcaaagctgccggcgccggcgccgtgggaggagggatcgtgtcaaactcggtgctggtggcgctgctggactcgcattacacggagctggcggagctggtggagaaggccctgctgctccagacgctggaggacgccgtcggcaagcacaacgtcaccatcttcgcgccgcggaacgaggcgctggagcgtgacctcgacccggagttcaagcgcttcctgctcgagccgaggaacctcaagtcgctccagtcgctgctcctcttccacgtcctccccgcccgcctcccctccgggtcctggtccgccgtctcccaccccacgctctccggcgaggaggttgagctcgccgccgccgccaacgacggcgcgatgcgcgtcgcccacgccgccgtcacccgcccggacgccgtgctcaggccggacggtgtcatccacgggatcgagcgcctcctcgtgccgcgctctgtccaggaggacttcaaccgccgccgcagcctcgccgacatctccgccgtgctgccaactggcgcgcccgaggttgacccgaggacgcaccgcctcaagaagccggcgccgcccgtgccacccggcgcgcccccggtgcttccgatctgggacgccatggcccccggcccatccatcgcgccggcgcctgcccctggaccgggctccgggaagcaccacttcgacggccacagccaggtgaaggacttcatccagaccctcctcctgtacggcggctacaacgagctcgccgacatcctcgtcaacctcacctcgctcgccaccgagatgggccggctcgtctccgaggggtacgtgctcaccgtgctcgcgcccaacgacgaggccatggcgcgcctcaccaccgaccagctcagcgagcccggctcgccggagaacatcctgtactaccacatgatcccggagtaccagaccgaggagagcatgtacaacgcggtgcggcggttcggcaaggtgcgctacgacacgctgcggctgccgcacaaggtggtggcgcgcgaggccgacggctcagtcaagttcggccatggcgagggctcggcgtatctcttcgacccggacatctacaccgacggcaggatcgcagtgcagggcattgacgccgtgctgttcccgccggctgacaccaagacggcgccggacacggcgccggtcaggagggcgcccgccgtcaccggcactcgcaagaagaacaaactccggagaggcaagttgttagaagcaacgtgccaaatggctggcatccttggtcagcgattgcgattcgcaagctgccagtagacggcgaaagattgatctcatgataccgaaacacgaactagaatgaggtgatggactgtgctggagccgtccacattaccatttgtttttttttatttttatttttgtttattattacgaataataaatcaggtggggaatgtaatctggtggctgttggtgtctgaaaaaaaaaaaggcaggaaaatgttcatacttgagaaacgagatcttctgtgtataggagcgtttttttttatatttttttccgtcattttttcttctttttctgttttgacagaatgccgagtaaccaattaaacatcacacccccaaaaaaaaaaaagggcggcgctcgcgatctag

SEQ ID NO: 39369 - DNA, 648 bp, Oryza sativa
  Clone ID: PAT_MRT4530_42916C.1
ggtggtagacgcagcaccggcaaaggtccgaccggtgaggaggaggggaagaaggtgacgagggtgctggagtgggaagggtgcgtggtgttgccggtgccgacggcgacggccgacgaggcgtgggtgctgttgtcggacttcctcgcgttccaccgctggcacccgcgcgtcgccaagtgccgcctcgcctcgccgtcagcggcggcggcgctggccatgttcgagacacaaaatcacaaattgtactgcgagggcacgccatgcggcgacgggacaccgccggactgggcgcacgagatgctgctcgagcacgacgcggcgcgccgcttcttccgctacgagatgaatggcaacagtatgggcttcggcgtcttcttcgccatgttccgcgtcatcgtcgtcgtccccgacgccgccgccggcgacgcgccggggtgcgagctgcggtgagagttcgagggcgaccccgtgcgtggcacggccaaggagtccaacgtggcggcgctcaccagccgcctcgacgagctctccgcggacgacgcggcgctggccgccgccgagcgcgccgtggcgcaggccgcgctcgcggcgcccctccgcgccgccgccgacgaggtctccgcgctccgcgcccgcctcgccgcc

SEQ ID NO: 39370 - DNA, 449 bp, Oryza sativa
  unsure (1)..(449): unsure at all n locations
  Clone ID: PAT_MRT4530_42917C.1
gcttgtttgagtaccatgtgaggaagaacttccccttctcagtgacatatgttccattatccgcgaagaaccgggtcttctcgggagtgtcattgtactctccagcatcgtcgggcaattcccattcaggatgcccagcctttgctgcttctgctttgaaatctgcctccaggtatttatcatagcactgcagtattttttttattgtaataactgttagagcagtgaattactaccatttgtcatgcattttgtcccatttcatatctgttcagcatatttagaatttgatttcctcttcttttgttgcttaatttcagtctcaggcttgcttctactgttttttttttctgttagtactgtttttggtccaaacatctttgtgaaccagaaccactttaatatttgtgctcattntccaaagatttttttttcctaaggagatctgc

SEQ ID NO: 39371 - DNA, 357 bp, Oryza sativa
  Clone ID: PAT_MRT4530_42918C.1
gactattctacccttgcttcaatgaaacaaccaaatccccaaaccttgctgtccccgatccaatcgaaaaacctagcttgttgggttgcaagcggcggcggcgcgcggcagggaggagcggcggctcgggccagcgcgcggtggagtcgggcgtgggcaggcgcggcgcggtggccccgaggagcagcggctccgtcgacgcggcggcgcggcggccctgcggagcggcggttccgtcggcacggcggccccgcggattgcaagcgcagggaggcgcggcggccggcggccccgcgactgaggagcgtcggaaaggagcggcgcggctctgtcggcgtgtcggcgcggccccgcggt

SEQ ID NO: 39372 - DNA, 3013 bp, Oryza sativa
  Clone ID: PAT_MRT4530_42919C.1
atgaggctttcgtcgtcgtccggcagcgtcctcccggctcaggcggcgtcgccggaagctgtagaagaacaaaaatgcctgaattcggagctctggcatgcgtgtgccggtccccttgtttcgttgcctgcagtgggtagccgagtggtttatttcccacagggtcacagcgaacaggtagctgcatcaacaaataaagaaatggagtctcagatccccaattatcctaacttgcctccacaacttatttgccaacttcacaatgtgacgatgcatgcagatgcagaaacagatgaggtttacgctcagatgacgctacaaccacttagcccgcaagagctcaaggacccatatctaccagctgaattaggttctgccaacaaacagccaacgaattatttttgcaaaacattaacggcaagtgacacaagtacgcatggcggattctctgttccccgtcgagcagctgagaaagtgttccctccgctggattttactcagcagcctccagcacaggagttaattgcaaaagatcttcatggcaatgagtggaagtttcgtcatatctttcgtggtcagccaaagcgacaccttctaactacaggctggagcgtctttgtaagtgcaaagagacttgtcgccggggattctgtcctatttatctggaatgacaacaaccagcttcttctgggaattcgtcgagctaaccgcccacaaactgttatgccatcttcagtcctatctagtgatagcatgcatattggtcttcttgctgcggctgctcatgctgcttcaacaaatagccggtttacaattttttataacccaagagcaagcccttcagagtttgttatcccactttctaaatatgttaaggctgtatatcatacccgtatatctgtgggcatgcgtttcaggatgctttttgagacagaagagtcaagtgtacggagatacatgggcacgataacaggaattagtgatcttgatgctgctcgttggccaaactcacattggcgttctgtaaaggttggctgggatgaatcaactgccggagagaggcagccaagggtgtcgctttgggagattgagcccttgacaactttcccaatgtacccatctccttttccactcagactgaagcgtccatggccaacaggcttgccttcattacatggtggtaaggatgacgacttgacttcttctctcatgtggctccgagacagcgcaaatcctggtttccaatcattgaatttcgggggtctcggtatgaatccttggatgcagccaaggtttgatgcttccttacttggtctgcaacctgacatgtatcaaacgatagctgcgactgctttccaggacccaacaaagcaggtctctcccacgatattgcagttccagcagccgcagaacataggtggcagagctaatacacttctgccaagtcagattttgcagcaagtgcagcctcagtttcagcagcagcaatacctccaaaacatcaacgagaccacaatccaagggcatgctcagtctgagttccttcagcagcagctccaacgctgccagtcgtttactgagcagaagccacagctgcaaacccagcaacaacagcaagaatcacagcaacaacagcagcagcaatcgcagtgtatgcaagtcccacaacatcagcaaatgcaacagcagaagaacatgaccaactatcagtctgtacctaatgcattgtcaccgttttctcaactctcctctccttctcagtcttcacctatgacactgcaaacagtattaccattctcccagccacagagctatccagacacgagtatgagctcattgtcaccatccaacacatccaccatgcataatgcattgaggccattttcatcggaagcaccttcgcacctaagcatgccaagaccgactgcagtacctgtccctgacccatggtcatcgaagcgagttgcagtggagtctttgcttccctctcgtcctcaggttacatcgcagatggagcagttggactcaacagcacctagtataccacaaagctctgcgttggcgccgcttcctggaagaggatgcttggtggatcaagatgggaactctgatcctcaaaaccatctgttatttggcgttaacatagattcacagtcacttctaatgcaaggtggcatcccaagcctccagggtgagaatgattcgacggcaattccttattccacctccaatttcctgagcccgtcgcagaatgatttccccttggatcaaacactaagtagtgcagactgcttagatgaatcaggatatgtgccgtgttcacagaattctgatcaagtgattaatcgaccacctgcgacctttgtgaaggtttacaaatcgggaacctatggaaggtcacttgatatcactagatttagtagctatcatgaacttcgtagagaactagggcgcctatttggccttgagggccagttggaaaaccctttgagatcaggctggcagcttgtattcgtcgaccgagaggatgatgtcctcctcgttggcgacgacccttggcaggaattcgtgaatagcgtctcctgcataaagatactttcaccacaggaggtgcagcagatgggcaagccctttgagcttttgagctcggctcccggaaagaggctaggtagcagctgtgatgactatgtgagcaggcaggaatcaagaagcctgagcacaggaattgcatctgtcggctcagttgaattctgaagcaagggcgctaacgagcccttcaatcaaatctagcctgttacctatgtttctgcagtttttcttcccctagttttgagacctggaactgaaagaacatagatccatgcttagctaagttatgtaccatctaataattatgctatatgatatcaaattccaagtagaaactatcaacttttggtatatatatatataccaaaactttgttccatgaaacactaatcctgtgaatgtaggccatctaaattatcaggct

SEQ ID NO: 39373 - DNA, 906 bp, Oryza sativa
  Clone ID: PAT_MRT4530_4291C.1
ggacgaccggccaccgaaggtttaacaaaccaaatcatttcgttaacctcgtcgccgtcgccgtcaaccggctgctccgaccaccggggagagctcctcctcctcctctccacgactccacctcgtctccacgctcccccctcgccggcgggcgcccgtcgattccgcttccccgctctcttctgcaagcgcgcaataatcaacaggcgaaaaccccgcaggagggatccagcttcctgaattttttggcaaatttttgaggtgtgagctctttttttgttgggaattttgaggcaccgcatccaccagagccggccgccatactgaattcaggatgtctacgcagctagtgtttcccagtgcttccaatggcggatgcccattgggcgtttcgcggaacaattttaggaaagtggttctgggcgtcggtgcggggcatctccagggaaagaagtgcttttctggtggctcttcccgccctagcaaactcgagtgctctgcaaactcgcggcgagttgggccacggcgcaccaaggatgccctgtatgacctccaccctgagatctcgatgctgtatggagaggataatggtgcagttgctgccccgggcaaggaacaggatattgtcaagaccaccgagaggctggaagatgtatctgcgtcgcaccgctacagtgagccgaggatcaaagtcattggcgtggaggtggtggatccaatgctgtgaacaggatgattgagagcgacgggaagggggtggaattctggatcgtgaatactgattttcaggctatgagaatgtcacccattgatccggataataagttgcagatcggccaggagctaacacgaggtcttggtgctggtgggaacccggaaattggcatgaatgcagccaaggaaagc

SEQ ID NO: 39374 - DNA, 315 bp, Oryza sativa
  Clone ID: PAT_MRT4530_42920C.1
agagttcattcatttattcaccatatgaatatatgccccccgacaaaggaaagcactagtgattaagcaaccccacaaagtcatacacacagcgggggggagaagcctagggaccagtcctgggggcccgaggaaaacccagccagaagcagacaccaccgggcccaggggggaggcccacgccgcaaaacgccgggaggggcgcccccgcccgccccaaggcccccctccggcagccggggaacacccgggccagggggggcccaacaaggggggggccgccccccctggagaggcccccaaccctggggggga

SEQ ID NO: 39375 - DNA, 1385 bp, Oryza sativa
  Clone ID: PAT_MRT4530_42921C.1
aaacccataaaccctcggcctttttttcttcccgaagctccaaggaatcctctccactcccggcgatggcatcggcggcggcggcggcggcggcggagtgggaggaggctgagcggaaggtgctggtggcgaggaaggccgccttcgggctgcccaccgcctgcccgacctgcctccccgtcctcctctacctccgcatgtgcaacgtccccttcgacatccacgtcgactcctccttccccgacgccgatcacataccatatgtcgagtttggtgaatgtgttgcattcaacaatgaaaagggtggtgtaattgaatatctcaaggaggagaaaattgttgacttgaactcaaagcatcctagtgtttcttattcggatgtattatccacaaaggccatggttatgacctggctttcagatgctttgcaatatgagctctggctggcttctgatggaagcattccacatgatatctacttttctgatctctcctggcccattggaaagatactctattggaagaaaacgagagaagtgaagcaacaactgggcataactaagcttaatgctgcagaaaaagaagaggagatataccagaaagcaaatgctgcttatgatgccttatctacgagattaggagatcagatctttctctttgacaacagccctacagacgttgatgctctttttcttggacatgcgctttttgttcttaatgtattaccggatacgtctgtgctgcgaagctgtctgcagaagtatgacaacttggtaaactttaccaagcacctcaaggtccaattactggaagctgattctgattcatcagcaacaggattgggatcaactgatccatcatcatcctctacacccaggaaaagagcgtcttctggtcggagttataagccaaaacccagagctaagaaggaacgaacagaggaggaaaagaagttcaggcgaaaagcaaagtatttccttgcgacacagctcgttgcggttcttctattcctatcgctcatgggtggagccgatagctcagagctagacgatgaggacggtgtagattatgaagattaaatcctccctttgttgtactgcacgattcttttctgaagtgttaatttgccaaagcaccggttgtggtgcttgaaaatgttcttcccatggttagtcagagagatcgcatacttcatcatattgtagttagcaatacactgagttggtcagcagccggcagttccatagttttggtacttcaaaagtaaaacataatctgtggaattttgtattggtttcgttggacgcaactgtaagcatatgcaaagtagttgtcccgaatgccctttgccccggagatttgctaaataaacgaagtaccttttg

SEQ ID NO: 39376 - DNA, 796 bp, Oryza sativa
  unsure (1)..(796): unsure at all n locations
  Clone ID: PAT_MRT4530_42922C.1
ccnnnctagaactagtggatcccccgggctgcaggaatncggnacgagatcgccgaggccgtcaacgncaggctccnttcgnctcgagcacccggaccccagcttnnnccggnacggagccgangncnngnncacgncnnnncacaacgnnaagcatnntnaggncnnngncccnatntnacgaanggncnnnaannnggntncggntncgcaagggannnntcntgntngtcttnnngnnannntgcaanntgnttcngncnncancgatnntnggaannaanntnnnnnactntangnncnncnnanganntntnccnnatnangnngncgttaaacnctnnncttaantnnnanntagngncncttannggnngnnantncnngnncnatnntnttgnnnnnnnatngtnnnannnngnantanngtnntnntncntnnnnnannnnnnnccncncnnnatngtnnatatngntactnnnnnttnntntancnnnntcccgccctccngngntnannngnnnnangangnncgttnnnnnnngntgntntgnnngnncntngaatttgatgananatntngncttnttnacngnnncaaaanngnggnnnngatgttnnnnattnnnttntntngggnnntcnntntntnttgtnaannntntnattgtgtnnnnggnantccnnntnnnngnnnncaccannnctannngntnnngnnnnnntnntanacnnttnnnngngggntgaanagngaggntnnannnnantggnttnggnnnttgggttagnntg

SEQ ID NO: 39377 - DNA, 833 bp, Oryza sativa
  Clone ID: PAT_MRT4530_42923C.1
agtgttcagcctttgggaatcctgtggagcgtcaagtcctgattggtgaaatgcttggctccagtaatgagagcgaacatcttgaggtgatgatgaaagatcaatttgcaaactatgtggtacagaaggtgttagagacctgtgatgatcagcagagagagatgatccttacaaggataaaagctcatctgaacacactgaagaaatatacttacgggaagcatatagtggcacgcgtggaaaagctcgtcgcagccggagaaaagcggcttgggcttcaaccatcaactgcagcttgaagaataagcgctatctagttgtacagctaacagtggctaggtttgcactggcgtcatgtttttctatctaaaccaacccctactagtacgaggctctgttctgaatggccttgttagaaataaagagagagagtagtagcttgcaccggagagtgtacattctgtagctgaggaactagcacaagggagggagataaaaagaatcttcatgtgtaccgtgtactatgagttctcaaactgtgtaaaaagaggaggagcaaggtgtacaaattttttagaactagagcgaaagagagggctgttgttagctgttttattaaacttttaaaaagccagtcactagtacttttttctttttgaaaaaaaaaagaattaatctcagccctgcccggtatcgatgattcgatatcatatcagggcgtcgcgttttgttgtaacatatactactactactgtaccacagatgatgccttgagctgttctgtgggtgaagctggagctattaatctcagctttgctcttttttactactcc

SEQ ID NO: 39378 - DNA, 582 bp, Oryza sativa
  Clone ID: PAT_MRT4530_42924C.1
atggcgcactctcacctgttgccaaccaggctcaagaggagtgaagtcctctgccgcggccgtactgtggcgacgtcgcgccatctccctctccggcctagcgtggtcttctcggatgctacgacgtcgcggaaggagtgcgcactcagcggagcggagtatccctgcggatccggcgtcgccgagacatgggagacaccccccggcgagatccgtgccgcggatctgggcggcaagaataggctgaagaagttgcgagctgtcgacttccacgagagcgttatcatctggcacatcgccacagatatgatcctctatgggagagaaagcagcatgtccggcggtgacaatgcagagaacaaaaaggacgccgaacgcgtgcgctcgatcagggcaatctccaactacctcatgtttctccttgtgactcaacctgacatgcttcctggcattccccagaacttagagaaccgtgggcaactcatttcttccggcgttaaggttgataacttggggagtgggaggatggggaggatgctcgactatggtgcttccatgatgaagactccacctccagtttga

SEQ ID NO: 39379 - DNA, 284 bp, Oryza sativa
  Clone ID: PAT_MRT4530_42925C.1
ggtccctcttaaaggtaaaagtttacgtttacgaacagttaccgctacccatttccgatgtggaaaggatgaggaagttgattttgatcatatcaatgcacatggggtgcaagtgaattatactgatgcgcatgcttcgtacgagcatgagggtatatatatatatatctatgtagatatgaatgtatttatatttttttatatgtacagcgcgaagcggctccagtgtacgttaaatgtgcgtgggcgggacgaaacatatgctacacaacacgtgctgttct

SEQ ID NO: 39380 - DNA, 1490 bp, Oryza sativa
  Clone ID: PAT_MRT4530_42926C.1
gtctccccatggcatcgctccgcgcggcaaccgggctgccattctcgccgcgcccggcgtgctgccgccctcccagctcgccaggctccaggcgtggcttcgtgttcccgccgcgcttcgcacctggcgtgttccttttctttccgctggattctgcaggcggcggcggagtagctcgccggcgcgcgtacccgaggatcgaggccacggcgaggcacggcgcgaggaaggagaaccccaaggtcaggaaccgccggctgcagaagaagttcaatggcacggcgacgaagccgaggctatccgtgttctgctccaacaggcagctctatgccatgctcgtcgacgaccacaacaagaagatcctcttctatggcagcaccctgcagaaggccatctgcggtgaccctccctgcggcgccgtggaggcagctgggaggatcggggaggagctcatcagggcgtgcaaggagctggacatcaccgagatctcgtcctacgaccgcaacgggtttgctcgaggggagaagatgatggcgttcgaagttccggatctagtggagcttgagtgcattgattgggcgagaaaagaaattaacataaagtatgaaatcagagataacaggaagggatacaaagcaggagccttgaagaagggcatggaacatatctatacccaacagtgcgattttgttgccattttcgatgcagatttccaacctgaatctgatttccttctaaaaataataccatttcttgtgcataaccctaagattggtctggttcagacacgttgggagtttgtgaactatgatgtttgccttatgacaaggatacagaagatgtcactggactatcatttcaaagtagagcaggaatcaggctcatctatgcattcattctttggcttcaacggtactgctgctgtgtggcgggtatcagctactattaacgaagcaggaggttggaaggatcacacaactgtggaagacatggacttggctgtacgcctgttaagagtgaactcccaagtaccttcaaagcctaccgacatcggcagcatagatggacttgtgggcgtatctgtatggaaaaaacttcatctactctacagctttttcttcgtaaggagggtcgtcgctcccatcctgaccttcctgttctaccgtgttgtgattccgctgtctgtcatggtccctgaaatcagcattcctgtctgggggatgattctatttgagaatgtcatggccatgcaccgaatgcgtgcagctctaacaggcttgctcgagaccatgaatgtcaatcagtgggtggttactgagaaggttggtgatcatgtaaaggacaagcttgaagtccctcttcttgaaccattgaagccaacagactgcgtcgagaggatttacattcctgagctcgtggtcgcgttctacctcctggagggcttttccggaagaaacgcaacgggtgttaaccggtccaaggacgtatga

SEQ ID NO: 39381 - DNA, 198 bp, Oryza sativa
  Clone ID: PAT_MRT4530_42927C.1
atggagcattattttgctgtatacatggtgtgcatcttcgttgggcactcccttgttgtcctcaccaccattagggtggatggatatggctgtgaagtgaaggccaggccatcaaagttgggtttgatcatatcttctgttcttgttcttgtgatccaactatccaaggacttggccaggagcacatcagcgtgctag

SEQ ID NO: 39382 - DNA, 1998 bp, Oryza sativa
  unsure (1)..(1998): unsure at all n locations
  Clone ID: PAT_MRT4530_42928C.1
atggagttgaaggttgaagagcccaaaatgaaacatgtaaatatagatggtccaaagtggaaagcctccgtgacgcacgagcagagtccgtcgcctcgcttcctccgccaccgccagcccttcctcaccatcgccacttcctccaacgccggcgcctctcttccttggctggcgcccatcctctcctcctcgaccagcgcctcaactacagatcccctctccagtctcattttcactcgtcccagcctcactcctgcggcggcggcggcgctgtcgattcaccggcggcggcactgcgacggccaacgagatcggattgtctagggtttggattttgggggctatggctccgtctgagtgcccgccgcggcaaggcacaaatcccatcctttatttccattgcattcttactatggcttcctagcatcgctagggcatgnacatgcatggnatacccatacgatggaggggcagtgggggcggtggcggctcgccgcagcagcagccgcctcctcctcgggggaccagatcgcggcggcgtgggcggtggtgcgggcgcgggcggtggcgccggtgctgcagttcgcggtgtgggcgtgcatggcgatgtcggtgatgctggtgctagaggtggcctacatgagcctcgtcagcctcgtcgccgtcaagctgctgcggcgggtgccggagcggaggtacaagtgggagcccattaccactgggagcggcggcgtcggcggcggcgatggcgaagacgaggaggcggcgacgggcgggcgggaggcggcggcgttcccgatggtgctcgtgcagatccccatgtacaatgagaaggaggtgtacaagctctctattggagctgcatgtgctctcacgtggcctccggaccgtattataatccaagtcttggatgattccactgatccggccattaaggatctagtggagcttgagtgcaaggattgggcgagaaaagaaattaacataaagtatgaaatcagagataacaggaagggatacaaagcaggagccttgaagaagggcatggaacatatctatacccaacagtgcgattttgttgccattttcgatgcagatttccaacctgaatctgatttccttctaaaaacaataccatttcttgtgcataacccaaagattggtctggttcagacacgttgggagtttgtgaactatgatgtttgccttatgacaaggatacaaaagatgtcactggactatcatttcaaagtagagcaggaatcaggctcatctatgcactcattctttgggttcaacggtactgctggtgtgtggcgggtatcagctattaacgaagcaggaggttggaaggatcgcacaactgtggaagacatggacttggctgtacgggcaagcctcaagggatggcaattcctgtatgttggtgatataaggggcgtatctgtatggaaaaaacttcatctactctacagctttttcttcgtaaggagggtcgtcgctcccatcctgaccttcctgttctactgtgttgtgattccgctgtctgtcatggtccctgaagtcagcattcctgtctgggggatggtctacattcccactgccattaccatcatgaacgccatcagaaatcctgggtccatccatctgatgcctttttggattctattcgagaatgtcatggccatgcaccggatgcgtgcagctctaaccggcttgctcgagaccatgaatgtcaatcagtgggtggttactgaaaaggttggtgatcatgtgaaggacaagcttgaagtccctcttcttgaaccattgaagccaacagactgcgtcgagaggatttacattcctgagcttatggtcgcgttctacctcctggtatgcgcgtcttacgatttggtgctcggggccaagcactactacctgtacatctacctccaggcatttgctttcattgctctgggattcggtttcgctgggacatctaccccctgttcatag

SEQ ID NO: 39383 - DNA, 959 bp, Oryza sativa
  unsure (1)..(959): unsure at all n locations
  Clone ID: PAT_MRT4530_42929C.1
gaaaataatgatggattgtgaaaatatcttctgtgaaacatgaattaactgcatgctctccaggaaactgatgcatcacagtaacacacagccaccaattcacatgtttccagttcatttttcatcactacactatactgtcctatctacagcaatgcatctctatctttaacaatttgttgctgctatcttggcaggaagccgtactgcgagaccggaacctcgaacgccatcatcttctcccctcgagcaaacccgttgcggtcgtaggacgagatctcggtgatgtccagctccttgcacgccctgatgagctcctccccgaccctcccagctgcctccacggcgccgcagggcgggtcgccgcagatggccttctgcagcgtgctgccgtagaagaggatcttcctgttgtggtcgtcgacgagcatggcgtagagctgcctgttggagcagaacacggacagcctcggcttcgtcgccgtgccattgaacttcttctgcagcctgcggttcctgaccttggggttctccttcctcgcgccgtgcctcgccgtggcctcgatcctcgggtacgagcgccggcgcccgactccgccggcgccgcctgcagaagccggagtgaagaactgcacgccaggcgagctgggagggcggcagcacgccgggcgcggcgagaatggcagcccgggggccgcgcggagcgatgccatggcacgcccacgggtggagaccttggctagctgcttggggtgggcaggcaatccgtcgagcaggtgcggcgcggaatacccggtgggagctgctacagtgcccgagattaggatttaggaatgggatttgtcctcacttntggggccccacctgtcacctgacaggtaatacaaggcttaagcaagggtgtaatcgcaaaattccccctcgagtttattctttccgtatccaaaaaaaaaaaaaaa

SEQ ID NO: 39384 - DNA, 121 bp, Oryza sativa
  Clone ID: PAT_MRT4530_4292C.1
acctctgctggagaaagccgatcatcgtgggaccataccatgctgccacacggacatcagcgtggagggtaccaagggtctacacagacgctagccatgatgggatctaaggggctcactg

SEQ ID NO: 39385 - DNA, 216 bp, Oryza sativa
  Clone ID: PAT_MRT4530_42930C.1
atgggagccagcgctccggcagtttctgctctgctcccccttgacggcagtgcgccaggtgtggcatacgcgggccatgcggcgccaatcgacgaggcatgggaggcgttcgtggacgaggcagaggacgacagcgccggagctgaagaagaagatgtaggtgtcggggggtggcggccggagttgaagaagaagagggccggcaaccggagttga

SEQ ID NO: 39386 - DNA, 420 bp, Oryza sativa
  Clone ID: PAT_MRT4530_42931C.1
atggcgactcccaatctcaacaacaacattgacgatctagagaatcccaacgcagacgacatcctcgatctcgagaaaggtctcaacgctcatgtccatgaaggcacctcgatgagaaaaaataaaaagaagaagaaaaacgacgacgacgatgatgacgacgactccgcagatgcacaatccgccatgggattgatgatgctcttcctttactacgttttctacgtgttttatatgatggccacctgtgaagaatggtggcatgctgctttgggcattggaatcgccacggcattccttcttctgtcattctgctgcttgatgcccaggaacaataaacctgctaattcccagaagaagaagaagacgcctagtactactcaaactgatcttagcacgatactattatctcatccatag

SEQ ID NO: 39387 - DNA, 429 bp, Oryza sativa
  Clone ID: PAT_MRT4530_42932C.1
atggaggggccccctagattttgggggccttgggcggccgcacggcctgagccccctccccccaagggccggccctgtggccccgtgacgcaagaggcatggttgacggtgacgggcgccggcactcctcctgctccctcacacgacaaggacgacggcaccgcgttggctcggccacatcggcattgtgctttcccttgtgagggcgctgcagcgtcagcgtgcagcgaggggggcgaggatggcaacggcgccgtggcgcaggaggtgtggttgacggtgacgggcgccggcactctcccactcccccacccaatgaggacaacatcgccgtggggtgcccctacgtcggctcaaccccgtcggcaccacgcttccccttgcggctccgttggccctggaggcagaagggaggaggcggcatggtga

SEQ ID NO: 39388 - DNA, 245 bp, Oryza sativa
  Clone ID: PAT_MRT4530_42933C.1
gttgccactttgtatggcaatgttcgttcggtccaaatatttggacatggatcgagaggctattcgtttaaaaaaaaaaaaaaagaaaaaaaaaaacacaaaaaaaaaaaaaaaggaaaaacaaatacataaaagaaagcggaattcaattcgcgggctctccgcttcataaccttttctttggacgcccgtgggttttctttcgctggccctcttttttcctcgcccgcgctggtctttcctct

SEQ ID NO: 39389 - DNA, 823 bp, Oryza sativa
  Clone ID: PAT_MRT4530_42934C.1
cgtcattgtgtttggatctcctatggcatttcttctgcgtttagctactgatgtcaatttcggggttggttttataacaagtggtatcaaagcatgcgggagatccatggtagaggtacgagtgaggtgctggttgatggcggcggaagcgattggtgaaccaatctgtgggtcggacacttcgggcgggtggctcgaactttccggtgagctactctcaacagggagacatgtggccacacgctcggggttgattgaagctggaggcaatcgacgttctcggtcggtggaatcgaacactccgggagggctggcccgggtctttcgatgagttgtgttcgacagggagacggctagacgtaacgctcgggtcattcggcgactggaaagacgacatgcgatttgtcggcttccgcttgcaactagattgacggtggtcaatcggaggtcagagcggatttattggtgacgaaatccggacagcaggaacacggcatggtgtggttgttgtgtaggtgctgacagtattcggcgcgaattcagtctacggatgcgggaaagcatggatgttagatttattagctcggttcataagacgacaaggaagaaagggttctcttcaagtctgctaggaaggaattcaatttcgcttggcaagacaactgtggtgatacgagagaaggtggagcactgttgcaggtggagtcaaaaggaagaaatcgcaaggatagtgaagtctcttgtttacggtgagcctggtagaggcttgtcggggtagaaatgcgtgagtggcgaaaaaggatcgactcaagtccgggtacac

SEQ ID NO: 39390 - DNA, 310 bp, Oryza sativa
  unsure (1)..(310): unsure at all n locations
  Clone ID: PAT_MRT4530_42935C.1
gccggccgcccgccgaacaccgcctttggcccgcgcccgcaccggatgtatccggcccgcggtaatgcaagtaagtaaggtnagttagctgccgaagaaaagattggacagatggcacaacgtgtctgataattgttgggatgatgctcgcgtccatgtacctntttgtgtaattgtgcgagtggattggatcaccctggtgaccctgaattaaatggtgttgattgggattattggcggtttatatctaaacgaacnaattaataccatacggtctnttcgtgattgccaaaaaaaaaaaaaaaaaaaa

SEQ ID NO: 39391 - DNA, 1031 bp, Oryza sativa
  unsure (1)..(1031): unsure at all n locations
  Clone ID: PAT_MRT4530_42936C.1
gtcgcgtggcggttagctagtggagttaccaacccaacccgtgtccccttgtcggatccgggcgcgcgacctcgtcgccggccggccggatcgccgccgccgccgccgtagagatggacccggaagcggtgcggaggagcctcgagcccaccgccttgtccaaggaggtcgtcggccccgcctccgcgagcctgcgctacgacgccttcgccctcaccggcgtccgcatcgacgcggccgagcacggccgcctcctctgctccttcgtcgtcaccccgcgcatcgccagcccggcggggtacctcctcagcggcgtcacggcgacgctcgccgaccagctcgggtcgggcgtgttcctctccagcgggatcgggacgagcggtgtctcgctcgagctcaacctctcctacgtcgacgtggccagcatcggggaagaaatagaggttgagggaaagctgttgcgcgctggaaaatcagtcggtgttgtctctgttgatttcaggaagaaaaagacaggcaaattgatagcgcaggcccgccataccaagtacctcgctgtatctagcaaactatgaggttttcctagataccaaaatgatcatgtcaaactctttactatctagaccttgtcatacgctgtcagtgctgtatattgttctaaaataggatcgtgtccatctcaaacgcatagattgatggcggttctgttatttatattgcttaggtcaattcctattgggaatgaagggatttcacagaaaatgggggtaaatcctcctaaattcatacccaactcgtcgggcgggcagcccggccctctggcggtgcgcgactgggttcgttcggtagtcgtgttctcgtctctgtctgcctttggggctcttttgtcgtggccgctcctgtggtcttccctccgccaggggcgcgccccctggtcgcgcgcccccggcgggtgcctgggtgtggtgtcgtggggtgcccctccctgcctatcctggatgcnctaaaaaaaaaaaaaaaaaaaaaaaaaa

SEQ ID NO: 39392 - DNA, 439 bp, Oryza sativa
  Clone ID: PAT_MRT4530_42937C.1
agtcgccatgcggttacaataggtctgacctccgattgaccaccgtcaatctagttgcaagcggaagccgacaaatcgcatgtcgtctttccagtcgccgaatgacccgagcgttacgtctagccgtctccctgtcgaacacaactcatcgaaagacccgggccagccctcccggagtgttcgattccaccgaccgagaacgtcgattgcctccagcttcaatcaaccccgagcgtgtggccacatgtctccctgttgagagtagctcaccggaaagttcgagccacccgcccgaagtgtccgacccacagattggttcaccaatcgcttccgccgccatcaacccgagcaccacatctggtcgtctccttgttgaaagcaaccatcaaactgttcagactgccgtctgaagtatccgattccatcgatcaaattccgt

SEQ ID NO: 39393 - DNA, 874 bp, Oryza sativa
  Clone ID: PAT_MRT4530_42938C.1
aggggggggggggttaggtgtggtgaacctaaaaatccaaaatgctgccctgctcatgaaacatcttgttaaaatctatactgcagctgacatctcctgggtcaatcttatgacaaattcttacctgacagctaaagtccctcatcttctaaacaaaggatctttttgcaaagatgattcagtccaggctatgtgtgccagacctttggaggattctttcatgctgcctctctcttatcaagcttattgtgaatacatcaatctccaagaggaactgatacatcttcaactggaacaaggaaggggagatctatggtgcttcttctggaataacaactgttttacccgcaaaagattttataagctcaattttgctgctattcaagcacccagacctctcatctggatttggaagaccaagtacgtaatgaaaataaaagtctttgcttggctattcttctaggacagattgaatacaagaaatatgttggatagaagacactgtgccaaacaagatgatgatctatcatgtgttctgtgcagcaacaaccacagggaaactagggatcatctcttttttaattgtccatttagcaaagcttgttggcagtttttggaaatctcatggaatgataatctacaattttaccaaagaatagcttttgcaagatggcagtccaaccagcctgattttctggaaattttcttcgtggctgcatgacatatctagaaacagcgtaatggatttatcttcagaaatattcagccttcctttaattcttggaaagctctcttcacaaatgagattcttctgcatctttgcagaatgaaagatccactgaagcaatctgtttctaattggttataaacttta

SEQ ID NO: 39394 - DNA, 2498 bp, Oryza sativa
  Clone ID: PAT_MRT4530_42939C.1
tttttgcataaaacgagggaatatcccctcgagggatgaaatcactttcccaagtcggtctgaatgatacaatcacatgcatgtttagtttacaatctagtgctactaagattacattacacgtagaaaacctgcccaacattgagcatgctctcatgaggcacattgaagatggcactgttctccctgcagatcttcctcaggaaagcatacatgtagttgatgacaatcttcttgacgaaccctgaatccctgcgagctctgatcaccgtgttcccgaggatgtgcaccaccccggcgtccctgcacgcgttcaggaacgcgatctcgtcgccgacgctctggaacgccatctgccccgacgccggcatcacctggctgctgcccgtgtcgtcggacctggagttcaccggcacaatggagtcatgggtcgacgtgcagctcatcacctccatgacattgttggtgccggtggtggtcacgccgccattgctgatccctgggttatttgggaggctcatcatcagggtgctgtactcgtcggagtcgctgtactcctccatcatgctctccagcctcacgaacagaatcaggctatcgaacaacatcttctcgaagtcgtcatccttcttgtggatgtccttgtacccgtaccgcgccacgcaccggaacatgtggaagttcttggggccgatccgcttcaccaggaacctctcatccggtggcacggtgtacaccgggaggtacttgacgcagacgaacaccagcgtcgagtggatcgccgggaggttggtgatgaagtgcgagaagatgtgaggaacaccgctggcgagctcggtgtagaccaggccaatgccggggaccctgacaaggccaaggctcggaccaagccccaggatccaggccatggacaccttgctgtgcatctcaaactcgtaccgcttcagggtgccgtagtgccagacatacatgatgatcatgaagcctgccgcgaaaaccagcggaacccatcctccctgatcgatcttgcgcacgacggccgagaagtaggggatctccacaagcaatgacagcacggtgaaggcgacgaccagggtccaatggcttcgccacaccagcagcatgatggggatcatcagaaatgttgtcacaagcataaccatgatcacagcagtaccatatgcatttgcaatctgggattggtttttgaaccctgcagtgacagctatgcagaaaaccatgaggatccagttaatatcagggctgtatatctggccgagatacttcttggaagtatggatgatcttcactcggggaaagcaccctagggcaagtgcttgcttgataatcgaatatgttgcagatatagtggcctgactagcaactattgcagctgctgttgcaacggcaaatgctggccaaagtataggagctggaagggagatatagaaggcatggctgacttggtttgtgtttgcagctataaacgcagcctgaccagtatattgcagaagaaggcatgggaacacaaccacagtgaaagcaatctgaatagcttgtacaggaaaatacgaaaggtcagcaaacaatgcttctgtgcctgttatgctgagcataattccacctaaagaagtccaactagtcttccctcgtttaaagtaacgatatacatagacaggattgaaagccttaagaactgaatggtcatatttgcaaatgtttacagcaccaagaatcccaatgagtatgaaccaaacaaatactattggtgcaaagagccagctgactttatcagtaccatagtgctgcatgctgaacagtccaatcaatatcagcacggagataattacaaccacatcatttctcattctgccttcttcaacttgtattccaccagtcgcagaaagaactgatatggcaggagtgagtattccatctccaacagccatacaagttccaaatagtacaagaataagaattaaattctttctgaattggtgcccctctaaccatctttggattttggcagcaagagacttttcttcatatgtgcggcgactgtatgttgttagatcttgatcggttctatgttgatttggaataatatttatctttgcatgacggcaaagcagtgaataaagggcaaatgttcctccttggccattgtcatttgctctcaagacaatgaaaacatatttaacaagtggaatgagtgtaagggagtaaattataagagagagtgctccaataacttgttctgtatcttctattccatgaggaaagatattgtagaaaacatatagaggtgatgtgcctaagtctccaaataccacaccaaggctttggaaagctagccgtagcagtaaaattgttggataggtcttttctctgtacatattcctgagtcttccagcctctgcatccatgggttgatcaagattcctttccagctcccacattgcccccttacgggaatactcatttgttctggtctccat

SEQ ID NO: 39395 - DNA, 855 bp, Oryza sativa
  Clone ID: PAT_MRT4530_4293C.1
atggcggcacttagttataaacccagtgaagccaagtcattcttcagaatctggggaggaggcacagaggaatcgaatcaaacatcactgcaaggccagaaaggctcaggtcagaagaacaccactaatacagattccaaaccgcctggtccagcactaactaatgcaaatggagaacagaagggaatttcaaacttgaatgtcaccttgcagagctctcttgctttgtatgatgacatatgtagaaaagagaacctcaaaattaaacaagccatcttgggggaccttgcatttattgagttgtgtcttcagaatcacttgaaagctttgtctattgccaagttgctacagcagctgccagaatgttccaggatgtatgttttcctcagccatgtatacgcagctgaagcactttgtgcactgaatagaccaaaggaggctgctgagcaattaactgtttatttgagagatggcgatgatattgagttgccttacagcattgagaactgcgagaaagcccttgttgagaaagacagcgatggtgaagattcagttgctccggtagtcacaaaattgtcctcaggagaatctcagtattcagaaagcctcaagcctgaggaagctcagggtgttctttatattgacctaggcatgacagctgcagtgcagggagagcttgagcaggctaactatatggtaagccgtggcgttgccttgttgcccaacaaccccagggcagtgctagcatcagtttatgtggaccttcttcaagggaaggcacaagaagcaatcgccaagttgagacgatgtagaactgtgagatttaggaggcatagtgtagcagtcagcagttaa

SEQ ID NO: 39396 - DNA, 3482 bp, Oryza sativa
  Clone ID: PAT_MRT4530_42940C.1
atgacgacgccacgacggcgcgctgacccatcgcccccgcctgctcgccgcctcctccaccgcctcggctccgcggcctccggtctgcagacgctggcgtacagctcgaagaaggaaggcggcggcggcgacatgggcccacgcaacggcggttcctcttctaatagaagaccaggatttgttgattcttcttcatggagatattttgactcgagggttgttggtattactagaggggatatacctcgccatgcctggactgtcctacacatgctaaaacgaaaagtgattcctgcccgtgtttcattcaaggaagaccctgccaggattttgcgtggcttgagaattgctgctcgccttggttttgagttctccagtgaaacttctgctgcaatacgggaactttctttgtccataacagatattgacaaggtgcttgtatctagcagagagagggagagagtgttgagaatatttgagggccttgatactgacttaacttcatatgaagggacaagagggatgcaggaaattgattataagttactgaaggcacgaggcgacacgcgacacgcgagacggaagaggaggggggaggggaacacacgccacactcctctcgcccgcatcgcactcgcaccgcacgcgtcgaaggatcgggaaggcgcagccccgcgtcggatcgagagctagggttatgggcggcggggacggggaagaggcagccgccgcggcggcggccgcgacgctgcacatccggtgcaccaacggctccaagctcgcggtgcgggccgacctggggctcagcgtcggggcgttcaaggcgatcgtcgccgagagctgcgacgtgccggcgccgcagcagcggctgatctacaagggccggatcttgaaggacgagcaaaccctagccagctacggtgttgagacggatcacaccattcacatggtccgtggtgctgcaccaccaccagcatcaaccgcacctcctgcagccaacaatgtaactcctgccattaatgctaccactgctaccaattcaccagcagctggttttggagatgtgttgcctggtctcggaggttcaggttgtgctagcagtagtggtcatggatcatatgggtgaggagttacaacgtgtatccactgagtataatcagctccagatggaggctagtgaagatgagaattcttgcagaagccgtccttcactgtccacattattttccatagtcggcgccgttgctccttcctccctccgcggcagcaacatccatcacctctcctccaccaacgcccctccctccctccgcacggctgccaccggcgcctcgctcacaccacgcggcagcgggcaccgctgcttctacgtgcaccagcaccaacgatgcccctccctccctccctccgcgcggcagcagccggcgccggcagccgcttctccttcgcgtgctagcgccgacgcccctccctccctccacatggccgcacccggcgtcgctgctccaccgcgcgccggtgcggccctccctctgcgctgccacagccagcgccgctgctcctccgcgcaccacgatgccgccccttcctccgcgcgcccaggccgaccgccgtccctccctttgctcgccgacaccgctcctcctcttcctcccttcacgaatcacgccccggccagccacgccaccgccgcggcggcggccgcgacgctgcacatccggtgcaccaacggctccaagctcgcggtgcgggccgacctggggctcagcgtcggggcgttcaaggcgatcgtcgccgagagctgcgacgtgccggcgccgcagcagcggctgatctacaagggccggatcttgaaggacgagcaaaccctagccagctacggtgttgagacggatcacaccattcacatggtccgtggtgctgcaccaccaccagcgtcaaccgcacctcctgcagccaacaatgtaactcctgccattaatgctaccactgcttccaattcaccagcagttggttttggaggtttgttgcatggtcttgggggttcaggttctgctaacagtggagggttgggctcatttggttctggccttccagaactatcccagatgcaacaacagctatccgagaaccctacgttgatgagagaaataatgaatatgccactcatgcagaatatattgaatagccctgatctaattcgcaatataattatgaacaacccccaaatgcgtgaaattgttgatcgtaatccagatcttgctcatgtcctcaatgatccaagcattctccgccagactgttgaagcagctaggaatcctgaacttatgcgagagatgatgcggaacacagacagagccatgagcaacattgaatcttctccagaagggttcaatatgctccgccgcatgtatgaaactgttcaagagccatttctgaatgcaacaacgatggctggggagggtgatagaagttcaaacccattttctgctctcctaggaaatcatggatcaaaccaagccagagatccagctgcaaattcaccaacgaccacctcagaatccacaacaggttctcctgctccaaacactaatccacttccaaatccctggagcacaactgctggagctgcacagggagcaacaaggccctctccagttaccaatgcaaggagtgccacagctggtggcctaggagggttaagttctacagatttgggaggtatgctgggtggtggctcggatacttccttcttgagtcaggtgttgcaaaatcctacaatgatgcaaatgatgcagaacattatgtcaaatcctcagtccatgaatcagtttcttaatatcaacccaaagaatttgttcgccagttgacatctcctgaaactttgcagcaattaatctcattccagcgctggtcaggcaatactaacctcaacaatctgatgagcatgttcagtgggctcggtgctggtggtggcctaggtgttcctagtgcacccaatgttccaccggaagatctatatgcagctcaactagctcagctccaagaaatgggtttctttgacacacaggagaacattcgagctttgattgctacagcgggaaatgttcatgctgcggtggagcgacttcttgggaatattggctgatagactgttgtgatcgaagatgtcctcgactgttacctgtagctcagattgtaagattgtctggttcattggttttataccgtcagattcaaaggcatcatctaggtacatggtttagatgaataaatgagtcaagtgggttaacctttccatacatggttgtcatgtcgtgatcaagatattggtgtattgatggtactttgggttggtgtatatacatattgagctattggtggttactgcagtgtacatgaccgttgtttatgtttacatacctgctctcgtcatctatattaatttagaatactttaatggcatgacttatgagagtact

SEQ ID NO: 39397 - DNA, 627 bp, Oryza sativa
  Clone ID: PAT_MRT4530_42941C.1
ttggtggcctaggagggttaagttctacagatttgggaggtatgctgggtggtggctcggatacttccttcttgagtcaggtgttgcaaaatcctacaatgatgcaaatgatgcagaacattatgtcaaatcctcagtccatgaatcagctgcttaatatcaacccaaatgtacgtaatatgatggaatctaacactcagttgagggagatgttccagaacccagaatttgttcgccagatgacatctcctgaaactttgcagcaattaatctcattccagcagtccttgatgtcacaacttggtcaacaacaagctggcccagagcgaacccaatcaggtgctggtgcaggcaatactaacctcaacaatctgatgagcatgttcagtgggctcggtgctggtggtggcctaggtgttcctagtgcacccaatgttccaccagaagagctatatgcaacacaactagctcatttccaagaaatgtgtttttttgacacacaggagaacattcgagctttgattgctacatgcggtaattgtcatgctgcggtggagcgacttcttgggaaattggctgatagactggtgtgatcgagatgttctcgacttgttatctgtagtttat

SEQ ID NO: 39398 - DNA, 2029 bp, Oryza sativa
  Clone ID: PAT_MRT4530_42942C.1
atgacgacgccacgacggcgcgctgacccatcgcccccgcctgctcgccgcctcctccaccgcctcggctccgcggcctccggtctgcagacgctggcgtacagctcgaagaaggaaggcggcggcggcgacatgggcccacgcaacggcggttcctcttctaatagaagaccaggatttgttgattcttcttcatggagatattttgactcgagggttgttggtattactagaggggatatacctcgccatgcctggactgtcctacacatgctaaaacgaaaagtgattcctgcccgtgtttcattcaaggaagaccctgccaggattttgcgtggcttgagaattgctgctcgccttggttttgagttctccagtgaaacttctgctgcaatacgggaactttctttgtccataacagatattgacaaggcgcttgtatctagcagagagagggagagagtgttgagaatatttgagggccttgatactgacttaacttcatatgaagggacaagagggatgcaggaaattgattataagttactgaaggatgggcaccctggtgaggtccggtttgttcttgggcaagtaatcatggacactatgagcgaggagttaccacgtgtatccactgagtatgatcagctcaatatggaggctagtgaagatgatcttgctgacggaagccgtccttcactgtccacattattttccatagtcggcgccgttgctccttcctccctccgcggagcaacatccatcacctctcctccaccagtcggcgccgacgtcgtccctccctccctcgctcccacggcagcagcagccgacgcttctcctccacgcgcccgtgcagacgcccctccctccctccgcacggttgccaccggcgcctcgctcacaccacgcggcagcgggcaccgctgcttctacgtgcaccagcaccaacgatgcccctccctccctccctccgcgcggcagcagccggcgccggcagccgcttctccttcgcgtgctagcgccgacgcccctccctccctccacatggccgcacccggcgtcgctgctccaccgcgcgccggtgcggccctccctctgcgctgccacagccagcgccgctgctcctccgcgcaccacgatgccgccccttcctccgcgcgcccaggccgaccgccgtccctccctttgctcgccgacaccgctcctcctcttcctcccttcacgaatcacgccccggccagccacgccaccgccgcggcggcggccgcgacgctgcacatccggtgcaccaacggctccaagctcgcggtgcgggccgacctggggctcagcgtcggggcgttcaaggcgatcgtcgccgagagctgcgacgtgccggcgccgcagcagcggctgatctacaagggccggatcttgaaggacgagcaaaccctagccagctacggtgttgagacggatcacaccattcacatggtccgtggtgctgcaccaccaccagcgtcaaccgcacctcctgcagccaacaatgtaactcctgccattaatgctaccactgcttccaattcaccagcagttggttttggaggtttgttgcatggtcttgggggttcaggttctgctaacagtggagggttgggctcatttggttctggccttccagaactatcccagatgcaacaacagctatccgagaaccctacgttgatgagagaaataatgaatatgccactcatgcagaatatattgaatagccctgatctaattcgcaatataattatgaacaacccccaaatgcgtgaaattgttgatcgtaatccagatcttgctcatgtcctcaatgatccaagcattctccgccagactgttgaagcagctaggaatcctgaacttatgcgagagatgatgcggaacacagacagagccatgagcaacattgaatcttctccagaagggttcaatatgctccgccgcatgtatgaaactgttcaagagccatttctgaatgcaccaacgatggctggggagg

SEQ ID NO: 39399 - DNA, 210 bp, Oryza sativa
  Clone ID: PAT_MRT4530_42943C.1
tacctcatccatcgttaatgatttctcttttgtgggaaatcttatcctaccactttttcttgtcttaagtacttacaggagtctgtgcctattagtcactaactgattcgttccgccctctctacctaccaagtgtactctcaccagccgtgaccgctactctatatacacaataaatgggcctaatcactcagacacatacattgctta

SEQ ID NO: 39400 - DNA, 843 bp, Oryza sativa
  unsure (1)..(843): unsure at all n locations
  Clone ID: PAT_MRT4530_42944C.1
atggctatgaagacattatcgatcaaactcttgattgataccaaggctcagaaagtctgctttgccgaggccggtaatgatgtcgtagagttcctcgccagtctcctttgcctaccaatgagcaccatcatcaacttgctgaccaaggagcgtatggttggcagtatggggaacgtgcttgacagtatggagaagctggaagacaagcatgtaaccacaaaccagagtaagcaacgctacctgagcccgacggctgcccccaacgcactctgcccattgcagcagctgctggatacagagttaaatgccaataccagcttcttcacatgtgaagggaaattgaacagctacagtaccactaaagttccttgtggatatttttctgttagcaaaggcgctgtatgccctgtctgctccactcaaatgcacagggcaattccacatgtcaaaaccgttggatttgtggttgggacagccacatacactgtcagggatgatctctcaatgactccagcgtccagtgtgtcaagcgtcagcttacttgcacagtgtggtgtcaaggacttgagcgcgctgcaggaacggaccgtgaagattggcaaggaagaggtactggagatactccttgcttccctgaagtctaagactgtgctgactgatgtgtttctcccgaagagaaaagttagctgcaagagggaagcctctggttanttatgatgcattgatgcatgancaattttaccaagcatcccaaatttaaaatttacaacancttgttttttaanccnaacagtaaaatttcanttaggtctttattgttgaaatntcnctttgcatttcctt

SEQ ID NO: 39401 - DNA, 762 bp, Oryza sativa
  Clone ID: PAT_MRT4530_42945C.1
gtcactttcctcttgtcagcgtgcgcgcggctgaggagcttggtgcatgggagagagatccatggctacgcggtgagaaatctcgctgctcttgatttgcccttgctgaatgctttggtcagcatgtacgggagatgcggccggctggtgaatgcgagaatggtgttcgacagcatagggagtatgaagagcgtggtttcttggacttgcatgatcaatgcttgctgcgagaatggaaagccagcagaggcactgcaagtgttcgagcaaatgaggcttgctggggtcaaggttgacgaggtaacccttcttgcagtcatctcagcgtgcacaatgttggactgcaggtcagagctgggggagtgggtggaggagtatgcccatgaaaatgggttcttggagaatacccgtgtcgccaacgcactcatacatatgcatggtaagatggggagggtaaggagatcatgtgagatatttgactcgatcactgtaaggacagtggtctcatggacagccataattcatgccctcgccgtgcacgggcatggggtggctgcgcttgtccagttttcgcagatgctcagacaaggtttccagcctgatgaacttgtattcttgagcgtgatcaatgcctgcagtcactcggggctcgtcaatgaagcgcgccaattgctcaagtctatggttgaagagcgtcacatcacaccttggatggagcactatgggagcatggtggacccgctgtgcaaatctggtatgctg

SEQ ID NO: 39402 - DNA, 790 bp, Oryza sativa
  Clone ID: PAT_MRT4530_42946C.1
atgtcttccgccaatcctccaagtgcttcggcgattgagttccccgagcacctggccgaagcccttgtggaaaaaaggcaattccctctaggcaaatatctgttgggagctttatatcagactctaagcttagcatcggccaagattgccgtagattccgtcattggcattggcgatgatgaaggaaacaagatcgcaactcgccaatgtcaatccttcggagaagcggcatccacttatgctgggtcagaattatcggatgtactcttctcagattggctcaaccacttctatgatggattcccgagggattctagaatttggtttggctatcagcactctgaagacttcaaactcccagcggatttcagcacccgctccgaggactatggatccccattgcactcccggcacaacacaccacctcgagccggcagtgaggagaatcctggcgctcccgggatcacaatgggttatattacatataggttagcggccggccacagcggcggcctggcgcagcgcggcacgccggggaggagagaccggggcgccggtggggaaaaggaggccgggcggcgcggcagcacggaggccggcgggtgtgaggaggccacggccggcgtcggcagcctggcgggtactcttggggaggcggggaaaaagaggtggcggcaccaggaggagatcggggcgccgatggctcggccggcggtgcatctacttggccggctctgcatgggtggcgaacacgctgtaccatcgtgggaccgtgaccgcgtgggttctg

SEQ ID NO: 39403 - DNA, 2612 bp, Oryza sativa
  Clone ID: PAT_MRT4530_42947C.1
aaaaagaaaatcgtatatgatgcttttaaggacagtacatcaattatagtagttgctcccaggctccaaactccagaatgccagcaaaagccaaaagcaaaactaaaccaccggtaacaccgatgttagcctattccagctcgcgagggacgaagaccgttgacagcatcttgtaatgccgccgccatggactccagagtagcaacgtcatcaggcttcaaaaatgatttccactacaacagtaagccaatcaaacgaaaaaagaataattagacaacccaaattttcaactttggaaggaactaaacacagccataggagtagaatgcatatgcccttgagaagggggagatgtggtgaagttcacagttacagctataccaaatcaccagacatacaataccagctcttcccaaataaataagacaataccagctctccccaaataaataaattataaagaaaaagaaaatactagcagccagccagcaccttgcatatgctggtgttattttactactactcaaatcgtatgcagtatgatatgattgatagagcaagaaagggaggatgatggatggatgatcatagcctggagagcttgagctgctgcttgagcagagggcggaggtgctcctggtaaccgtccggcacatccgtgtcgttgagggggtccttccacgcctcctcgtacagcgccgggtaaacattgccgtcgtagcgccccagcaccgaccccaggtagtggtcggtgtagttgaacgcgtccaccagcgccaccgcgttcggccgcacctgcgcatacagctttcccagctgctcgtttgccagcgctccctgccttgctgtgatgctccccgtcgacaggaagtcacccagatgcttgtgaacaagatacagcgcgtacacattgcaaaggatgcacagttgctccttcactccctcaccagggatgtcctgctctaatttctctatgaacttggttacaattatcaactggatatgggccaccgccacctcaagcagatcaggggatagctcataaaacccttcttcttggcttggcgccttgtttatgttctgggcacaattcaccgccatcctgagagcccgagcttcaaatacctctcgtatggcagcaggatttagccaatcttcagctgtatttacaccacatttgcattgcatcaagtactgtatgttgcccatgtaagccgttgtaccaacaggctgttttccagaagctaactgggatacagtcttcattagaaaccttgcaacctgcaatagcaaaacaacattgtctccttcataagtgcaagcaggaacatagatagcaaacaattcaggaagcccgctgctgttcaggtaaccatgtccaccacagagttttcggcattcttcaattccatcagctgtcgcagatgttgtcacagccttcaacccagcagtacaggcatgggcctcttgaagtgttgagaaatccttggcttccagtttatgtgtgacatccgtgtacagccacttcagccactcacccacaaacctaaatgcataagctgaagccagcaaaggaaagagtctgctttgctgagtcttgtaattgaggacctgagtctcagggccaccagtttgagggccaaactgctttcgaatagcgctgtatcttacagcaatgcaagtagcacgtgataaagccttagaagcatctgcaacaattgtttgacgaacaaaaaccattgtcccataaagcagctgttttgggacatctgagtgcacatattttccctctttcgtaacttgtgaaagcctcatcaacatttgatcccttgggatgcgcacatggtcaaatcgcagaactccattatccatactgttgtatgcaccactaccaaattttccgccgatatcaccaagagtaacaccgggaaggggagagtggtcctctaggcttcgtagttgcacaatgaaaccatgtatgccgtagtcctttccttcagttatcagacgagcatacacaactgcatgagtggaagcttttcccaagccaccaggccaccacttgctagaggtcagtgtcgggctgtgtataacaaactcatcagtctttgggtcaaatgtggcggttgtttcaaggccctgaacattggaaccatgaccaagttcagtctgagcatagcatccaattatttggaacctgtaggccagaggtagccacttcttctgctgctcttcagtcccttggccttttatagcaggaacaaacatgccccagtgcagatcaacataaccaggctggtccacgtatagccttagcaaatttgcctcctcttctgtaagacggagctcgacgatacgcttccacgcatgggctgcctttctgagtgtgtccttgaacagctccttcctggggagcatagtcctgttatccttgcggaacacggggtcggaagcgacgaggcgcgccatgcggtcggcgacatcgacggcgtggcgggagccagcccaggcaaccttcatgtgttcaacgtcgaactgcgcggtggccctctcgccggcgaggtggtccacctccccccctacgccgccctccatctttccttcctttcttg

SEQ ID NO: 39404 - DNA, 558 bp, Oryza sativa
  Clone ID: PAT_MRT4530_42948C.1
accatgtgaagaccaagattgtcaggattctttcagacaagtttctacttcggctacactcttatggttctgcctaggtttaggaacactctgcggtgctgtcgggtatcttggatcgacactgtttgtgagaaggatctacaggaacataaagtgtgactaaaaattgaccccggtttagacagatggggcgaaaaactttgtatgtgtggcttgttccgtgaagtgatcagccatgttttggtggccaagaagccagggcagtttatggagtacaaacgttcttcggcgacattgctgggatgccatggtttttgttttcttgtcccttttgttctctttgatccccctctcggtgccacaattttcatgttcaactagccatatatagctgcgatcatagtttagatgttagtatataccagagttgttattcttgagcctcatatctgtgttgcttcacttaaagctgtaagatccatgacatttgttgacctttaatgatgaaaacatctccgaaagacatcattttcagattttatgcttgtgttttcctgc

SEQ ID NO: 39405 - DNA, 1899 bp, Oryza sativa
  Clone ID: PAT_MRT4530_42949C.1
ccgcgctccctccctctcctctcctcgcactcgccgtccctcccaatggcctccgctgccgcccacgcggccaccgccaccgccgccgccgtcctcctcgtcgtcttcctcgccccccttgccgccgcctccgactccgaccacaagtaccaatcggaggagaaggttatgctctgggtgaacaaggttggcccgtacaacaacccacaggaaacttacaactactacagccttccgttttgccatccgtccaataaccccgtgcataaatggggagggcttggggaggttctcggtggaaatgagctgattgacagccagatcgacataaagtttggaagggatgttgacaagggtaccatttgttcaattgaacttgatcctgacaaggccaaacagttatctgatgcgattgagagttcatattggtttgaattcttcattgatgatttgcctctatggggttttgttggagaggcagacagaaatagcgataacaaatatttccttttcactcacaagaacatcgtcatcagatacaatggcaatcagattattcatgttaatcttactcaagaaagtccaaagcttattgatgcgggtaaggcattggatatgacatattctgtcaagtgggaaccaaccaatgtaacatttgctcaccgctttgatgtataccttgactaccctttctttgaacaccagatccattggttctcaatcttcaattctttcatgatggttatctttctcactgggctagtgtcaatgattttgatgcgcactctaagaaatgactatgcaaagtatgcccgcgacgatgatgatcttgaaactctggaaagagatgtcagtgaagaatctggatggaagcttgtccatggggatgttttccggcctcctcgcagtttggctcttctttcagcccttgttggtggtggcacacagttgtctgctcttattctgctagtgattttgttggcaatcatcggaatgctgtatattgggcgaggagctattgtcacaacattcattgtttgttatgcccttacttcattcatctctggatatgtcagtggtgcactttattcacggcatggggggaaaaactggatcaaggcaatgattatgacagcatcactatttccgtttatgtgctttggaattggcctagtgcttaacacaatcgctatattctatcgatcattagctgccataccatttggtactatggtggttgtgttcatcctgtgggccttcatatctttccctcttgctcttttgggaactgttgttggtagaaactggagtggtgccccaaataatccatgcagagtaaagactattcctcgccctatccctgagaagaaatggtacctcacgccttctgtcattgccctcatgggaggactgcttccttttggtagcatcttcattgagatgtactttgtcttcacatcattttggaactacaaggtgtactatgtatatgggttcatgttgctagtctttttgatcctcataattgtcaccatctgtgtaacaatcgttggtacatatttcctgctgaatgcggagaactaccactggcagtggacttcattcttctctgctgcttctactgccgtctatgtttacctctactccgtatattattaccatgtgaagaccaagatgtcaggattctttcagacaagtttctacttcggctacactcttatgttctgcctaggtttaggaacactctgcggtaagctcttctacaccggtagcatgcttaaacccaagaatttgatggtttcaactgataccggttcgaattttggtccaggtgctgtcgggtatcttggatcgacactgtttgtgagaaggatctacaggaacataaagtgtgactaa

SEQ ID NO: 39406 - DNA, 119 bp, Oryza sativa
  Clone ID: PAT_MRT4530_4294C.1
ctgctgctgtagctaccgtatcccgtgtgtgtgtgcgaacctctcacacctgcatcctgtcacacacctgcgcgatactcgcacacacaacctgtcaggcatgtgttctgtgtctacat

SEQ ID NO: 39407 - DNA, 709 bp, Oryza sativa
  Clone ID: PAT_MRT4530_42950C.1
tgcggcggcggcggcgcggcgagccgaagaccacgccagcacgggggcagcacggcaggggcggccgccggctgggcgcaccggcggaggcgggagccgcggcgcagtgccggcagcggccgtcggccgagtgggcacgatttccggcaagacaccggaacagatgagggagacggataaaaaaggaggtattcgctgattgggcctctgggtcggctacgctcaagcagcgagccgtcgtcgcaatcccttcccgtcaagtcagagcgcgagtctcggggcggagcgtttcgtcctccgccgcagcagttccgccgccgtatgttggtgttaacgaccgaatttggtaatttaagtatcggagatggatataaaaccgaagcggaatcgaagatagagaccgttccggaaacagaggaagaatcggctaaagtccgaatcggctgcaactagaatcggtagagttctagtcggacaaggttagccgattgagccgattccgacaatacgattcgtttggcaaaagtctgccgcaaagatttatggtatcttagagtttgttagagataagagtcgtgtccgacaaggacatattttgatcaaattaactggcacgcttacgaacctaaaggcaagatttttggacctacactgaagttaagcagatctttcaggcctcgtgtttttcgcatcaacagttggatacccg

SEQ ID NO: 39408 - DNA, 447 bp, Oryza sativa
  Clone ID: PAT_MRT4530_42951C.1
atggccgggagaggccaatgcaagaaccagatcggggccaagttgttgaggctcggaaaccatcatgtcgctgcggctcggcacgacgacctgttgtctccggatgcggggcacgaaggaacgaggcgttccagaagaaggacggcgaaatctcctcccgacgtcatcgagccggggtcagaaacgaggcaggagttccaggagctcatcgccgattccgtggcggagacgggcgtctccgacttcttccgtttcgtcagcgcgcttgacctcagcagccgccgctgcgcagcgactaggaacctcagtaggttctacgatttctcgacggtgtcattgatcggcggctgggcggcctacagccagatcttccggcttccacggttcaaccccgacaacttcgtcttccaccaatctgttgcgggtggaatcaactgggctgtctga

SEQ ID NO: 39409 - DNA, 627 bp, Oryza sativa
  Clone ID: PAT_MRT4530_42952C.1
cccacgcgtccgttttttttttttttgatcttttcaccctttaacagttgtataattagcttgtatgaacaaacctgtgtaaataatcgaaagctgttctgtataaaaaaaaaaaaaaaaaaaaaaaaaaaaaaaaaaaaaaaaaaaaaaaaaaaaaaaaaaaaaaaaaaaaaaaaaaaaaaaaaaaaaaaaaaaaaaaaaaaaaaaaaaaaaaaaaaaaaaaaagggggggcccgttttaaaggaccaaactttacttccccgggctgggaagggaaaaacttttttttggggcacctaaatttaatttcaggggccgcgttttaaaaacgtggggatgggaaaaaccggggcgtaaccaaattaaatgccttggaaaaaaaccccctttttgccaattgggataatacaaaaagggccccaccaaaccccctttccaaaaattggcccaccctaattggcaattggacccccccttttatgggcccttaaagcggggggggtttgggggttcccccaaggtgaaccgttaaatttgcaaggcccttagcccccgttcttttccttttttaccttccttttttggccagtttggccggtttcccccgaaaagtttaaaaggggggg

SEQ ID NO: 39410 - DNA, 302 bp, Oryza sativa
  Clone ID: PAT_MRT4530_42953C.1
agaggcgggggttgcccaagagatgaaagcaacaaaaaggttcgagatgggacacccccaatggtgtctgatcgtggtgaggacaccccagccggacctagaggcacaaaatgaactggcccaaattacaagtggagaacaagatacatggcacgcaaaagggtacgccaacaatttcctggaaattcaaggcgtgtgaaaaggccactccaatatgcactaccgccaagaagaaccacgaagtcgttctcgtagatgccctcgccctgggtaatataaaccttagggagagaaaattgtgc

SEQ ID NO: 39411 - DNA, 442 bp, Oryza sativa
  Clone ID: PAT_MRT4530_42954C.1
cacacatttcttagttgagtgagaaaaggtaagacttggagtctttttatttttctagccatacataaatcatgcatatgtagagatggtctctgaatcttggttcagcattttcatactgttttttcctctaaagttggtggattttacctagtaaggaaatgaatgctgaagtcccatcgcagtaagaaagtaatgtgatttataaaactttagtgacctggtcagtatccaaatgctactgaaatatatagtgttcttttataaagaaaaagaggcatgcttttgctagtttaacaccttctggtgtcttagatgaagatttcatgttgggctatttctgaaagctgcagaaagtacaaactgcacacttaatacaactgcagtgtgccagtgtgaagagtgaactctgttacaaactcatggatgaatgcgcatttag

SEQ ID NO: 39412 - DNA, 3182 bp, Oryza sativa
  Clone ID: PAT_MRT4530_42955C.1
ccacgcgtccgtggcgccgtgcacgatcgcccccagcccagccatcctcctctcgcccgaggtgagctccgatccgtctttgcctttgccccgatcgtaccccggctgcgatggagggggggagcaacgacttcccgggggacctcctgcgcgcggtcctgcagaggctgccgccgcccgacctcgcgagggcggcgtgcgtctgccggctgtggcgcggggtcgcctccgaccgcgccgtgctggaggccgccttcgcgtcgccctggggggtgcgccgcgtcgtcggcgagccggagacgagggccttctggcgcgccgcgtccctcgcccggttcgcgctctcgcacaccgtccgccgcggggacaccgtccccggcatcgcgctcaagtactccatccagtatcacagaatgctgggagggctcaaggacaagctgacagggaaaaatggaaataagatcaaaggcttggctgtgctgatgagccgaaaattactggatccaagggacttcactgcctcgctcctcgacaacgtccatgaggtctttggaaacagcatcacctgccagcttgtcagcgccactgttgccgaccaaaacaatgagggcagggggatagttggatcagaggcgaatctggagcaggggttgacagatttaccatcggtatcacaaggggagtccaagctcacagtgaggttcaactgggagatggacaagcatggtgtgccaggggccatcatcatcaagaaccaccacagtaccaagttattcctcaagaccatcaccctccatgatgtccctggctgtgacactattgtgtttgttgccaactcctggatctaccctgttggaaagtaccactacaatcgtatcttctttgcaaacaattcttaccttcccagccaaatgccagaagcactgaggccataccgtgaagacgagctgaggtacctcagaggggaggacaggcaagggccgtatcaagagcatgaccgcatctaccggtacgatgtttacaatgacctcggtgaaccagacagggacaacccacgccctgtcctaggtggctcgcagaagcacccctacccgcgtcgtggccgtactggccgaattccgaccaaaaaagacccaaactcggagagcagattatcactgctggaacaaatttacgtgccaagcgatgagcgcttcgcgcacctcaagatgtcagactttgctgggtactcgatcaaggcaattgttcagggcatcttgcctgccattcgcacatatgttgatctcacacctggtgaatttgactcgttcgaggacatcttgaagctctacaggggaggcctgaagcttcccagcatcccagcactagaggagctgcgcaagagcttccctgtccaacttatcaaggacctgcttccggttggaggcagctacctgctcaagttccccaaacctgatatcatcaaagagaacgaggttgcttggaggacagatgaggaatttgcacgagagattcttgctggtctgaatcccatggtcatcaggcgtctcacggaattcccaccaaaaagtactcttgatcctagcaagtacggtgaccagactagcacaatcaccccagctcacattgagaagaacctcgaaggcctcagcgtgcaacaggcactggatagcaacaggctctacattctggatcatcatgatcatttcatgccattcctcattgacattaacagccttgatggtatcttcacctatgccacaaggaccctgttgttcttacgtgatgatgataccctgaagccactagcaattgaactgagcttgccacacatcgagggcaacctaacatctgcaaagagcaaggtccatacacctgcatcaagtggcattgagtcttgggtgtggcagctggccaaggcttatgttgctgttaatgactccggttggcaccagcttatcagccactggctcaacacacatgctgtgatggagcccttcgtgatcgctacaaaccgccagctcagtgtgacacaccctgtgtacaagctcctccagccacactatcgcgacacgatgacaatcaatgcattggcacgccagacactcatcaacggcggtggcattttcgaacaaactgtctttcctggcaaacatgctctggcaatgtcttcagcagtttacaagaactggaacttcacggaacagggccttccggatgatctaataaagagaggcattgccatcaaggacccatcaagcccatccaaggtgaagctactgatcaaggactacccttatgcaacagatggcctggcgatctggcaagcaatcgagcagtgggtcactgagtactgtgccatctactacccaaacgatggtgtcctccagggagatgtggagctgcaagcatggtggaaggaggtgcgggaagtcgggcatggtgatctcaaggacgcggactggtggcccaagatgcagagcttgcctgagctcaccaaggcctgcaccacaatcatctggattgcatcagcactccacgcagccgtcaatttcgggcagtacccatacgcgggctatcttccaaaccgtccgaccataagccggcggccgatgcccgagccgggttccaaggagtacacagagctggacgagaacccagagaagttcttcatccgcaccatcaccagccaattccaaaccattctcggtgtctcgctcattgagattctatcaaagcactcagcggatgagatctatcttgggcagcgtgacacgccagagtggacatcagaccccaaggcactggaagcattcaagaggttcagcaggcagctggtggagattgagagcaaagtgttgaacatgaacaaggaccccctgctcaagaaccgggtcggtccagccaatttcccctacacactgatgttccccaacacgtcagacaataagggggcggctgaggggatcactgccaggggcatccccaatagcatctcaatatgagactgctgcaccctcacgcgctgctgagttggtgtaggttgggggctgttttcgccggccccagggcgcgcgctaggctgctgcccagttccatttgcttcagggcatgctagtacttggtggtggcgcaaataaaaaaaaaaaaaaaaatggggggcctgaccattcccttagact

SEQ ID NO: 39413 - DNA, 224 bp, Oryza sativa
  Clone ID: PAT_MRT4530_42956C.1
ggcacgagcaggtattattaattcctcatataattagggatgctacttaaccctgcttggtgcaatgacttacctataagggggctggtaccggagacaggcttatattcctttaagaagttaccttcaatgggcggctttaaaggattgcaacccaagataaggccctccaggttggggggtttatgtattgccaacccccggaaaatttccctgaaaaccct

SEQ ID NO: 39414 - DNA, 879 bp, Oryza sativa
  Clone ID: PAT_MRT4530_42957C.1
atggcaggaggcggaggcggcgaccgcgcgccgtcgtcgtcgtcgacggcgatgatctcgcgactcctgccgccgggcttccggttccggccgaccgacggggagctcgtcgcccactacctcgcccggaaggcggccgacgccggcttcacctccgccgccatccgcgacgccgacctgtaccgcgccgagccctgggacctcctgccgccgccgcgttgtgatgcggcggcggaggaggaggaggaggaggaggagcggtgcggctacttcttctgcacgaggagcttcaggtggccgtcgggaacgaggacgaacagggccacggcgaccgggtactggaagtcgacggggaaggacaaggcggtgctgcacggcggcggcggcggcggcggccgccccgtgggggtgaagaagacgctcgtgttctacagggggagggcgccgaggggcgagaagacgagctgggtcatgcacgagtaccgcctcctgcacggcggcgccgccgccaccgcctcttcttccccgacgccgacgacagttgtcgcccgcagtgagtgggtgatttgcagggtgttcgtcaggaagacaccagatggtaacaacgataggggaactacagaacatcatcttccctccgacgacgctcatctccgttcgtcgccggcgccggcgaactctgtggacggcgcaggccatgcgagctgcagcttcttctccggtgctaatgagtccatggcgccaagcgaccatttcaacataggagacgacatgatcctccatggccacgacgaggaggagttgctgatgatgaactgttcttcggcttttgatctgccagagcttctcgactacgagagcttctcgctggacctttga

SEQ ID NO: 39415 - DNA, 276 bp, Oryza sativa
  Clone ID: PAT_MRT4530_42958C.1
atggatgtacggaagatctatgcaagagaacggagcttcgagaggggtggaatgaagactaagacagaggaagttgaagcactcggattatcatttgaattacgagagaagactatttcatcgactgtaaaggtgtcaggggctactgtggagattatggataccccatacccatacgacatgtatatccgattaggtgtcaggttgaaggttgtgaaggtgtctgcagtgtcactgctcgcactcttcaaggagaagaagaagcagaggtcttag

SEQ ID NO: 39416 - DNA, 679 bp, Oryza sativa
  Clone ID: PAT_MRT4530_42959C.1
atggaggagaggcaccgccgggcctctgctctgcatatcaagaagtggggaggattggggagggaaaagaggagaggaagagataagcactgcgccaaaccgacagccgccgcctcctcttcgcaccatatgccactgtcgcgccaacagcacagcagtctcctcctcctcatcctcatgccgcgccgccatcactgccgatggtccttgcgccgagccatcgactgcaccctctccacctcgccgttgtgccaccgtgctggtcaaagcttggcggtgtacgatgagggggacttgatggaaaaggatatcagacagctagaagctattgcaaggaatggtgagcccaatgctgctgaagatggattcactcagtcagccaagaagagaaggaaaaagaagaaatcgtctgatccagcggttgcaacaagacaaagcatgagaattataagagatggtgtaccggtggctatgaaggcccagaagaggacatctgaaaagaacgacatatcagttatttggattggtgcgatcttcttttctctctttttcgttgggtttctatctctcttttctgggtagattccttactagatagcgtccctgttttttatcgagaatgctaatctgcgaccagtcgcgtcacgcgcggagaggggggcggtggacggcgcgtgat

SEQ ID NO: 39417 - DNA, 1227 bp, Oryza sativa
  Clone ID: PAT_MRT4530_4295C.1
cccgcctttttttttgttgttcagacttccccattctagcttctacaccatgagtattctccaacactgatatactgtagctacagctagtgctccctcttacaaattcttaaatcataaggtccatgaagtgtaagtgtgtgcttggaaagccccaagttgcctacagctccgcatcgtcactagagccctattcttggggaggtgtccctccgccaaatggggcgaaccgtaccgatccgtccccaagtccgcgcacgtctgatgcccacatccaaaagcaaggttcctcgcttccaaccggcagattggccagggcatgatcgcctatgtcactaccccgcacaggtggaggtaactctttccgctggggaaaaccgctacgagttcgcgtttctttgactgttgagcacccatagtattgttggaaatccctcacaggtggaggtaaccaagaagttggaggtttattgctgccttgaactgttctgggatctccatcaatgctgaaagagcaaattctgcctcctttttgctggcaggaacaggtcttgacatgatctctgtgaagttcacaaactggaagttgtcgaacgcacgagaagggatgttgtcatcgaattgcctcatcatatcccatggcccatcgccaactccaacaagcacaattgacaaagggtagtcactggctttcacaatggcatctatagtctccctttcctgagggctcagctgcccattacctgtgtcaacactgcgtgtaacctgtccatctgcaattataagtaggacatgatactggccaccactactatccacaattccaatagctgtctcaatcatcggtgcaaatgaagtggggccatcaccaaatccatagcatggtatcaggttgtcctcatcaaatcgtgaaagagtttgccctatgatagatatggcttgctcatatgggtttgagatatggcccagagaatgcaggctctggttgttgaaggaaactctgcctgtccattcattggacttggtgaaatcaatcccaacaatcagatttgatgactcaagaccagcgtgtgcaagagcatcagttacctgctctagggtatggtaatcatcgccgaacttggcgaaccgattgttccccttcggcgcggcattgctgctgctgctgtggttgcagcagtgcggctgctgccccgacggattctgcttggagcagaacgcccccat

SEQ ID NO: 39418 - DNA, 1230 bp, Oryza sativa
  Clone ID: PAT_MRT4530_42960C.1
cgaggcccaagtcccaactgctttctcgtcggattcgctgcgggccgcggctgctcgttcctcttcctcgtctcctccgggctccggggaacccatcagctatcgcaggcacgcgggttggggcgactccgctctgcccccggatctccggcccggccggcggcgcgcggtgcggaccagctcgggttgggttgggttgggttggatttgggggcggggcagtgcgagctttgctgctgctgctgctgtgccggcgggatgcggtggtgcggcctgcggctgctcccactggtttgcctgcttgttattgctgcagccgcagaagaggataaaacaaatattctacaagcagacaaaaataatgacaacaacatagcacattcagatggtgggaagacaggacggcatgatgaaacaaatcctaatacagtacatcatgatgaaggaaagaatgaccctgatgggaacaacaagaaggacaaatcaacagaagttattagcacggcaaaatatgcggcagctgtgcatcatgtggataaagatatcaacacagcaaaatcctcgcatgtaacagacttctcacaagatcctcttatcaaggggtgtgacccatctcatacatgtgtaattgaaaataaaaagttcatcgcctgcttgaaagttcctggagaagattcattagctctatcacttctgatggacaacaaaggcatggacccactttatgttggtattacaactccagaatttgtcacttcagctgaagacaccatccatgtccaagcaaatgatcataatgagacacaggtgactatttttaacaacggtgcaccaaacatgacaataattcttagagttgctgaagagacctgcaatattagcattcaccgagcaattgcgagggagataagtcaagtaatgccaatgcggcttacctcaaaatacatgttagtgcctgtttttcttcttattggagctgtggtagcatgcattaaacttcggagaagaggtatccaagatggtggacctgcataccagaagcttgatgcggcggagcttcctctttcgactggagggaagaaagaagcagatcaatctgatcagtgggatgacaactggggagacgagtgggatgatgaggcgccattgacgccaaccagacatatgcccaacctatcatccaaaggtctagcttcaaggagatctaccaaagatggctggaaagactaa

SEQ ID NO: 39419 - DNA, 1560 bp, Oryza sativa
  unsure (1)..(1560): unsure at all n locations
  Clone ID: PAT_MRT4530_42961C.1
cgaccacacaccaaccccacccaacaaacccaaaccaaaccaaccccacagaacaaaaacgctttaagcggaaacaccacgcgtcggcggccgctcaaaaacaagcggatcccccgggctgcaggaatacggcacgagggggaaccaaccaccacaacacaaccacaacgacgacagaacaaccacaccagagcacaccacaacccccaccaccaaaaagacccgacacccacaccaggccgaaacgcccagacacacaacaacacagctaaagccacaaacacacaacacaaacccaaacaacaatccctacaaaggcagaaacacagacccacacgcacccacgccaccccccccccccccacacacacaaccacccacacaacacccaaccccacgcccaccgcaacccacacacacagaaccaacaaaccgccccacaccagcacaccacaaacaccaccacaccgaccccagcccagccacccaacaacacacacaccaacgaagacaaaacaacaaaaccaaaccaccacaacaacgcagccaaagacgacaaagagacacacaaacaccaacacacccaccccgaccccccaaaaaacaacaaaaccacacaaacaacgacacacccacccacaccgccaacaaccaccaccaaccacgagaacaacccccaacgaaaaacaagaaccgaagcaaacaacaaagcacccaccacaccaaacaaccaccgcacacaagaccacacacacgcacacccgcccacgccacgaacaaccagcccaacacacaagaacacaccaacaacacgaaacacccaccccgcgcactcacgaccgcaagacaaacaacacccacaaagaacagcacatagcacgcccccacccggacccacccacacccacgacacacccgccccaccacacaccaaaccaccgcacacgcagaccgacacacacacgcaagaagcaaccccaccccaaatactagaccaaccaaaaacaaaaacaagacaagcaagcacaaaacaacacctcacacacaccaacacacgcagccaccgagcacccacacacaaccaacaanacgcgacacacacacgcaacgacccaacgaccgtatccgccgagatacaacgacacaacgccaagacaacgaacacagcagacacgacgacgccacacacactcaacaaccagcacacgacacgacgcgacaccacagcggcagcagcacggcaccagtaggagcagagcagtccagcacacacacacgcacaacgaacacacaacactagcgatcgcgacacaccanacagacgacacaccaaaccgccacgcngctacaaacgcaacaccgcaacacaccgcacgcacacaccaacaccaacacatgacagcaacgacaccagcaccaagcagcgagagcgagaanacacacacaccgcgcgagcaaagacagacagccagcaacgacccagacagaacagaccgacacgagcgacaaccgcagacgcacacgcacgaccgcncacgcgagcacaccgacgcacaccgn

SEQ ID NO: 39420 - DNA, 322 bp, Oryza sativa
  Clone ID: PAT_MRT4530_42962C.1
ttgggtggcgaggaggatggggcacctgccgtccgccctggtcatcaaggtggtgcacgttcgcgcgcgacctcaccagcggcaggctaagcccagtatgcgaccccgagcctatctccacactgcacgcggtggacaaagacgaagaaaaatcagatgatgacacacattctgagcaaaaccctgacacccgccatggccctgacacatcttcctttacagcattcttgatctgattactgtcatcatttggatatagtaatgggttcatggagataattcctgagcagaatggggaattgggatccccaacttgaacacc

SEQ ID NO: 39421 - DNA, 348 bp, Oryza sativa
  Clone ID: PAT_MRT4530_42963C.1
cccacgcgtccgcgcgactgcgtcccgacgtcgccggcggaacccccagctacatgccgttatcggcgcgctcaacaccggctggtggttgttttagaaagtgcttaattaaacagccaccaaaccaaaacgcggactcttcacaacctgcgccaccgccggtgacacctgcgccgcttgcgccactcgccctgcatgacgccacagctcctacacgtattggacccccaccatggatagtattatctagggccccaagatgagcttcttcagattatactactgaactgatcgctacagtttcaaaaagctaaagactatttaattacgtaaattaccttgataatt

SEQ ID NO: 39422 - DNA, 972 bp, Oryza sativa
  Clone ID: PAT_MRT4530_42964C.1
atgcagaggaagtcgagcggcggcggcggcggcggcagcggcatgtgcgacctgccgatggactgcatcgcgtgcattgcctcgctgacgtcgcccggcgacgcgtgccggctggcggcggcggccgcggcgctccggccggtggccgactcggatgacgtgtgggggagcttcctcccgccggagtgggccggcgacggcgacgccctggacggtaagccggggggccgcgagggggagagcaagaaggagatgttcctccgcctctgcgacttgcctgtccttctcgacggcggcaagctgtactgggcattcagttcactgatatccctgctctcattgcaccagagcttttcgttggagaagcgtagtggtgccaagaaatacatgatgcgagcaagagctctcggttttggatggagcggctatccctacggaggtctcgtctggatacaaaaccatccggattccaggttttctgaggtggccatcctctcccacttgtgttggttggacatctatggtatcttcaacacaaagcatctctcaaacggtacatcctacggagcttatcttgtgtacaatgtccaattcttgcacacagaagatcaaaatggaggctacaaagaacaagatgcaacagcatctgggtcatcatccacctccagcatttgcagtcatgaatgcaaccatcttatgccgcagaaacatctgcgctcactgttgttcaacatggattatgatggatcatcatttgtaaaaaccaacaataaccagaagaaagaactgaaatatgtaggcatttgtgtaagaagtgatggatggatggagcaggaaattagtacagagatatcagtggtaaaacagaacaatgaagagaatggagacatttctattgagtttaggggcttaaccggatcgcaccaatgccaaattattgtagaggggatcgaaattaggccgaagaactaa

SEQ ID NO: 39423 - DNA, 290 bp, Oryza sativa
  unsure (1)..(290): unsure at all n locations
  Clone ID: PAT_MRT4530_42965C.1
ggacnngncagagnacgtntgggctctcctcctcctccacatccancagaaaaantttntttatnagtncttggaggagagatgtccaaaatggcggaggagaaggncctggcggcgccggccaccgtcnacggcgggatgcagtcctccggggacctgcaggcttcntcggcggcggcggcncgtttngggcccgtcaaaacgctcctncanannggccgctggggctctacttcgccgcatngccatnatactccaaaactngntcaacaacgantacggcaacnttt

SEQ ID NO: 39424 - DNA, 4046 bp, Oryza sativa
  Clone ID: PAT_MRT4530_42966C.1
atggcatgcgctccctcttcacacctggtacatatggatgttctggctgtgatatttctagaagaaagaagtgaaaaatcctcactttgttttgagtttggagggagagagagtagaggaaggaaacctccctccggatccaggaaatcctcatccatcctcatgacttccgacgagctcgccggtgagggtgaggtcgacggcgcggagctgatcctgtcgctgccggaggacgtgctcgggctcatctccgcccacctccgcccgcgcgacctcctcgccctctccgccgcctcccgcagcctccgcaacgccgtctccaccgccgacaaggcgtggctcgcccagtgccgccgcctcctccccaccgcctcccacctcctcgcctggcgcaccgccctcgcccactcctccctcgccgtctgccgcttcctccactccgccgccccgctcctcggcctctgggcccaccagaaccccgagctcggcaacctcgtcctcgccctccctggcttcctctccctcgtcgccgtccgctccatcccccaggagctctccccgcgcctcctctgggcccccgtcttcgagctcctcgccgaccaccgcggccaccccgccttcctcttcctccacggcgccgcccacgactccctcttccccggcctcctctcctcctccctccaccccctcgccaacaccctcttcctcgaggcccacacctccacctccacctcccacttctcccgcctcgccttcgccgaccgccgccgcctcctcaacgccctcgtcgccgcctcccgcctcaccctcccccccgatgtcgccactgccccgctcttcgcgcgctccgacgccgacctcccgctgctcgccgcgcgccgggaggccatgctgcgcctgcacagccagtctggcgggggcatggtgcgcagggccgagatcgaggcgctgctgatcggggccaggaagacggcggcgctgccggccgacaccgccggcgacaagatgcggctgcggaggaccttctcggtggtcgccggttttgtcaggaacagcctgcggcagatggtgacacggtcggcgtccgccaattccagggctgagtacgcccaccccaagcatctgccattggacgagttcctgcgagccggagagagcgtcggcctgagcctccgtggcgcgcggatgaggctgtctatctaccggaattggccaagcatgcatgacaaccggtttgtgctctacaagctgacgacgcaggcgcccatgcctggccgggagtatgccggtttgtggggaggcacattcgggtggccgccagggcggccggaggatgagcgcaaacctggcaaggctctcttcttcctactcctctcctatgaggaggacagcgaagggaagcttcagctgattgcaaccaaggtgttggagggtacacactatgtcgtgcatccgaatgggtcctctatgtttatcgtgcgggtcggtgagccatccactgagacttttccgtggcaaaccgatgaggagtcgcgtgctgtggagatcaatagaagctttgctggtgagggcattgccaccgggtatgggttcaggtatcctggctcaaagcccggatcgctctttgtcctcctggatggccggcttgcatttgtttggagagagaacaaagctgttctcaccttgcaaaggctggacctggaggatatgataaggagaggggagcgtgtgccttcattgccgccgatacccaacttcgcctacctcacaaagtcttactccaatgtctttgctgtggcacctggcagcacgagcttcccagcttctccaaggtttatctattttggtaattcagttgtgagcaaaatcagacgctttatgctaaactttagatataaactaaaatgtcaaaatttagcaaatgagctacagtcgcagatccagcctcctgatgataacatcatgagtattgattacctgcgtgctattgctacgtctacagctgttatggtagaatataaatggaggagtaaaagaaacgctactagttgtatttgggcctttgggggcgtatggagcgttgattttggtccagcccggcctttgccactcatggccaacggcgccaattctaagaaagacgccaaggcccaacattggattagctggagggacactctccacggcttcctccaatcccctgctattagccagggtggaggaattcagacctgcatccgtcatgctctccaacacaatccttgcttgctcaccaatggtgttgttgttcacactgaattcaaaggtaacccagctcattcccaaggagaggaagcaaaagtgcagcaccctaatggtgctgctggaggcaaggtggtttctgcagatgctgctatacaagatgcggctgccgcagcttcttccgaagctaacaaggcaatgtgtaataatgccctcttcgacattttggtctcccagaaatttgccttgttgtgccatttgctacttgggaccttccatgtcaataaacctggtgatgtcatcgacttggaaaaaatcgacgccaagatgagaaatggagactatgcccacaaccctgcactatttgacgatgatatccagcagatgtgggagaagtttgagcaagttggccaagagatgacaggtctagcgagcaacctttcaaccatttcacgagtttcataccaaaagcaggcttctggattttctgaagctgaggtggctgagcacagaatagaggaaataagtttgccgggtgctgtccacgttgtcacaaaggagtcgactaccaccgtgcagttggccccatgtgattctagtcattctacaataccgaaacgaactgtgccacctggacgtgatctgtgcccttgcgatggttgtggcaccaaggtagatgttgaagaaggcctaatctgtgatgaatgtgacaccatgtaccactttgcatgtgtcaagctactcaatcctgatattaagcaagtcccagcaatctggcattgttcaacctgcagcttcaagaaaaaagaattggctgcagataccacgaataatgttgcccatgactgcttgcatggtggtaactgtgttttgtgtgaccagctcgagctggtgaagacagaagaagaagatcccaagcttcccataaaaattgaattagctgaagaaagagaggggagctccgtctcaagcatgggggaagacaatgaaccagacctgtcaacaactgccctgtcaaacttgtgcaaacactgtggcacatgcgaagacgatgacaagagattcatggtatgcggacatccttactgcgtttacaagttctatcatatccgatgcctgaaaacaagccagcttgcaattgagcaacaaaagaagcttggttgctggtactgcccctcttgcctctgcagagggtgcttccaagacaaggatgatgaccagatagtcatgtgtgatggctgtgatgaaggttatcacatatattgcatgagaccagcacgcaacactatccccaaaggtaagtggtactgtacattttgcaagatccgcagggcagcggaaggaatgcataagtatgaggattctgtgctgaaaatacatgggaatagtaagcatgcttgtaatgtgaatcagtcgaaggattctgaaggtgatggtactgaaaagtgatcatcacaatagctttgtggattagcttctgagctcgcttggacaagctcaggaaaagagattctttggccccttaggagggctatacaccgactttgatactgaatcagttgtgtagtttatttaattaactgccgttgacatctacaggaagaactcttacctggtgaagatggtgtatgtagtcttttagctgggcggaatgatgtgtctgtgttacttgttcaccttccttctttacccccttgtcagtgaccattgtgaatgttgtcctgtacttgccctgtgatggtattcttaaacacttttttttgggggaaatatgattttgtttttttaaaaaaaaaaaaaaaaaa

SEQ ID NO: 39425 - DNA, 764 bp, Oryza sativa
  Clone ID: PAT_MRT4530_42967C.1
ccggccggggcgcgccgccgactcctcctcttgccccccctctcgccgcgccgccgccgcctctgcccgtcagacacaccttccccctcctcgaggacaagggactctcctctctcgccggcggcggccgtcggcgacgacgtactagtactccacccccactcagctgtactgacgcggcttgtgtggatccgagcttggattggtcgattccttctgttctcgtaaccacggccagtgccaagcccgccgctgaacagaaggctatggaagggggcgagcaggaggctctggatgaaatggagaagaaggtgcacaagtactcgcgggggaaggctgcttaccttgggactcttcgcgacaagaaattgaaagggcagctcgccgcaagagagaagctctatggacactccgccaaagccgccgttcagaccgagaagtggctcttgcctaccgagggcggctatttagagcctgatgatgatggtctggagaagacgtacagatatcagcaaacttcgctccgggaggacgtggatcttttgagttcaagaaagccatttgatatgatcttacctttacttggcccttatactctaggatacacgggaaatggccggtatatggtagtaggtggacgaaaaggtcatgtcgctatgatggatatgttgaatttggaactcgtcaaggagtttcaggtgagggaaactgtgcgcgatgtggcatcttacataatgagcaactttatgctgtcccccagaaaa

SEQ ID NO: 39426 - DNA, 292 bp, Oryza sativa
  Clone ID: PAT_MRT4530_42968C.1
gtgggggggggaaaaataggacaggctttattatattcagggcacgaatttatttttaatacccctcctccgttcgcacaaaaaaaaaggggctaattagctaaactccgggtacccacgtacacacccacccctgatatacccgtagaggtaagcccttacatgacccccccgacttcctacgggcacacatatacgtacgtacgtacacgggtacacacaggaggttcgatcagccggacttgagcaggaagctctgcttgccctcgcggaactccccggggcaggggtt

SEQ ID NO: 39427 - DNA, 259 bp, Oryza sativa
  Clone ID: PAT_MRT4530_42969C.1
atagcatcttgagtactaaagcgcgatgattaggaacccactactaggaaaagcattatcgcaagcggccgaaaaggatctttgcaggcgaggtggccgtccgcctgtaagccaacgactgtgaagatcgccgatcttcgcaggcggggcggccgtccacctgtgaagataattttcgcaggcggacgttggctagtccggtccgcctgcgaaaaaaggaatcggccgcctgcaaaaaaaaaacttccgcttgtgaaga

SEQ ID NO: 39428 - DNA, 827 bp, Oryza sativa
  Clone ID: PAT_MRT4530_4296C.1
ccacgcgtccggccgagagttgcagcttggcatgcagagccttcagctctcttcagaagtgtgagctctgaatctctgatgatggcgttggaacaacaagaaggttttcaggttatatacatgatcgatgggcagtgcgactgatgaggtaggagatgggattaacgctgcctggctccctgaatgccatccgagaagcgtgccgctgtggccggctgcttcctggttggcattgagggagtcatgcagggtttgctcatttccatctacgacgacgatgtttatagcaagcacggcttcctagctcaggtggaggtaacactgttcgatgtggaaatcctcgacgttttctgcacccaaaaaaaggacaaggtcattgctgaaaaataccaggattctgggttttctgaagtgttatgattttgatttagacagtaaaatacccaagaagttggaggtttattgctgccttgaactgttctgggatctccatcaatgctgaaagagcaaattctgcctcctttttgctggcaggaacagagcatacctggaagttgtcgaacgcacgagaagggatgttgtcatcgaattgcctcatcatatcccatggcccatcgccaactccaacaagcacaattgacaaagggtagtcactgaaaaaaaaagtcatgtttgagttgaatgtaagagctcaacatggcaatatattagttactaacatgatagtaacactaaacacggaaatgctaagcatatgattacctggctttcacaatggcatctatagtctccctttcctgagggctcagctgcccattacctgtgtc

SEQ ID NO: 39429 - DNA, 1271 bp, Oryza sativa
  unsure (1)..(1271): unsure at all n locations
  Clone ID: PAT_MRT4530_42970C.1
nttcaatttgaatatctcagaaataganaatataatagtatcacttcttgaacgctcagacagaaatcgtgccattgtgatcgctagcccagatgaggcgtatgaaccggataatataggaattggaatcattgcaggtctagcatatgcatctattgaattaaatcaaaaagcaaaatgcattcgtccaataatttttttaagggttaatatatttaggtcgctatcaaaggaagatcctgattactcgagaaatatagagggtcaagtcataaggttgcattgggactgggcacaactcctaatgctgtcagctaaaagaatgaaagtagcatttaagctagatattgagaaagatcaacgagtttgggatagatgcacagcggatgatcttaaagggaggaatggttttaagcgatgtttgcaatttaccctttaccggcccagggatttactatcattgttgaatgaagcttttttttccgcattcagagagaatagagaaactatcataaacactgacctagaatatgcagccaagtcaatttccatggccagacttgaagatctctggaaagagtatcagaagatctttccttcaatacaggttataactagtgcatttcgtagcattgaacctgaattaacagtttatacgtgcttaaaaaaaatagaagcatctttcgaattaatcgaagaaaatggagatcctaaaataacggcggtcctccagtggcgaccggcaggcgggcttccccaaagtttgtatagtgtaggatttgttggtattcgtgataaaaacacctcatcctattcattttgccatgacgggcgaactccagataaaggttttgaaagtaatgaaaaattattaattcatccatgttactggctgggtttgaatctaaatcgtaatgcacttgctccagaggaagcagaggagataaatgacgaatatgatattaatattatttcagataattcagccattagaaataaaacaataggtcaaataactactcatctagatcagataccgataggaaatgaaggtgccactgatttgacaatggtgtttaaaacacttagaatagtattgcttccaactaacagcatgaagttccatcaatggnaacccagttaaagaacagatatattgcgacaatggttggcaactggattttggaacagtattgaaggctttaaacaagcaagttgtttgaggtaaaaatttgagaaataggccttggtattacactccatcatattag

SEQ ID NO: 39430 - DNA, 300 bp, Oryza sativa
  Clone ID: PAT_MRT4530_42971C.1
ggcgtcgtcggtgacggttgcgtggaagtcggggttggcatcggcggcaggcggagtaggggtcggcatcggcgcgtctacgtcgtcggcggcgtcggcaacgagctagacggtggcggtttggagagagagagagatcgagatcgagatcaaaagagagggaggcagcggcggctctcacccgagagatgcggcggcggcggcgtcggcggcggaggcggcgaggacctcgagacgatggcgaaaaacgacggcggtgtcggtacggggatgcctaggcagtggcggcgaaggagctag

SEQ ID NO: 39431 - DNA, 512 bp, Oryza sativa
  Clone ID: PAT_MRT4530_42972C.1
caacgaccaggcccctaccggaaggacaactgtccaacggacacttcgcaagtggccacggcacacatgcatccacatgcgaaggaggcacaccttgccgcacagaaactcggagacgaaccgctgctcccgtcgagccctctgaggcttccaccctgcgacaacgcagccccggggatcagaaggccgacagagtatcgcactcgtctcttccatacggagtactgtgcgctcgctccttcgatacgagccctgagatctacatgatcggagtgcattaattaatataccagtatatggcatgcagagacgtctgaaccatgcctcttttttgtagtgaattgtagctatagccaaattatataggctaataagtcttgatgttgtactcttcgtgggtgcgcttaatatcttatcaggacccctgaaattcatgtgtgtggcttatcccaatccatattaagtaataaagggtttaatatattaccatataggttaaaaaaaaaaaaaaa

SEQ ID NO: 39432 - DNA, 249 bp, Oryza sativa
  Clone ID: PAT_MRT4530_42973C.1
atggcgcctaggaccagtccccaccaggagccctgtgtgacgatcctggacacaacaagagtcagcctcaagtataatccgacaaccatgatcagtgatctgaccagcggacataagctgcatggaggacttatagaagaaagatgtgtggaatcgggtgtcatatggaaggaagcaccagaatcaagaaaccacgaggacaatatacctgaagaggatggaggtggtggtggaagactagaagcctga

SEQ ID NO: 39433 - DNA, 3447 bp, Oryza sativa
  Clone ID: PAT_MRT4530_42974C.1
atggcgccgccctcgggaaaaccgggtgccatttctcttccgaagcctccggtcatcttcaacggactcaacttccgggagtatgcattgcatatgcagatacacatgtgcagccagcggttgtggggctacctcatcagcgatcggccttgcccgccttgtccaaccttgcctgctgagcctgccatcccggcatatgctgatgagaacactaagcgtggtctccttgatgatcttgctgctgctatggaggcgtatcagatagatctctctctatatgagacttggttagagcaggaggcctatgccaaggctattttggttgggagcatggaggttgacatatcactcgacattgcgggccttgctagctctgagttgatgtggacccgtcttcgccagcagtacgagcctcgcaacgatgccatgtttcttgccattgtgaatgaggcacaatctcttcgtcagcttgatgccactgtggatgagttctttcgcaagatgtctgcggtgtggcgtcaaatggacctacagggcgctgatgtttgtcacacttgtacctgttgtcagcgccagagggtccagactgagaccactcgcctctatgagttcttgtctcgtttgaggcctgagtttgagcctgttcgagctcagctgttggcacgacgccctcgaccttcattgttggagaccttgcctgagctacgggctgaagagactcgttgtcgtgaggctggtataggcattgcacagcagtccacctctgtcttggttgcacagggcttgccttctcaggtccatgtctctgcccagcctgttgtggtgccatcacctttacctgttgcggctagtgctcctagtactccttcaggcattgtttgcgggtactgtagcaagacagggcacaccgcctctatgtgctacaagaagaagagagatcagagtcgtcgcacctctcagggctctcgacagggctcttctcagtcaagctctcagcagatcacatcgaccgagcaagagcttgtaaggctccttcgtcgtcttatgactacagcctctacctccacccatgggtctgctgctcaggcttctagtcttccaccaccacctccatcctcttcaggtatattgtcctcgtggtttcttgattctggtgcttccttccatatgacacccgattccacacatctttcttctatgagtcctcctgatacccctctcacagttcagacagctaatggcacctcacttcctgttgttggtcgtggcacactttctacttcttcctttcgagttcctactgtctctcatgttcctaagttaaccatgcagcttatgtccgctggtcagatcattgatcatggttgtcggattatacttgaggctgactcttgttgtgtccaggatcgtcgcatagggctcctggtgggaactggtcctaggcgccatgactctcagcgtctttgggagcttgattggctacatctcccttctgatgcttctaccagccagtcagtcggttccactgcttcagcgttagctacttcatccactactacttttgctcagtggcatcgtcgtttaggtcatctatccggtgctagattatccacacttattggtagtggggtcttaggtcctgtttctggagataccgctctacattcccatcgccgttttctagctgagcagggaacacttccccagttttcttgccctggtgctcatgctcaaaatggcactgctgagcgcaagcatcgtcacattcttgagactgctcgtgccctcatgatctcctcgcatctttcgcctcatttctgggctgaggctgtctccacggctgtttttcttatcaatcgacagccttcttctgttcttcatggttgtactccctatgagcgcctatttggtacacctcctaggtacagtcatcttcgatgctttggttgtgtttgttatgttcttctttctcctcgtgagcgtaccaagctgactgcccagtctgttgagtgtgttttccttgggtatagcactaagcataagggttattgttgctatgatcctgttgctcgtcgcatgaggatatctcgtgatgtcacatttgatgagtctcgtccttactatcctcgctcttccacttgtgatcagtcctccactgtcaagtctatctcctttttgactcttccggattggtcctttccttctctaccaccagttccgtctccatcaccacacctccctttggtttctacgccatctccatcactgtcaccacctccttcgccgatgccatcatcacccatactaccatcaccacctcctagtactcttttagatgctccacatgagctatcaccttttccgctgcactactctcgtcgttcacgaccccttgttgagttgtcctctccctctatccttggaccagctcctgctcctgcttctcggtatgatcttcgtgatcgccatgctattaggcctgcgcctaagtatggctttactgctgcggctattgttgagcccacgacttaccgagaggctattgcccaccaggagtggcaacaggcgatggcagaggagattgctgccttagagcgtaccaagacttgggatgttgttcctgcacctactcacgtcactcctatcacttgtaagtgggtctacaagataaagactcgctctgatggctctcttgagcggtacaaagctcgtcttgtagctcgtggttttcagcaagagcatagtcgtgactatggtgagacttttgctccagttgctcacatgaccaccattcggaccttgttagctgttgcctctattcgtcagtggtccatttctcagctcgatgtcaagaatgcctttctcaatggtgagctgcatgaggaggtctatatgcagccccctcctgggtattctgtccctgatggcatggttcttcgtctgtgtcgttctctttatggtctcaaacaggcccctcgtgcttggtttgagcgcttctcctcagttgtcactgatattggcttcaaagccagcgaccatgaccctgctctctttgttcacacttcttgtggtcggacccttcttcttctatatgttgatgacgtgatcatcactggtgatgactctcggttcattaatcttgtgaagaagcgtcttagtgaccaattcttgatgtctgatttgggtcctctcaggtactttcttgggattgagttctcttccatgtcttctggtttctacctctcccaagagaagtatattcaggatctccttgctcgttcgggcctcactgataagcgtgtggttgacactcctatggagcttgggatacatctacggcccaatgatggtgagcctcttcaagatcccacccgctatcgccaccttgttgggagtcttgtctatcttggcgtcactcgccctgacatctctcagttcacattctga

SEQ ID NO: 39434 - DNA, 1285 bp, Oryza sativa
  Clone ID: PAT_MRT4530_42975C.1
cccgggctgcaggaattcggcacgaggatgcacgcggcctcagcggcgagatgagccaccgccgcggccgcgccacctcaccggcggcgccggtgaccctgccggacgacgacgacctcctcgccgagatcctcctccgcctcccgccgctgccctcctcgctcccccgcgcctccctcgtctgcaaccgctggcgccgcctcgtcaccgaccccggccttccaccgccgcttccggcgcccgccaccaccggaatccccccatcatcggcgtctttcccgaagacttcggcttccccttcttccggtccgtgatggatccgcgggatctcatcccaagggagcgcttctcgatgcggctcggcgaggacgaggtccgcaaagagcggatgttctgcggatgccgccatggccgcgtcctcctcctggaccggaagcagaacgagatcgtcctctgggaccccgacaccggcgaccaccgccgggtgggcattccgccggagatagacggcaaggagaagatcgtctggaacgaggcggcgctctgtgccgccgccgacgacgacggccacgttcacggcggattcagctgttgccccttcaatgttgccttggtgggcgtggccagcaacaacacacaaatgttcgcttgcttctacacatcggagaccggcagatggagcaatctcatcttcactcctgctccattcttggtctttgcttttgttgatcctggcatactcgttggccattccctgtattggttccccactggtcttggcagtgccattcttcagtttgatttggataggcaaacccttgctgtgattgagtggccttccaatccaaattgttatagccactacatgtctcagatctttctggcagaaggtggttatcttggccttgtcactctgtcgtacgacagccttcaaatatgggagaggaaggtctgttctgaaggtgttaccagatgggtgctgcagaggacagctgagctaaacaaggttcttgaactgggctctggggtcaagacaagtcatttagtgagattgggttatgctgaggatgttaaggtgatgcttctatgtgctgattccagtgtcttcatgctacaaattgattcactgcagtccaggaagctttgggaaaccaatattatgtcctcgcttcatccctacgcaagtacttatgttgcagcaaattatggtttaagaaaatttggtaaggtatctagacttttgactgttattggtaaggtgcagagatggattactggtgcatga

SEQ ID NO: 39435 - DNA, 521 bp, Oryza sativa
  Clone ID: PAT_MRT4530_42976C.1
gggctgaggaaggagaggtggttgcagtggccacatgggacggtcacggtgtccatcagcctcttgcatgggactccaacctgcagctacccaaaagacgaaaaattaattaatcacatcatgcaattaagccaatactttcttcgttaatttcatctctttgttgcatggcactgtccttaaggagaaaaagtagaggagaacagcatatctgtgtggaaggaatctagatggagcaagcaaataaagtgggatatgcaaaacagagagggaaaaagaaaaggaagaagagaagattcagtagtacttgttttttaatggaagaacagaagatgcaggtactactaaattggattcttgtccagtttaaaaatgcagcctgcagctggtaacaatgaaagaaggggatataatggaagcgaaagatggaacatgacactgcgagagaaccagctgagtagaacattctaccacaaagcatcatatcaagagctatggcccatgaatcttatctaagaaag

SEQ ID NO: 39436 - DNA, 235 bp, Oryza sativa
  Clone ID: PAT_MRT4530_42977C.1
aatacatgaaattgacagttgattatataactaaaaaaagcggactagtaaacaaaaagcgcgcggaaatgctaactaggagtatcgaacaggaaataagaaatctgtaaaagagcctgaactaaaagaaagacccggtcaacgggccgatggtcccgagacagaacaaggacgcggcgaagtccgacgagaaggaggcggcgctggagctgtacagctgcaccaccgagtccac

SEQ ID NO: 39437 - DNA, 831 bp, Oryza sativa
  Clone ID: PAT_MRT4530_42978C.1
ctacccatctagagccgcggcgggcgagcgggcgagcggcgacctcgctgtcgccagccacgccgcctccacggtgccgtgcacctcctcagcgcgacaccggcggaggatgcggaggagcggcccacccgccgcccgccgcaggccgagcgcagggagtccgccaagctgcgcatcaaccgcgccctcaaccagagcggccctgtcggccgcgccttcggcagccggttcggcatcgttgcgatgctcttcaccaggaccgagagtttcattcgcgaccagtgcgacgtcgccgacgactgggtcaacaccgtcgccgcgggggccagcgccggggcgctctaccgcatcgcgtccggcccaaggtcgatgattgtcgccggcatcctcggcggagtcctgtccggcgccgccgtcgcggggaagccgatgcttcagagattcgcaccgaagcatcgggatgggatacattttgtcaacctttcccatccaaagaggaacgaggctgagcgcctgagccgtgaggaggaggtggccgtcggtgactccggcgcaggctggggaagaagacctgctcggcgagaggagggcgcggccgtcggcgacatggttgccggattgtcgcctagtgctcgagcaccgctgctcgccgtccacggcaccgccgttaacgcccaccttcggctccatccgcgtggccagccggtgcgccccaactccgtcgccggccatgtggccgttggcgacgtggtcgccggattgtcgcctggagctccagcaccgccgcccgccatccacggtgccgccattaacgcccatccccggctccat

SEQ ID NO: 39438 - DNA, 158 bp, Oryza sativa
  Clone ID: PAT_MRT4530_42979C.1
tgtgggtaattgaacggaacaatatgaacctggtgcagtagtgaatatgtctgacacagcaaaacgtatgatttttacataaggcagcttctatcaagattattctctagataaaatgaaagcaatccttgcaattaaaaaaaaaggtttgagtttgg

SEQ ID NO: 39439 - DNA, 1488 bp, Oryza sativa
  Clone ID: PAT_MRT4530_4297C.1
gatacatggggtgttccaactcatttccaaaatgattggtcagccctatatttgctaacacatgcatttttgccaccccgtgggccagtggctaacctaacaatcttgttccattagtgtctccggtatagattatttcctgcacagtcaatttaatgaccatgtatcgatgttgtcacacactgttatcttaggccatttcaactgtagtgagagagtgtctgttgatcaggaacgagcaaacaattctactctttcaccatactagcaaattacccatgccatgctatgccatgggataaaaaatgaaactgctttgctgttagctgattggcatgagttttcccagatcttaggaagagatgagaaggataaactaacacctctcagtcaaattggattccgtggtcctactagcactggtagtggattacaattgactataagtagcatacatgtattaacagaaagcagaggagagctgcatcctgatccacgatttcgtgtcatcaacgctgtatcgctggctgttgaggatgatgctgacaacactactgaaatcatgagatgtctttattgtcctttttcttgtaactgcagaaacctggatagagttgccggttgcgacataaacgtatttccttgagagacagaaacttttaaaccatcttattaatgaaatatgttcaatcgatccagatattatagttggatgggagattcagttgggatctttaggattttttgctgaaggagctggtataggcttactgaaaagaatttcaaggacaccaccaaatcagatgaaacatccacctatgaacccagtggaggaatcttgtcaggagtttcctggagcatcttcagctgatgatgttattgatgatgctagtgagagcaattggagtcatactcatgctagtggtatacatgttgatggaagaatcattctgaacttatggcgtctcatgcgtgcagaaattaagcttaataattactcccttgaggctgtagctgatgaagtcttgaggaaggtaccattagtaccaaccaagatattgaatcgatggtttgcaacaggtcctggacgaggaagataccggtgcatagaatatgttaacaattgatcttctctcaaccttgaaatattaaatatacttgacctggtaaataggacatctgtacttgcctgtgtatttagtattgatttcttctctgttctttcacgaagttctctgtatcgtgttgaatctatctatgctcttgagattggcccatacacaaaactaccttgcaatttccccaggaaattaacaggttgcttctcagccagtcatggaatgcttgccactatggaaccagagtcaggtttctgctctgacccattgaatccttttatccctccatgataataagcatatacttggtatttcatagcctcataggtgtatttagaccatccatttgcaccttccacttgccggtaaa

SEQ ID NO: 39440 - DNA, 600 bp, Oryza sativa
  Clone ID: PAT_MRT4530_42980C.1
atgtcccgcgccgttgacgcccagcaggagcccacggaagggcgccgcttctactcgccggatcgccccgagggcctcgccttccccacctcgtaccgcgcgctctacgacctgcccacctcgccggagtgcctcttcgaggaggacaagttccggcagacccgcacctggggcgagaacctcacgttctacaccggcgtcagctacctcgccggcgccacgtccggcgcgctcgtgggcctccgccgcgccgccgccgaggccgagcgcggggagtccgccaagctgcgcatcaaccgcgccctcaaccagagcggctccgtcggccgcgccttcggcaaccggttcggcatcgtcgcgatgctcttcgccgggaccgagagcttcgtccgcgaccagcgcgacggcgccgacgactgggtcaacaccgtcgccgcgggggccagcgccggggcgctctaccgcatcgcgtccggcccaaggtcgatgatcgtcgccggcatcctcggcggagtcctgtccggcgcagctgtcgcgggtaagccgatgcttcagagattcgcgccgaagctatccgccagattggattatttacgctga

SEQ ID NO: 39441 - DNA, 1770 bp, Oryza sativa
  Clone ID: PAT_MRT4530_42981C.1
atggatgggctggtctaccactacgatggcaacaactacttcgtgccatcgtctcagtttggcgggtcaagccgcaaccaccacccaccaccgtcggcgattatgctcaactccggtggggcgtcagcggacggcggcgggtactacaattcggggacattctcgggcggagaggggacagggccggcggggtccaagtcgcggttcagctacgaggagctgacggggatcaccagcaacttctcgcgggacaacgtgatcggcgagggcgggtttgggtgcgtgtacaaggggtggctaagcgacggcaagtgcgtggccgtgaagcagctcaaggccgggagcgggcagggggagcgggagttccaggcggaggtggagatcatcagccgcgtccaccaccgccacctcgtctccctcgtcggctactgcatcgccgcgcaccaccgcatgctcatctacgagttcgttcccaacggcaccctcgaacaccaccttcatggccgtggcatgccagtgatggactggccgacgaggctgcggattgccattggtgcagccaaggggctagcatacctacacgaggactgccacccgcggattatccaccgggacatcaagaccgccaatatcctactggactactcgtgggaagcacaggtggcagactttgggcttgcgaagctggcgaatgatacgcacactcacgtgtcgacgcgcatcatgggcaccttcgggtacctagcgccagagtacgcctccagcggcaagctcacggaccgctccgacgtcttctcctttggtgtcgtcctactggagctcatcaccggccgcaagccggttgaccagacgcagcccctcggagaggagagcctcgtcgaatgggcacgaccagtgctggcggatgcggtagagacgggtgatctcagtgagctggttgatccacggctagagggcgcatacaaccgcaatgagatgatgacgatggtggaagcagcggccgcatgtgttcgccactccgctcccaaacggccgcggatggtgcaggtgatgcgggtactagatgaggggagcatgacggaccttagcaatgggatcaaggtggggcagagccaagtgttcactggtggcagcgacgctgctgacatccagcaactccgtcgtatcgcattcgcctccgaggagttcaccggagagtttgagcagagaacaaccaactccaactctgagtcgcggccgatgaatcggataccagagatcggtgatgctccgggcggctgccgccgccggtacaccatgcaaggacagaaactccgtcgctgttggtgcatcgagaaggtccagcgagagcaaccgatgcgtttgcattccacacttcaccggcggctcgtcgagaacctccggccgtggttgttcgcactcgccggcagcgggcggggcggcaaagacgacgaccaccacgggccacagcggcggggccgcggaggcggcatccgcaggggcggcgtccgcaggggcgtggctctcttctttgcgctgtctgcggcattcatcggcatcaacgctcgagctgaccaacccggactagacttgagagaagttgaggtccagacgatcaaggagatcatgtgtgatactaagagcaatgcacatgaagaagagaccaagttcaaggaggatgcagcatgcagagtgcgcatcggctactggcagcatcggctattgtctgcatcagctgatactggatcggatagggagaagccgttgtag

SEQ ID NO: 39442 - DNA, 385 bp, Oryza sativa
  Clone ID: PAT_MRT4530_42982C.1
gaaagaaggggggaccctttttttagggcgggtttggaaaaaaaacccccccagggggaaaactggggggggtttattttactttcccccgaaactagtttcaaaaaacattacttgggggggttgttttgggaccaaataaaaaatccgggggggaatggggggggaaaattagggggggggggcccgggctttttccccctggggtttttggggcttcgggcttgttgttgggaaaaaagggggttaaaaaatgggggggccttttccacagggaggaacccccctttttaaaaatttggggttgggaccccttttgggggttcggggggggggccaaaagccctatttaggttttaaaccccaaattcggtgaatatttttt

SEQ ID NO: 39443 - DNA, 486 bp, Oryza sativa
  Clone ID: PAT_MRT4530_42983C.1
gtgggtggttgttggtatttcttacgaccagagataaatctgcaagtgcatgaaatactgctgtagcacttcaccttcgggtaaccccaaaaggatagcaaacttagggaacgattactaggacgggattcagggctgtcaccccctaccggctacctcttacaaatccgtgggatacacaacaaacaaaaagaagtttctccgaatctagagcagagtgtaccgacagctccggtactcctccagaattcctcctagaaagctacacttaccgaggtagaagtcggagagagcaccaaacttccgggcactcctccggagcttttctcactctctacctattttctaatgtacaaaagatataatagagcctcttgtaatttacctcaaagttgtgtgtattggaatgagagcctctcctccttttataggctccaaatgacggttatggccatgaaaaatgaccaaaataccctccaacagtca

SEQ ID NO: 39444 - DNA, 158 bp, Oryza sativa
  Clone ID: PAT_MRT4530_42984C.1
cattctgaagaaatttagacgtgcatcaaacgcaatgccattcgctctggatacattagcactgggataacatcataggaattcacggtcacctagtctcgtgttggccttcgggatcggataatatgattaatagggacaatcggggcatttcgtat

SEQ ID NO: 39445 - DNA, 297 bp, Oryza sativa
  Clone ID: PAT_MRT4530_42985C.1
aaaagattggggttccccccctatataaacgaaacaaagcatcgaaacaagctgataattaattcccagaaccaagaaatctacggttgccagttaaactccccggaaaaaatgaccaataaaggacctaattacattgtactttttttcaattcagggcataaaacaaccaacttataccctacagaatcgaccaccaattcttttgagggattttggagccaaaacaccttgcctacagacataaaccccaaaataagatgagtggggtcaaaagaaacaggtctaacaggaaga

SEQ ID NO: 39446 - DNA, 492 bp, Oryza sativa
  Clone ID: PAT_MRT4530_42986C.1
tcttttcttctcttataaaggcacatcaccttatcatcattctatatactaacagcatttattgcagtctggtcaagcgtgtcacgctgcatgcaacgcagcacagcgcattcctttatccggtcaggcttcatcctaaccattacaggcaaggtgttacacgaagaagggcaaacatgcacgttgttaaactgacacgtggtggacaagaatgaccggtctgacactggtcgcatcagcaacgggcagccacgatcccacgttgcgcctgtctccgccgggagtggagatccaccaaaacacaggagtagggtattacgcttcgcagcggcccgaacctgtatacatcgctgtgtctcgtgtgtcttgcgggcagacaatctttccacatacagagagaaagagagcttgagatctcaccctaagcccccggccgaactggcaaaggggggcctgcgcggtctcccggtgaggagccaggagctccgtcat

SEQ ID NO: 39447 - DNA, 2091 bp, Oryza sativa
  Clone ID: PAT_MRT4530_42987C.1
atgggcgtccaccctttcgccaaggcagccaacggcttcgtcatgcaagccgatgccccggacgccaagctcgccgacgtccaagccgtcgcggacgcaatacacggtaacaccaagctcgccaacatccaggccgtcgcggacgtcatccacgggaacgccaagctcgccgacgtccaggccgtcccggacgccatccacgggaacaccaaggtctttgacatccaggccgtcgcggacgccaagcccgacgtccaggccgtcccgggcgccatccacgggaacaccaaggtcgccgacaactcggtcgtcgcggatgccatccaggggaacaccaagctcaccgacgtccatcccttcatggaaggcgactgctccatcaaactcgccgacgctcaagtgcgcaacaaggccgtcgatggcttcgacgccacgaacatgagccctttggtcgcgcggtgtctcgcgcaccaccttgccaaggtgtccgtgcagagggtgtggcaggggaactacccggagatgttcaagccagtgctggacgcgttcggtcagcctcatcgccgcatctacatcgccttcgacttcgagttcgccgcggacgccttcaccaacatgcactgctggccaggatgtaccaaaaccaactacgaatacttgcgccgctacgtgaatggaggcgatgtagttcagatgggtctcgcatttgtatttgaggatgaagtcgacgaagaaccgacattcacggcgatggcactggagatcaatttcgacttcaccgtagagctgcgtaagtacaatggcgaggccataagcttcctgtctgaacaaggccatgatctcacggagcacagggacagaggcgtcgtgccacactttgtttatacggggctcttgagccacctcccattcggcaacagctccgtcacctggattgcctaccatggagattacgactttggtttcttcctccgcctgctgcaagggggatgccgtggcagcagccatcttccacttgagctgcccacatttctgcaccaattgcggctcaacttccccagattgtacgacatccgtgttcttgggcagctggtgcagcatggcttccgcgggagcctcaccgcgatcgccgatctccttggggtcaaccgtttcggcagagggcaccacgccggcgtcgacgcactgcttacactgtcatgtttcttccagattgtcagctgtctttcagcctcaggagaccaccagctgcatcggctcgattctcgccagggtttactcgccggaatagcccaggtgaacaaggctatcaaagatgctcgccacattggcgaccgtaccagcaacatcgatgtcatcaaggtgcaagcaggaaacttggacgaagaggcacaacgaattcaagagctggtgccaagcaacttcaacatcatcggagtagaagtaatgcaccctcaattgggcaaccgctcatatgcaatcggcgcccaacaaaattatgaatcgatgaagacctatctgaaggatgccgactcattcgaaattgtcattgcattcgtgaactctgaaggaatgttggcatatgattgtgtgtggaaattctgcatcagctccacaccacgtagtggctgtctgcatccccgacagtttacccggcttatggcgtcttgtggagcaacgagtaatcctaatgtatcctgggtgacattccacggagcacacgggatcgccagcctgatcagctcattctctgcacctcaagaccttccaagcgactggccttcctacgtcgagcaacggagagcatatttccctggtatgtatgatgtcgcattgattgtgcatagataccctgacattggcatacttcccacaacggggtgcaaaggaggcttgtttgatgttgcccgagctctggacctgaacttcatcaaggacgacaatccggtaaccagggttcttcttactctgagatgctacatgagattggcagatcgtggtgatttcccagacaagcagtcagctgtccaagggcagcttatggaaaactgctgctggaactgcccagcaaaacggatggagcatgcatga

SEQ ID NO: 39448 - DNA, 175 bp, Oryza sativa
  unsure (1)..(175): unsure at all n locations
  Clone ID: PAT_MRT4530_42988C.1
tgctgctgtccaangaggacctcgtgccgnncccgacgccggagcagtggcccgtcgagccgcacaacagcctcgccatgatccaggtgacgacgttcacctgcggcggcttcgtnatcgggctgcgcaccaaccacgcggtngcggacngcaccggcgccgcccagttcatgaa

SEQ ID NO: 39449 - DNA, 136 bp, Oryza sativa
  Clone ID: PAT_MRT4530_42989C.1
ggcagtgcacgctaaattaccctcactaaatgggaatatgcttgcggccgccggggcctgcgccgtactacgtcgacgtgggctcggctttcgttggaccacctcgttccgctaggatgtaactccatcaccgaat

SEQ ID NO: 39450 - DNA, 459 bp, Oryza sativa
  Clone ID: PAT_MRT4530_4298C.1
gttagctctacatgagacttgatctctcacctccacacacttgcccaccatccttgcataccagagtggcgggggttgcatccgtcatggggaagcacctatgcctctatgcgtacagggagcttcaccctgatacggtcactgacattgttttaagaggcatttctttgcttaggaaaacagaacctgcttgcttctatgaggcggcgtgcagcaactcttttgccacatgcattggaaccatttgaagattttcttcctctggatgaaaggaattgttctatagcttattattcaggaaggctaacttcctttagtgcggatcatcaagctgaacttcctaagcgtaggtcaattaggaatataattactgctcgtcttatcccatatcataacatcatcaacctatgggaatatgataagttctcattggtattcgcaaaggttgaaaaccattat

SEQ ID NO: 39451 - DNA, 219 bp, Oryza sativa
  Clone ID: PAT_MRT4530_42990C.1
atgggagtcaaggacggttttataaaggcggatacaccggaaagagactgtgataagacccttcgcataaccccctttaaccaagtgtaccacacctcagatttcgcccccactcctcagcaggcagcgggcaaccctttcttgtgcctagaccatcgggtcagtcggtctgacaaccgcaacacctgcggtctgaccggcggcacccagtcggtctga

SEQ ID NO: 39452 - DNA, 463 bp, Oryza sativa
  Clone ID: PAT_MRT4530_42991C.1
ttttttttttttttttttttttttttttttttttttgtttttttttttttttttttgaaaggaacacataattatttttttgcttccaaccctttccctttttttttgttcatgatcttgcaaaaaaggaacactatttatttatttgttccgccaccacccacctatgcaaggctgagaaaaacagggcttggttttgcgctaaagaataaggaaaaaccgctcttgaaaacccaagtgggaaggaacacatctgggggaccccccccaaaaagattgtgcgagctacctttggagaaagaaaaagagaaaaacccccctacattgctgcctgtgggggggagaaacaacaaatttttttttgggaaggaaccaaagcaggaggcaagcatgctttcgaaagagccgagagaaaagctttttttctgcccttggaaaaacaacggggggggggggggttttt

SEQ ID NO: 39453 - DNA, 432 bp, Oryza sativa
  Clone ID: PAT_MRT4530_42992C.1
atggctgatgcaagagttgctgactttgatctgaacgttcgcatagaagaggatgacaacattggaattgatctgaacctgccactagatgaatttggtgctgttgattttggttatgtacaaaacctcgcaagacatgttgttgaggcgcccattcaagtaaaacaccgaaggaaagagatgtcagaagaactcaggaaagtcgtttatcaagttttgttggcaaaaagcaaggatggggtgctagaaaagaaacattcaagaattgttgctgatcattttggtcttcacattcagtcagttcaacgcttatggaagcgaggtttaggaatggagaatgtgtttttgatgggaaaattggttgttttccacttgtcacttatagacatgctgttagaagtagtgggaatcgtcttcgtggagaagaagtaa

SEQ ID NO: 39454 - DNA, 1460 bp, Oryza sativa
  Clone ID: PAT_MRT4530_42993C.1
atggaccacgatcccaaggagcggctcctcctgccgccccgcgccgcggcggcggcggcggccaatgggccccaccgccgcgccgcgcccgcggcgggcggcggcgggggcggcgtggccatcgacgtccacgggctgaagaggcgcggcggcgggcggcggtcgtgggtgcgcgtggacgcggcgacgggggcgtcggaggcggtggaggtcgccaagccggcgctcatgcggcggctcgacctgcccgcgcgcgacctccgcctcctcgacccgctcttcgtctacccctccgcgatcctcgggcgcgagcgcgccgtcgtctgcaacctcgagcggatacggtgcatcatcaccgccgacgaggcgctcatcctgcgcgaccccgacgtggcggggggaggagctgagacggaggaggccgtgcggaggtacgtcgctgagctgcagcgccgcctcgtggaccgcgccgacgatctgccgttcgagttcatcgccctggaggtcgcgctcgaagctgcctgctcgttcctcgacgcacaggtcagagatgagatagagcagctgatggacgacgatggtgatatggctgaaatgtacctcacagagaagaagaggaggatggaagcatcattgctagaggagcaggcgtttcaggggatgggcaataggtttcgtctcggctcgcgcgccgcggcgccattgctacagctctgctacatctctgggtcgtgcgtcgctgatgatgcccccgaggacgcggtcggtttccgctacaaggggacggaagccgtcgccgaggcctgggagggatgcggcggcggcggcggcggaggagaagaagcccgccgcggtgcccacattgctgccctcgctcagtgtgccggcagggatgcgcaggcaggagctgctgctgcgctcggggctgtcgctcgacgcgtcgtgctcgtcggacgcatccacggactcgttctgcagccgggcgtccacggggcggattgggaggccgacgtttggggctaggaagaagaagactctctgtcagactgatcacaagattgtttccatgctggaaagggaggttggattggcttctgctaatgatgtgcctggtctgaagaggaggtggggccacgagatcaaggagcaacccagcggaggaggatatactcacatccatggtcatggagagctcgccggagccaagagaatagctccacgctccacgctccacgcagaacagaatcgcccagcccagcccagcggtccacggaccgtgcagaatgctacaggctccaaaccaatccaaccgcgcgatggcgccggcgcggtcgccggaaaaagaaaaaggtcaaagagagcatcaaagaatccgcgcgcgcgcgacgagcctaccctatctgaacactaatcgcgagctcaactcaccgcgaaacagaggggacgacgaggaagaacaa

SEQ ID NO: 39455 - DNA, 1287 bp, Oryza sativa
  Clone ID: PAT_MRT4530_42994C.1
atggaccacgatcccaaggagcggctcctcctgccgccccgcgccgcggcggcggcggcggccaatgggccccaccgccgcgccgcgcccgcggcgggcggcggcgggggcggcgtggccatcgacgtccacgggctgaagaggcgcggcggcgggcggcggtcgtgggtgcgcgtggacgcggcgacgggggcgtcggaggcggtggaggtcgccaagccggcgctcatgcggcggctcgacctgcccgcgcgcgacctccgcctcctcgacccgctcttcgtctacccctccgcgatcctcgggcgcgagcgcgccggcgtgtgcagcctcgagcggatacggtgcataatcgccgcggacgaggcggtcatgctccgcgaccccggcgtggagtgagcaggagttgggagggaggaggccgtgcggaggtacgtcgctgagctgcagcgccgcctcgtggaccgcgccgacgatctgccgttcgagttcatcgccctggaggtcgcgctcgaagctgcctgctcgttcctcgacgcacaggctgtcgaattggaggctgacgcttatcctttactggatgaattgacaacgaaaatcagtacccttaacttggaacgtgtgcggcgcctaaagagtaagctggttgcattgactagaagggtccaaaaggtcagagatgagatagagcagctgatggacgacgatggtgatatggctgaaatgtacctcacagagaagaagaggaggatggaagcatcattgctagaggagcaggcgtttcaggggatgggcaatagtggatttggttcatctttctctgctccagtttcgccagtttcctcaccccctgcttctcgaaggcttgagaaggaattgagttttgccagaagtaggcatgacagcttcaagagtgcagacagtagtcagtacagcatagaagaacttgaaatgttgttagaggcttatttcgtggtcattgattacaccctcagcaagttaacttcgctgaaggagtatattgatgatacagaggatttcatcaacatacaactggacaacgtccgaaaccaactgatccaatttgaactgctgctgaccacggctacattcgtggtggccatcttcggagttgtctcgggagtttttggcatgaactttgaggtggacttgtttaatgtaccacatgcgttcgaatggacgcttgtcattacaggcgtatgcggcttagtcatattctgctgcttcatctggtacttcaagaagagaaggtttttccccttgtaa

SEQ ID NO: 39456 - DNA, 397 bp, Oryza sativa
  Clone ID: PAT_MRT4530_42995C.1
cattcggttcagccacccacatccataaattttgtgctatttccatttccaagcgccctctaaatcatcatatcattttacttttaggtacgtgaattacctaaaacttaacaaatcacatggaagggttgcggcaaggagacccgctctcgccactcctcttcatccttgcgatcgtcccgttgcaacggctgcttgacaacgccacggatttgaagctgcttagtaagctgggaggtcgatctgcacgccttcgaatcttgctttatgcagacggtgcaacagttttcatcaaacctgtcaaaagtgaagtgcaagctttcttccaacctggctatgcaaaactcgggccaagcaactgggtctctcccacccaactttccaaaaatcccagggt

SEQ ID NO: 39457 - DNA, 150 bp, Oryza sativa
  Clone ID: PAT_MRT4530_42996C.1
aaaaatctcatgaagatcagtctaagggcttctgtgacgattccacccatctgctcgacaggcatgatagcaagcattttacagctcatttcttcaaggccaagggcagctccgaggagaaacacagctactacaatgctcaaacaaaga

SEQ ID NO: 39458 - DNA, 1134 bp, Oryza sativa
  Clone ID: PAT_MRT4530_42997C.1
atggcggcgcggcccgaaacagcggctacacagttgaaaggtaataaggatttggccgagccgtgcgagtcgctggcgttgacgacgcaaattgacgcgacgcgagcccaatactccccgtatatatctccagtttgcacgaccaactgccagctgcaaaaggcgagagttcagtggaaaaaacagatggtcgctgttcagaccgtgcatgcggcgctcttgccgtcgacgacgacgacgcgcaggcggccatcaccgggtaggctaccgaggcgttcccccatccgcgcacgagccggatcgtccgagacatcgtcgccacgcggccgcgagaactggcgggtgcaggaggcgctcgcacgggtcgccgagatccaggttctgaaggtccgcatcgccagcttcctcgacgactgctccgagaacctgctctggctcgcggagaacgcagcgctcgacgcgacggcacaggacagcctgagggtgctcgacctcgacggcgccgccgacgatgagataatggagaggctgtactacgaaggtgtatccgttgaaagcatcggtgaggaagccaaacatgaacatgtgctggtggcaagggagagcggacggtacaggactcgcaggaacgtttacctcggtgtcatgggattgatctgggttggcctgatgcagaccaccgtgttcgcggcgcccaacgtggagttggacaagtttgcggccctgtgtctcatctttcttgcccatattgttcaggtctgcttcaaggaggaaactgataagaaacaagtagatttgctccggtccaacagatactactactgcagtactgctatcgctaaacatgagagggatcggggcccctttctcctacgtccagtccaattcagtgctggagaagcgttcagcattcatctacagcatcctttgatggctcatgatagctttcataggaaaggccaagcaaagtatcgagcatggacggacgagcacattgcacccacaaaccacaccaactctctcactctcagccacaggagcgaggcgtgtcgagacgctctcgatggcacacgaacagcagctactccagctcgcactgatccgagccgagcatccgatgcagaaagttcatga

SEQ ID NO: 39459 - DNA, 624 bp, Oryza sativa
  Clone ID: PAT_MRT4530_42998C.1
atgggcggagcaagcgagctcgtcggtctccccgccctcctccccaagcctcacctccttgatccatctccgtgcgtgctcgccgctagcatcccctcagcctccctcttcgcgcacgccgagcggagtaggcaggtaatgatggttgtgacggttgaaatggcgctgctcggcgggctcctgtccaccgccgggccgatgggcttcgcgtcgtgctctgtgatggcgccagtaggtctagcctacggccaccaccactgccaacgaggacaaccgccgccggacctccccctctaccgcctcgcccagctggccgctgcccacgccatcaatcggtttcgaccaggaggccgccagccgaagatgggccgggatggcccagcccatggttcggccaaacctggtggttcggccgaacccatcctggcgtcgtcggatgaagggttcggcgtggacgtccaggattgcatcccaatgacgattggagggcacttcggacaattccccttccacaaccgtcataactacctctatataaggacttcaccttctcacttcactcacacacctcaagcaagagttctcccatattctcttaattttagtttagtagtatcaagctag

SEQ ID NO: 39460 - DNA, 1557 bp, Oryza sativa
  Clone ID: PAT_MRT4530_42999C.1
tcattctggcccatcggcctgcttggccggtgccagcttgacaaagcgcttccagtaccaatgctgcgcccacaccgcgcccatggactcgatcggcacccccttcgtctccggcaggaacgccgccacgaacgccgtcatcatcaccaaccatccggcgtagtaggcgaacgcgccgtacttgaagctgcacagcatctccaagaacgactgcgactgcatgaacgtgagcgccgacgagatggcgccgcccagccccagcgccgccgacctcacctccagcgggaagatctcgctggtgaccaccgacgagagcgggacccatgacacgcatagccccgccgcgtacatgcacacgaccgccaccatcgcgacggcgtacccccgcggcatcgccctcccgccgtcggtgcccagctccgcgccgaagatccacgccatggccacctggcacaggatcagcacggcgccgcccaccatgaacagggtgcgccggccgcggcggtccaccacgaccgccgcgacggcgacggaggagatgctgacgacgtcggtgatgatggacccgaggatggccttctggctcgtgaacccgacggtgtagaagaggagcggcgtgaagatgctgaccacgaccccgcccgtcatctcgtagaacaccgtgatgagcacggccatcaccaggtgcggccggtactcgcgccggaggagccgccgcagagcgcccgactcgtacctcctgtcctcctcggcggcgcggacgatgtccttgagctcggcgtcgacgtcggcggcggccacaccggccccgcggatgcgccgcagcgagtctcgggcctcgtcgagcctcccgcgcagcgcaaggctgttgggcgtgtccgggatggacgcggcgcccacgatgacgatgagggccgggacgatgccggcgccgagggagaggcgccaaccccatctcgccatggtagtggcgcggtagttgatcatgtcggccatcaagaaaccaaagttggcgaagaggcctatggaggacgtgaacgcgccgcgccaccgcgccggcgatatctccgccaggtacaccggcgcagccaagctgctgaagccgacggcgacgccgaggaggatgcggccgatgatgagcatgctgatgttcacggcggccaggttgaggagggtgccggcgaagaagagcacgccggcgatcagcagcgagttcctcctccccagcgtcttggttaggtggccggcgacaaggctggcgaccatggtggagaggtagaaggaggagacgaaggcgttgagcacctggctgtcgaagatgcagtacgcgtcctgcttcgcgctggacatcttccgcaggacctccgggaagaacgcctgcaggaacgattccatctgcgtcaacccacctgtaacaccgatgtcgtacccaagtaagagcccgacggcgcccgccgtgaggcagctcataacaactgtaaatgtcacctcgtcaccgccgccgttgccgccggcggctgcttcaccatcgttggcaatcgatccacctccagccat

SEQ ID NO: 39461 - DNA, 1419 bp, Oryza sativa
  Clone ID: PAT_MRT4530_4299C.1
ggacggccgtcgaggccgacggggtgagggagagggcgagggacagtcgtcaccgcaccatgtaggtgagacggggggagaggaaaggggaagcggcgccgccggaggggcaccggagggagagtggaggggaagcaacaccgccggaggggtgaggggaggggaagaggccgcgtcgggcggggggagggggaggtggcgtcaggtaggaggaggcggccggcgatagggtgggggtgggggggacggcgttcactgtggatgcgggtgaggacgtcgagatggacgcgggcgatgacggtggtcgtggaggacgaggatggtagccatggcggatgcgggcgaggacggcatgatggacatgggtgacggcggcggctgtgtaggacgaggatacaatggcgagatggacgcgggcgacggaggcggccgtggaggacgaggacggcagctgcgacaaatgtgggctagaacggagggagggatgccggcaacggtggccaccgtgaaggaagaggacagtgccatggagcatcatcgtcatcggggagcggtggttctcgtggtggcggcggcggcgatggcgatggcgatgtcggcggtgaggggggatttcgcggcggacagggcggagtgcgcggacaagctgatggcgctgtcgacgtgcctgacgttcgtgcaggacggcgcgtcggggggcgcggcggcgccgacgccggactgctgctcggggctgaaggcggtgctggcggcgagccgcaagtgcctgtgcgtgctcatcaaggaccgcgacgacccaaacctcggcctcaagatcaacgtcaccaaggcgctctccctcccccagctctgcaacgcccccgccaacatctccgactgcccaaggctgttgaacttgccaccaaactccaaggacgcgcagatcttcgaacagttcgccaagcagcaggctgccatgcagggcagccccagtgcatcccctggtgggtcaagcgcaccggccgcgggcgcgcagaagagcggtgcggccgtgttgcggtggttgggagtggacggagttggtggcggcggcgcacgcgcggtggcgctcctcctcttcctcctctcctccgccgtcgccgtcgccgcgcctctcctgctcgtattctgaatttctgatggccacagcttaaaattagcgtgtaacacacaaacgactaaaagtctctaattaagaccagtgagtggtctttgccgttggaaaatttggaattgtagtatatctcatgatcagctagctctagtagctacgcgtgttgtgtgtgtggtctcgaacgactttataatctcagtgtgatattgatttgatatagttgtaatcataaaaaggttggcaatctgaaaagagagattgatttccaaaaaaaaaaaaaaagcaag

SEQ ID NO: 39462 - DNA, 345 bp, Oryza sativa
  Clone ID: PAT_MRT4530_429C.1
atggcgcaacttgtccccgatgagatgaagcaggcgatcgaaccagagatgacgagggctacctcggccgccggttcccttgcgccgaagaccaccggaagctgctcgccgacgcgaacccgagcgccgctgcctcccatcgacctccagccgccactcaccgttgtttccaccatcgccgagcttcgccgtcgctctcctccgcatcgcagcgccgaggagaagcccgactacccttccgttgccgctgcccgtcgccggaaaaccgccgccaccgccgacccgacctcgctgcccttcggagctccccgccggtgtctcccgtcgtcgttcatcgtcgtgtaa

SEQ ID NO: 39463 - DNA, 975 bp, Oryza sativa
  Clone ID: PAT_MRT4530_42C.1
atggcgtcatcacaggagttcgaggctaatgacccacagcagctgcacgccaagcccaagaggctctaccaagtctggaagggaaacaacgtacctgctctttctttctttctttctttcttgctccagcgatctggctacagcttcttcaacttcatagcagcgagcctccctgctgctttccatgtttctcatccttggcccggccatcgtcttcagctatcagatggagtccacaatccaccgctctcaacaacggatgcatcgagctgcacagctgatagtcatcatcacaacagcagcggaccttttcttcctcttcatgacatcagccagggacccagggatagtgccaaggaacacaagagcccacctgaagtcgatgaatttcttggctcaaccacaccatcgatggagtggagctcagggagaactccgcggatgaggttccgtaggtcaaaggatgttacagtcaatggcttcacggtgaaggtgaagttttgcgagacctgcctaaggtaccgcccaccacgatcctcacattgctccatctgcaacaactgcgtcgaaaagtttgatcaccactgtccatgggtcggccaatgcattggacttaggaactaccgctacttctttctgtttgtagcgacatcgactttcctgtgcatatttgttttcatcttttcatgggtgaatgtctactatgaaaggggatacaatggcggatccatctggaaggctttgcgaaaggaagtatactcatttgtgctaatcatatatacttttatcgttgtatggtttgttggtggtctcacagtatttcatctttatctgatcagtactaatcagacaacatatgaaaacttcagataccactacaacaaggacaacccctaccgaaagagcattgcagcaaactttgtagatgtgttcttcaccaagatccctccaccccagaacaatttccgttcatgg

SEQ ID NO: 39464 - DNA, 1898 bp, Oryza sativa
  Clone ID: PAT_MRT4530_43000C.1
gcgccacggcactctcttttttttttattttaagtaaaatcatagtaaaaaaaagtatgctttatttagtgctagccgcgcaattgcgcggaccacccagttattaaaatagcatatcctacacctagtagcgctaaaggtttcgaacaaccattacgctcggccccgggctcaacgaaatcctaggtacaccaccgcatggacacgtgccgcgaaacccgattcccaacgcatcattctggcccatcggcctgcttggccggtgccagcttgacaaagcgcttccagtaccaatgctgcgcccacaccgcgcccatggactcgatcggcacccccttcgtctccggcaggaacgccgccacgaacgccgtcatcatcaccaaccatccggcgtagtaggcgaacgcgccgtacttgaagctgcacagcatctccaagaatgactgcgactgcatgaacgtgagcgccgacgagatggtgccgcccagccccagcgccgccgacctcacctccagcgggaagatctcgctggtgaccaccgacgacagcgagccccacgacacgcttagccccgccgtgtacgtgcacacgagcgccaccaccgcgacggcgtacccccgcggcatcgccctcccaccgtcagcgcccagctgcgcgccgaagatccacgccatggccacctggcacaggatcagtacggcaccgcccaccatgaagagtctacgccgcccgtggcggtcgaccacggccgcggcggcagcgacggagacgatgctgacgacgtcggtgatgatggacccgaggatggccttctggctcgtgaacccgacggtgtagaagaggagcggcgtgaagatggccaccacgatggctcccgtcatctcgaagaacaccatgattagcacggccatcaccaggtgcggccggtactcgcgacggagaagccgccgcagcgcgcccgacttgtacctccggtcctcctcggcagcgcggacgatgtccttgagctcggcgtccacatcggcggccccgcggatgcgccgcagcgagtctcgggcctcgtcgagcctcccgcgcagcgcgaggctgttgggcgtgtccgggatgaacgcggcgcccacgatgacgatgacggccgggacgatgccggcgccgagagagaggcgccaaccccacctcgccatggtagtggcgcggtagttgatcatgtcagccatcaagaaacccaagttgccgaagaggcctatggaggccgtgaacgcgccgcgccaccgcgccggcgctatctccgctaggtacaccggtgcagcctgcgaccaaagcaacaatgcaaacacatgcaatgaacgcatgaaaacttcacgtcctacaaataaataaatgtatgtatgcacgaatgtattaattggctggtagcgatcgatcaccaagctactgaagccgacggcgacgccgaggaggatgcggccgatgatgagcatgctgatgttcacggcggccaggttgaggagggtgccggcgaagaagagcacgccggcgatcagcagcgagttcctcctccccagcgtcttggttaggtggccggcgacaaggctggcgaccatggtggagaggtagaaggaggagacgaaggcgttgagcacctggctgtcgaagatgcagtacgcgtcctgcttcgcgctggacatcttccgcaggacctccgggaagaacgcctgcaggaacgattccatctgcgtcaccccgcctgtaacaccgatgtcgtacccaagcaagagcccgccggcgcccgccgtgaggcagctcatcacaactgtaaatgtcacctcgccacggccgccgccgccgccgccggcggcctcttcaccatcgttggcaattgatccacctccagacat

SEQ ID NO: 39465 - DNA, 637 bp, Oryza sativa
  Clone ID: PAT_MRT4530_43001C.1
gcccagcccaccggctcggtgccacgccttggctgaatgagctacctcctctcctacatctccaagatgctgtgcatcaagattccgtcggaggcgaggcaagccagcgaggacggcggcagcggtggcctgacggagtgctccgtctgtctctccaggatccgtgtcggcgaggcgacgaggcgtctgccctgccggcatgcgttccaccgggactgcgtcgaccggtggctcctctcatgcaggcggacgtgcccgctttgccgggtttacgtcgtcgtcgacggtaacaagccaggggtggcagcgaagcacaccggcgagccgccgctcgctgaagacatggtgatctggttctctgccatgctcgtccctggattctgacatgtatatctctgatgtctaagcgcaatgctttttatttgtttgtttcctgcctggaaaccggtttgttttttttttcttatattatgcaaattaacatgacgatttcacgcttgtagcgtttgtatgtacgcttacgctcacatcgtcagcattttttttcttttgcaagttttctattgggcgttgattacctattcaagagaactgaaaaaaaaataagtaggtatatataataaaaacggtttctttt

SEQ ID NO: 39466 - DNA, 2939 bp, Oryza sativa
  Clone ID: PAT_MRT4530_43002C.1
gggggggggacacgaaacaaccaactaaattgaacacttttaaaacaaaggttaaggtacaccatgatttattatgacggggaaaacccccaaaaaaaaaaaaaaaactttcacacaaggcaaacaaaagtaaagtttaaaagcagaactagcctcaattttaagttgtatataaagaatggggtgttttttatggtggagtacacgacacaaccaactaaattgaacactattaatacatagtttaagttacatcatgatttattatgactggcaaagacccaaaaaaaaaaaaaactctcacacaatgcaaacaatagtagagtttagatgcagtctatacctgactagaaaggattatgtagtagctgcagaaggtcgacgagcgtgacaaactgtaaccatatacgacgcatacacgacgtatattatgtatcacaaacgacgtagaaaattaacagatacggtacaccatgacttaatcaaagaaagctgattactatgctggttggacacttgctaaccgcagggcaaacttaaggctacagcgacgacatcagttaaatctaggccaacttagacgtaaatggttatcttgcgttttttctcttcccttgaaaaaaaagcattgagaagctttcaccaacatgtcatctaaacttgcaattagcttagatttattggattggaagtgctcttactgccgtatattcgcttatgctgccgtatccgctgctgtaatcgtgtcctcttttttattccatcttgtgtgctccgcacttattctttataaaagccctaccccaactatccaatagtggccattagaagggcattttgcatagtaaacaagaatattctgcttacttcttcagcagataaccatttgatctgtattatagaaaactcaaacaggatatcttcatttgatctgcgatccaccttgtctattttcttatatttgtcctgggaaatgctccgagaaacttcctgcgttgttcctctggatctacaagctatcatcttaatgttcttgtattgttcatggcagcaaatgcttggacagagtagactacacatggaagcacatgcgagctaaacaaatcaaacctctccgttgacgaaagatcattgaattccagcaagttcattgaacaagacgtggagatttcttgaacaaatggtactgaatttgcctcctcaaacagggaactttgaactcaagtatattattgacaccaataagattaggcaggctgctctttgtacacagggaatgcttctaggttggctggaatcttcagtaggatgcagaaaaaaaacccatgcaattatggtactttcagattgaatggtaatgcttcagctagtacctcaaagcagagctgacgaatggctaaacgttgaaagaaaattggtggtgcagtttcagctgtatgatataaatctggagttgtcatttgcatatgtacgacaaatacctatcactgaggcagatcatatgactatatgaacataatgagttggataatagcaccctcagctttcatctcaaaacttactgtacaacatatcatatgcacttatcttgtgtttttgctgcttcttccattcatacaccattgtataccatcaattcttccttcttcagacttcaacaagttcaatactatcattcaatatcatatgcacttatctcttgtgtttttgctgcttctttcattaaaacaccggaatacgccttcgattcttccattctccagatttcaccgtcttggtcttcttcgttgcttagctttcggatcttcgcagcttaccttgatgttgtatcttcctcttgtgctccgaatcgacacgatctcctgtttgcaaatgcaactccaagtaacatacaaagcagcagtacctccatcatgcacaaacggaagccaccgtagcagtccacttcgtcttctctgtttcagagattcttctctgcttcccttacctctgtgcccctccagccctcctgatgcaagtaacaaataccacggacagaggcagtcagctaatctcatctcaagaggccacagactcaccaaaatgtcttctacttgtggcgagcacacgcccaatctgaaggcaaggtgctccagcaaccttcttcacatcatgttttgagtggttccatttttcttgtcccaagaatttcaaacatgtcctcctcgttccacggcagcagcggatctggcgagctctagatctactgatctgatcacagcggcaggctaaaacggtcgatgtgacagcaaaaactttggaacagggaagagaaaaacccaagaaaatcagagaacagtctagttggctcctagatctaacgtcatgcgtcgctagcggcgctgatttacttaccctgcggcggcggcaagcgcccaacctgctatccctattaggtggagccatcgtggcgatcggcgggcgtcttgcccgccgaggccggcacggccatgtactgcggctgcttctcttcgtggatgaagaaggcatagaagccgccgcatgtcgtggccgttgccatcgcccacacgacgatcttgacgacaagcggcatgatttcggcgactttatagctgaacatgacggtgaggagcgtcgtgagggcccagacggcagccttgaccccgccgcgacgaggcgagtgctggtccaggccctcatagatccggaggcaggcgaatagcgcgacaaggtccaggtaggagacgccgacgaagaggatggagccggtgtcgccgttggagcggtagatcgccatgccggagttgaaggtgaggaacatgaacccgagcgccgtgagccaggaaaattcagccattctcgacggcggagttgccgatctttaccttttatgtatcgagtatgagccgaaagcctcgtgccgattcccgccgccccgg

SEQ ID NO: 39467 - DNA, 234 bp, Oryza sativa
  Clone ID: PAT_MRT4530_43003C.1
atggtgacggagtggccaattgagagccgggatgtgaggcggcggtggagaagacggcttggaggaagaagtggagaagcaaacaagcctgtcgttcgggagcacgtcattggcgagggcctccttggagttggcttacatatgggcctcacttcttctgctgctcagaagtccttcgtctccacatccatgtccctcccgaacctgcacaccagcatgtcggagctgctctag

SEQ ID NO: 39468 - DNA, 330 bp, Oryza sativa
  Clone ID: PAT_MRT4530_43004C.1
agtctaatagatggcctaagttgtctggcgtgacagtcacacacacagtttaagtaacagataacttgatctaacattacatctacagttggtcagattcccattggcacgggcataaggcatgcacgcataggacccacggcgtgtaacgtcttctttgtgggcttgaaccttgtggctgaagttcctgtgacgcttgacaatcagttgaccatatagcacgcttgcccaacacgtgaccctaactgtgttggcagcttggtcagcaaccctgagcacgcatatggggcatatggcgaattgccaacttaagtgagcccattttggggc

SEQ ID NO: 39469 - DNA, 725 bp, Oryza sativa
  Clone ID: PAT_MRT4530_43005C.1
gcacgaggccccggccggggccgtctcgacctcgcagcctagggtttgcccccctctcctccttccagaagcttctagacgctcgtggggggagcatccgccgccgcagcagccatggcgtccaccaaggtccagcgtatcatgacccagcccatcaacctcatcttccggttcctccagagcaaagcgcgcatccagatctggctgttcgagcagaaggatctccggattgagggccggatcattggctttgatgagtacatgaatttggtccttgatgatgctgaggaaatcaacgttaagaaggatactaggaaatcattgggtaggatactattgaaaggcgataacataactctgatgatgaacactgggaagtgaattttctccccaaggttggcgtttgtgactttgtgtcgattagtcccgtgatactttgtactccatctagataatcagagaatgaaatgcatgtagcatgtcatcgtcatcgtcctcaattgaggatatgtaacggctgttagcaacctatgaactctgtgaactctaggcaaggttgttgagataatgagttgctcacttgtgtgtttaagattcctgatcccgtgaatcaatcctgctcacttataacacggacaattggagcaattcttgttgtacctcgtcttcttcccgtatctatgttatagatagtcttgagcatgaatgcatgatcgtgaattact

SEQ ID NO: 39470 - DNA, 604 bp, Oryza sativa
  Clone ID: PAT_MRT4530_43006C.1
acctgtcccgcaactcactgacagacgatgacccttgcttgagggccaggaactcctccttcttcactgtcatcagacctgcaggtacatggtactgacgaaagctacctgtgaactcttcccaggtgatggcgttagggtgggcatgagtggcgaggtaagactcccaccatgactgggctgctcctctcaacagacggggaccatacaaaactttctccctgtcatcgcactgagcggtatgcaactcccgctccacagtgcgcagccagacttcagcatccatggggtcagaagaatgagcgaacgttggtggatgacctctcatgaattcagcacgtttgtctctgggcatctgaggcatctgaggctgaggtggggcctgctgctatttatcttgctgctgaatggcggccaaagtctgaccgatggcttgaactgcctgggtccgcatcagaaacatctgcctcgatcgacatcgagggcgggggcgagagatgctgctgctggggcacctccctcctgtagagcggctcgctcctgctgagcacgccttcctcctctcgtcctggttctctgacatctgcccaattgcaaccacaca

SEQ ID NO: 39471 - DNA, 381 bp, Oryza sativa
  Clone ID: PAT_MRT4530_43007C.1
atggagcggggcgggccctgcgacggcctctgtcgcttccggattcacctaggcacgagaggggactgcccgttgcccgctggggacggggcatatggatcgcctctcgcgcgcggaccacatagagcggagcctggacgagatcagggagaggagcaggagaagctcgagcaggtgttcccggagctgcggtcgccgtgtgggggagggcccaggactaggccatctgcgccggcgatagcggacgacgaggtgatcgtgcctgatccgggcctgacgaggctgttcgtcagccaacgcgagacccagattttggaagagatcgaatggcgaaatcaagcaataaggcagcggcaagcacgcgtcgtagttccattgtag

SEQ ID NO: 39472 - DNA, 2835 bp, Oryza sativa
  Clone ID: PAT_MRT4530_43008C.1
atgccctttggtgggagcgcgcgagaggggcacgcggggacactgctgcaacaccacctcatacacggcgttggcctcgccgcggccggcaagctcgtctcctcctcctccgccgccgccgccgccgccggagcaggtgggttctgggagccaaggtcggtgctcgaccaccgccacagcccgagccccagcccgcctacctcggcttccacgctgtcgtcgcctctcgccgacgtggcggccctcgccggcgccaacgccaagaacgtctccgtctccccgccgccgccgggatggggaacgggaggaggaggtggtgggggggaggaggtggtggcggcgaaggaggagtgggtgcaccagctcacgccgcttgatatggggctcggcgccggcgaagggtgggatgccgccgggaacgtgctgtccgacgcggcggcggcggcgacgtcggggatggcgccggacaacacgttcctccgctggatcattggcggcggcgaggacgcgtccgccgcgatggcaggggtcatggacccgccggtgctcgagctcgaccatggcggcggcggcggcggcgccgcgcccgccgcgttcgggccgttcgcgccgccgccggccatggaggacacgaagcccgtggtgccgttcgcggcggggcaccccccgccgaacttcctcctccaacaccaccaccaccacccgcagccgcacgcggcgttcttcggcgcccaccacccgtcgttcgacgcggcgccgccgccttccaagcggcaccacccgatggccgccgcgcctgcgccgaagctgcctccgttcccggcgggcgggttcgtccccgccctgaagccgaaggcggaggcggcgaacgacgaggccgccgctgcggtcgaacagctagccgaggcggcgaagctggccgaggccggcgacgccttcggcgcccgcgagatattggcgcggctcaattaccggctccccgccgcccccacggccgggacgccactgctccgctcagccttctacttcaaggaggctctgcgcctaacgctctcccccaccggcgacgccccagcgccatcggcgtcgacgccgtacgacgtggtcgtcaagctcggcgcctacaaggccttctcggaggtgtccccggtgctccagttcgcgcacctcacctgcgtccaggcggtgctcgacgagctcggcggcgccggatgcatccacgtgctggacttcgacatcggcatgggcgagcagtgggcgtcgctgatgcaggagctcgcgcagctccgcccggccgccgcgctcaaggtgaccgcattggtgtccccggcgtcgcaccacccgctcgagctgcagctcatccacgagaacctctccggcttcgccgccgagctcggcgtcttcttccacttcaccgtcttcaacatcgacaccctggaccccgccgagctcctcgccaacgccaccgcgggcgacgccgtggccgtgcacctccccgtcggccccgcccacgccgccgcgacgccggccgtgctccgcctcgtgaagcgcctcggcgccaaggtggtggtctccgtcgaccgcggctgcgaccgctccgacctccccttcgcggcgcacctcttccactccttccactccgccgtctacctcctcgagtccatcgacgccgtgggcacggacccggacaccgcgtccaagatcgagcggtacctcatccaccccgccatcgagcagtgcgtcgtggccagccaccgcgccgcctccgccatggacaaggcgccgccgccgccgtggcgcgcggcgttcgcggcggcggggttcgcgccggtgcaggcgacgacgttcgcggagtcgcaggcggagtcgctgctgagcaagcttggctctgcttctgcttctgcttgtgcagatgcagagtgccatgtcgcaatggtgttgtactgccctcttatcaaagaaagagagagaaaacgatggaatgtacacctggttattgtattagttgaactaaacacaccccaagctgaaaagaaccaaagggaagtaggaggatatgggggagagaaaaataaaatcctgtcagaatataatctgctgcctctgcctgtgctggagatgcaaaggaaggggggcaatcatggtgtaaagcgtccatgctttactgaaatggcggcaaagcatcttagggtaaggacaggcacatcaagaacagcagcagcaacattggatgggtacaccactttaacctgggactcagctccagaatggccatggcaccgcatgcacaaaccggataggttgagatgggctcactggagagtcactggagagccacagtgtgcagcaggagcagtagcaataggtcaggcaagtggccacactggagtacgggacactgcaggagcaaactggcaagagacctgcatagtagttacagagatggatgttaagcttgctgataaattcagaaaaaagtggtaccacagttcaaaacttcaaaaaagaaggtgcactgttggtttaattaagcaggacttgaaagttcaaaaccagggaggggaatcagaagccagtagacacaaaggcctccagatctcattcagacaggttcagatttcattgcggaagccaaataggaaatgcaagcatagtggccagactgtaaagttgatcaatgagaattgctattacctctccactaaaagaaacaacttaaagataaaagaggtcaactacatatgctatatttatgctgaagaattgcatccactcaaagtcatgttcagaaatacacaagcaaagatatgccaaatagatgtccaaaaatcctag

SEQ ID NO: 39473 - DNA, 588 bp, Oryza sativa
  Clone ID: PAT_MRT4530_43009C.1
tactgtttgtctcattgatgcatgatgcatgcttagctccttagtgtttggttgcaagggtgggatgggttggaacgaacccacttttagaggtgtttagtttagaggtgagtgggatgggttagtcccctggagaagaatatttctctcagatccgggaccaaccgatccagccaaatgtggcggatgaactcgtcccacctacggcgggctcgagcgaagcaaacggctcgggcgatggcggcgggctcggcaatggtggcagcgggggcctcggcgatggtggatcccgtggtggggatggcggcggcggattcggcgatggggacgggtgcggcggcagatctggagacggggcctaacggcgacgcggccacaggaggcgaaggagagggagagggagccaagggaggagaggaggaggcgcttgccactggcggcggctgcggtggtggagagggaggtcacgaaggtgcgggcatggcgcggccgcctgcgagcggcggaggcgcgggagcgatgaagcgaggaggtggagaaggaggtcgcgtgacggtgggcggcgacggtgacggtggatgacgtcgt

SEQ ID NO: 39474 - DNA, 601 bp, Oryza sativa
  Clone ID: PAT_MRT4530_4300C.1
gtactgtaaaatttcttataatatcagttctgaaatgctaagacatccctcaagaggtctttctaaaaaaaaaaaaaaaaaaataaaaaaaaaaaaaaaaaaaaaaaaaaaaaaaaaaaaaaaaaaaaaaaaaaaaaaaaaaaaaaaaaagggcggccattttaaaaaaatcaaagttaactaacgggggaatgcaacataataccttttttatagggcaaccaaaataaaattaactggccgaattttaaaaacgtcgtaactggaaaaaccttggcgttaccaaactaaatcgcctagaacaaaatccccttttccccagctggcttaaaaacaaaaaggcccgaaccaaacgcccttccaaacagttccccaccctaaatggcaaatggaaccccccctgtagcggcccataaaccccggcggttgtgggggttacccccagggtaaccgttaaatttgccagcccccaagcgcccgttctttccccttttttcccttcttttttcgccacgttcacgggttttccccgtaaagttttaaatcggggcctcctttaagggttccaatttagggctttacggaaccttaaccccaaaaa

SEQ ID NO: 39475 - DNA, 339 bp, Oryza sativa
  Clone ID: PAT_MRT4530_43010C.1
atggcggcgggctcggcaatggtggcagcgggggcctcggcgatggtggatcccgtggtggggatggcggcggcggattcggcgatggggacgggtgcggcggcagatctggaggcgggggactcggtggcagcggatccgcccgcccgtccgtcgtcgcgctcctacgcccgcctacggggcctaacggcgacgcggccacaggaggcgaaggagagggagagggagccaagggaggagaggaggaggcgcttgccactggcggcggctgcggtggtggagagggagattgaccagcaagttagggaatcaaacaaggctcaaaatctgtttgattga

SEQ ID NO: 39476 - DNA, 747 bp, Oryza sativa
  Clone ID: PAT_MRT4530_43011C.1
gtctgctccgacgctctaacgccgccgcccgatctcctgccccgatgcaccgcctcatctcttctccctctctcatggcatctgcagcggctagctggtgctggtggtcaccattgcttgctcgaggaggacctgtcgtccgtcgtgtttcccgatttccttgggaacctcggaacatgaccaccatcagtcgagtaaaaggcgacgagtcatacaggcgacttccatcccaggaaaagaagcatactgcgatcactcaagaggtttcatacatcaaatacgatgtactggggcaaagtgcgaagcaggatggctgtgatgaggatgatcgaaggagtgaaacggaggaacatgttgaggaggacgaagttcttgatcctgaagaatatactgtgaacaacatacttccaaaaagtagacaccgtgatggctctatatatagggacatcatggacacaccgtggaaaagggagtttcatattgcagaccgtaatgagactcggttggaggcaatgaggttttcgaatcccacaaattgtgtcattcgcagtaatggaacttgcatgtcacatgttcattgccacatgctgcaaattttatcattggagttggctaaaattacactggatggtggttcactagagttgtatggatacatagctgtgcgggatgatctggatcccgtgcttaattatattgtcaactgtagcaaggatgatcccatcattttggagcacggttcgctca

SEQ ID NO: 39477 - DNA, 564 bp, Oryza sativa
  Clone ID: PAT_MRT4530_43012C.1
tctcaacattcccaatgatccactgtccaaagctaccgttttggcacttctcaagtgcatcagtatctacctggcatctacagctgcactacccaagggctactgcgagaacatcgccagcaaggagtggttgaagacaaccattggatacagatgtcctgatgagtgtatcctttttgatccaaagtatactcgcatctgtaaggaagatggtcctttcatcgatgaagcattctatggttcagagataacctcattcaaagatgtactcaggaaaattggagttatagtggatattaaatgtgggcatgatcttgttgctcggcatctaaggaaccacaaagacagtgctactatttccaggatatacatgtacctgaaggattgcaattgggagcctgaaaataaaactagcaactgggtttggttaccaaatggaagtggtagtggagaatgggtgagcgcaccgagttgtgttcttcatgacagggacaatcttttcacgtcgcacctgcatgttttggacaaatattatgacaataaattgcttgactacttttcagt

SEQ ID NO: 39478 - DNA, 503 bp, Oryza sativa
  Clone ID: PAT_MRT4530_43013C.1
ctggggttttttttttttgttttgttttttttgaagtatataccgagcttaattgatggtgggctagatagaccaatgtactcagactgtacaaaatcaggcgggagaaaactatgtagatgaaggcctatcacctatacgcttgcgcacgaagcttagtcggggaggacctcaaaagcgcccggaaataaacgtcgggaacagcacgccgaccagggagacggaaggcgttatctagatgctgacgtatttcacaaagtaaccattgaaagggaactatgggacttcccgaaacgcaaaccggacacggtgttggggaaaaaaagggatcatgaagaggacaagaacgatttccaaacaacacacacacaaccatagagttctaaacagcgtacacatataggtcgacaaaaaagcgtctggaaggacacagggaaacctaattgtaccacggggtgattaccacaaaatagccgcaagaacagaatgggttgcttgctcac

SEQ ID NO: 39479 - DNA, 516 bp, Oryza sativa
  Clone ID: PAT_MRT4530_43014C.1
gtatattcatcaccgaagagtacacagacccatcagcactgcaagtcaacatgtaaaatgccaaagaaaaagccgcccttgctatgtccggccggtgggaggagagacacgtcagtgcaaggctaaggcccaagccacaggcaaggctggctggccggtcgtcgaatccatcgatcgatcgccatgttgccatgtgcttttccaccgttgctgtgccgcggcactcaccggcagccgcaaatatactacagagactctgcttgcttaattggagtgggtgcaagccaacgacaagcttattacgagctttgctcgcacatagattactccatcccgcttacagcatgacgggtttcggtgccttcctccatctttaaataactgataactttagctttactatttgaatattgactagtaattactctgaaatggttagagtaattgaataaaagtttcatgttttatgtttagaatataataccattccataaccaaaaaaaaaaaaaaaaaaaa

SEQ ID NO: 39480 - DNA, 423 bp, Oryza sativa
  Clone ID: PAT_MRT4530_43015C.1
atggtgcctgtcagaccattcaccgacaaggtaagatactgcaatggcgagtcgacatttgaaacatctggtatggacccagtaaagttgttccacccaagatttaatcttcgaagcgatgtgctgttgaacagggctggaggaatgcctccaccgagaaacaagggacgtgctgcttccgagcgaaatgggaatgttgcctgtcaaactgttaccggcaagattcagaaccgaaagattgcggagcatcccgagctctccagggatacctccagtgagcttgttgctctcgagatcaatcacctcaagctgcccaagttcaggtggaatctggccactgagctggttgtcagggaagtggatccttgcgaggagagtgaggttggtgatgcatggtggtatttggccattgaggccagatga

SEQ ID NO: 39481 - DNA, 585 bp, Oryza sativa
  Clone ID: PAT_MRT4530_43016C.1
atgccaaatggaagggtgttagtgaaatcattgactgctaaactaagcaagcgaagggaagaaaagttgcccagagatgaaggtatggtgcctgtcagaccattcaccgacaaggtaagatactgcaatggcgagtcgacatttgaaacatctggtatggacccagtaaagttgttccacccaagatttaatcttcgaagcgatgtgctgttgaacagggctggaggaatgcctccaccgagaaacaagggacgtgctgcttccgagcgaaatgggaatgttgcctgtcaaactgttaccggcaagattcagaaccgaaagattgcggagcatcccgagctctccagggatacctccagtgagcttgttgctctcgagatcaatcacctcaaggtaagtggaagacagcgtgtttgggatcgaaccactaaggctgttggaactgaggttaaggtagcccaacctgctcagctgcccaagttcaggtggaatctggccactgagctggttgtcagggaagtggatccttgcgaggagagtgaggttggtgatgcatggtggtatttggccattgaggccagatga

SEQ ID NO: 39482 - DNA, 303 bp, Oryza sativa
  Clone ID: PAT_MRT4530_43017C.1
cccacgcgtccgatttttcacagaaaggagttaaggatgggctatcttagcttgttcattttatgatgacataagttactacagtgattgatcaaccggcaactaattttatgatgacagaagagcatctcacacgtgttatttgttactacagtgatcattgaagagctgaagctttaaggaacaagtgtacatatctgagttgtaacaatctaggcgaatatagagattaagactacaactcgaatgtgcaaacatatgtatatgtatagatgattaatgcacaaaaattggtcaatccgt

SEQ ID NO: 39483 - DNA, 318 bp, Oryza sativa
  Clone ID: PAT_MRT4530_43018C.1
atggccagcgcgggggcgctgatgatggtgaccttcttcttcgacctgacctggaggagcaactccaagcactgcacgtcgaacttcccggcgaccatcacccgtctcgctggaatgtccaccgtcaccttgtcaacgccggggacggcgacagccggcgaggactccgacgtcgaggcgccgttgccgctaccgccggcacccccggctacggccgcgttctcggcggcggcatcgtccagcttctccttcacggaggagaccgacggcggtggccaccgccgaccagcagccgcgcatgtggtgtctgatcagtga

SEQ ID NO: 39484 - DNA, 463 bp, Oryza sativa
  unsure (1)..(463): unsure at all n locations
  Clone ID: PAT_MRT4530_43019C.1
ttacaccccctcgccctcaaggattctctgcgcaccgtgcctccatctgcggatctgcctctgcgcacccatccgcccgtggccgcgcatcggccccgcgccccctccactgctccgccgaccaccgtcaggtcgcgacgccgccgatgactctctcgtgccgccaaggatcacgccgccaccgtgactcctcgccatcgatgcgcgacgtgacgcgtttccatctcttcgttcgtcgtcgacgtcttcgccggcctcctcaagaatcccgcaccgccgctgtcgaccgagatgaggaaggccaagccattatcgaaatagttgcgcgcgtaggcacaccagcagaaaaaggcaccggccactccaagctcgtccggcactacgactcggaggcctnctggaacaatgtatcactattcactagcacccctccttcctcactggtttgctggtcttggtgcta

SEQ ID NO: 39485 - DNA, 4845 bp, Oryza sativa
  Clone ID: PAT_MRT4530_4301C.1
atggataaacagtggatggataagcctaggcactctagagaatattcagaagggctggacatattcctacaacatgaatttagttcagcagtaggcaacaaaatacaatgcccctgtaaaaaatgtgctggttcattctggagagatgaaagcgaagttcatgagcatttgatatgtgagggctttctacgagggtacaaaccattgatgtttcatggagaaggtagctcctttgtgaattctgctgagtatgatgaggttggggatgtggagtcaagtgaacatgatgacatctctgatttgcttcgagacttggcatgtggcttagatgataggggggaatttgaggatgagggtaattcagatgtaacaaatgaagatctgaatgctcttaaaatgctgtcagatgattatgggcaagaactgtacgcagggtgtgataaattctcaaagctgcatttcatagttaaactactacacatcaaattgcttgggggatggtctgataagagttttgatctattactaaatctacttattgaagctttccctaaagggtcagcactaccaaagaactacaatgaagctaagaaaacagtgaaatgcttacggcttggatatgttagtattcatgcatgtaaaaatgattgcatcctttattggaaggatgatgctaatgccaactcttgtccaaaatgtgaaacctcaagatggaagtcagaaaacaagagtctaaatggcaaacgcatacacaaggttcctaataaagttcttcgctattttccaataaagagaaggtttcagaggttgtttgcatgctctagaacagcagctctaacaagatggcatgatgaagagcgcacacaagatggtttggttagacatccagcagattctcctctttggaaggattttgaccataagcacccagaatttgcctctgatcctcgcaatattagatgtgcattagctaccgatgggtttaatccattcagatccatgaatatttcttatagcatttggcctgttattataattccatacaactttccaccatggatctgtatgaagcaaccaaacttcataatttctttgttaattcctggtcgatatgctcctggtagtgacatggatgtctttatggagccactagtcgatgatatgtacgatatgtttgtccatggtgttagaacttttgatgcctccaagggtgagtatttccagttgcgtgctgctatattatgcaccatttcagattatcctggtcttgggtatgtggctggttgtactacctcaggtgagggagcatgcattgagtgccatcaatttacacgctctcttcgattgaaaaatggcagcaagacttcttacatgggacaccgtaggtttctacatgcaaaccacccatttagatttgatgctgattcttttgatggtgttgttgagcttgagtcagcacctgttccactttctggaaaggaaattttgaagcagacagaagggatgcaaacatcttttgggaaggatccatctggaaagaaggtaacgaaaaagagaaagcgtaaggagggggagccaattaatatttggaaaagaaggtctatttggttcaaacttccatattggaaggacttgcttttgcgtcataatcttgatgtaatgcacattgagaaaaatgtatgtgataacataatcaatacactcttgggtactgacaagaagtcaaaagacaacttaaattcttggttagaccttcaagctctaggcataagaagtgatcttcatcctattgaagtagaagataaattttatttacctccagccccatactcaatgaattctgaagagaagaaattgttttgcaaagtgttaaatggagttaagttccctgatggttatgcctctgatatacggcgcaatgtccaggttaatgagaaaaagataatcggacttagagccatgataatcatgttatccttcaacaattgcttccacttgctgttagaaggatattaccagaaaatgtttttgatgagatgtaaggggtatgttcgcactagaagtcatcccgaaggatcaattgcggagagctatttatttgatgagagtcttacattctgttctcgttatttacatggtgttactcgttttactcggcgagttaggaatgacgaaggcctgcccatggaagttcagagtaccactcctttctttcgcaacattgggcgaggcaaacacattgactatctttcctcaactggccttcaaaacaaacgtgaaattgaccgtgtgcaccatgaaacctttcatgagtggtttagattgcatgtcactgagatgggtgatgatgaaccagaagagataaaaattttagctaaagagcccatcatggctgccaataaatataacagctacaccataaatggttttaactttcatacacagtcttatgatgagggaaggcctgttcaaagtagtggagtgtctctaatggctgagaccacatgttttgaaagaggcaataatgattgccgcgtagtaggaaacaagatctattatggtattataaaagaaattattgagttgaattatagcaacagaggtaatatagtgctcttcaagtgtgattgggttgataatcgcatacaggacaagtgggtaaagactgatcagtttgggataactactgtgaatttcaagcatttattcaataccggtgacaatatatcagatgagcctttcattttagcatctcaagctattcaggtttactatgttcaagatcctgttgatactgaatggtttgctgttaggcaatcaaaaccacgtgacttatataatatgagtgaaactgaaaaagatgatttggggaatgacactgaagtatccatcattttgcctgatgtgcatcccaattcaactatgaatatctctgttgaagaaactgtttttgttaggacagacatagatggaataattgttgaagcaaacaaacctaagacgaaaaacaatggaacaggcaagaggaaggtaactgatggtagaaacatggtgccatgtggagatcataacttgcggtctaggtcaagaaataacctagaggaaaatgtagatgaaaatgttggcgatgatcctgaataccaaccagaagaagatgccatggatgacaatgaagtagatgtagaagaaattcttgaacttgaaaaagttcagcagaaaaagaaggaaggaaggggtatcactcaaaagctcaacataatttcaagggtgggtgaagctaaaatcaaaattactctcaacgaatttggtcagccggtggggcttgattctgaggaatttgccactactgttgggacatttgtgagaaagaaaatacctgttgcatgtggtgattggagagatgttgacgtcaaagacaagctgaaagtatgggaagatgtacagaaacattatgagatcaatgaatatggtttacattttgtgttggagacatcacatatgatatggaaggattataaggctgatttgaagaagaaacattttgatgcaaatctgactgatgaggaacttatggacagacgtgacttaagagtcaacgaggcacaatggaagtggcttattaaccattggagatctccagaagctgtggcccgctccataagaggcaaggcaaatcgcggaatgttgcgcatgttacatacagctggtagcaagagccacgctcgtgttggccatgacatgggtgtgaaaactgggcgtcctcctagaagggatgaagtctttgttgaaacgcacaaacgaaaaaatggagaaattattccagaggctgcagaaacagttgaaatgctaaaagaggctgcagaagttaacccagagttgaagaacaaaacaatccaggagggcgatttgtattcacgtgtttgtggaactaaggaaccaagaggccgtgttcgtgttttaggaaagggaccaactcctcaggatgtgggcacaccaggaacacgtagcagaatgccaacaagacttcagctagaaatagaatctcatcgacagaccaaacaagaagttgtatgtctgaataaacgcatggacgacatgcaacaacgttttaacataatggagcatatggttatgtctcaaggtgtgcagaatatagaaacaagttcccatcatgcttctaattctcgacatgctgaggttggtaaagatgttatcttatatgctgtcttgagatctgacacccctgtggctaaagcaacaattgtatcaattgatccaagttccttggtgggaggtcaacctctaggtgttgaattctatgaagttgttgtcaatgtcgtgcttaaaagagatgcattgcttcctcgtccatatgatgatatgcaaactatggctgatgctcagtacacatccattgcatggccaaacaataggttgaatgttagcaagaggtctgctatgtccaaaagtgctaactccaaaagtgcagtaaacactgcttgtcccttgatcgtttcaacaactgatgttagaagcatgggatatcccaaggcaaccgcctatgcgcatcgtgttattatgagcggccacttaagccagccacctgggtaggcttttggagtaataacttgtagttgacatgcacctgtgacagcaaactgatgttagaagcatgtgaacctttggagtaatgactggtagttgacatgaacctatgacagggcagcaatatacatgtttatgtaatcttcgggggtaatgtctggaatttggtgtcaacttccactcgtttgccagcttgcaattatcagtaatttgctgttcgaccgcagcgacagtataaat

SEQ ID NO: 39486 - DNA, 936 bp, Oryza sativa
  Clone ID: PAT_MRT4530_43020C.1
atggcgcctgcgactgtgatcctcgagatggaagtgcactgtaatggctgcgcgaggaagatcgagaagacgatcaagaaaatttcaggggtggcgctggcgacggcgagcctcgggtcgccggggacggtggtggtgcacggcaccgccgacgcggcggcgatccaggcgcggctcaaggccaagattaagagggacgtcgccatcgtcagcatcaccgccggcgccgtcgagccacctcaacaagccccgccggcggctgctccgcctcagcaggcggcgccgccggctgctccgccgcatcagtacggcggcgactaccggcagcacggcagcgggaacagctttcggtacccgccgtcctacttcagcgatgagaaccccagtggctgctccatccacaaaactgactcattgtacggcaagaacaggactgcgatcaacgtgcggcccatcatcgcaggtcaggtcaggctgctcgcaggccacctctcgccttctctagtcgtcgacgtgcggtgcaaccgtgcaattcccaaaaaagaaaacgtccacaccacatgcgcggctgctggtcggcggtggccaccgccgtcggtctcctccgtgaaggagaagctggacgatgccgccgccgagaacgcggccgtagccgggggtgccggcggtagcggcaacggcgcctcgacgtcggagtcctcgccggctgtcgccgtcctgcagattgatatggattgctggggacacagcaagatggtcaggaagcttgtgatggactaccccggcgttgacaaggtgacggtggacattccagcgagacgggtgatggtcgccgggaagttcgacgtgcagtgcttggagttgctcctccaggtcaggtcgaagaagaaggtcaccatcatcagcgcccccgcgctggccattgccggccggtga

SEQ ID NO: 39487 - DNA, 1923 bp, Oryza sativa
  Clone ID: PAT_MRT4530_43021C.1
cgcccccgccgcggccgcgccagggcggagcaaggagggagggagccacctgatccacaggagcgccgcggccaagccgcccccgatgtgtggctcgcccggcgccccccgatttcctcgcccccacctcggtcctcgacgcgacaacgaccagtagcaccgccgcttctccgccgctcgctccgactccgagccttaaacccttctgccccccacttccgcgacctccggaactccaccagcagcagtcacgcacgtctctctctctcgccccgcgtcctccacatggcggcgtccaccacctgccctgctcgctccatggcgtccgtctcccgagccctccgcccgcggccgcacgccgctatcgcctccgccgccgtccgcacggctgctcgtctcgggggcggattggggatcgtttgttcgatgccaagctatggtaggaaggagaaggaagaatggggattgaccattgcgtccgcaccggcgaccactgctgctccggctctgagaagctgtcaactattgtgcaaggctgaagctaacatatccagtaatctgccagagagcattcctagtgaagcaaaccagtacgagaaaatagttgagctgcttaccactcttttccctgtctgggtcatattaggtaccattattggcatctacaagccatcgatggttacctggttggagactgatcttttcactgtgggcctaggattcctaatgctatcaatgggactaacattgaccttcgaagatttcaggagatgcatgaggaatccatggactgtgggtgtgggatttcttgcgcagtatttgatcaaacctatgctgggatttgctattgccatgaccttgaagttatctgctcctcttgcaactggtcttattttagtgtcatgttgccctggtggacaagcatcaaatgttgctacttatatatccaaaggaaatgtcgcactttcagttcttatgacaacttgttcgactattggtgctatagtgatgacaccactccttactaaactcctagctggtcaactggttcctgtcgatgctgcaggattggccatcagtacttttcaggttgttttactgccaactattgtcggagtcttggcgcatgagtattttcctaagtttactgagcgcattatatccataacaccattgattggggttctcctcaccactttgctttgtgctagtcctatcggacaagtctcagaggtgttgaaagctcaaggtggtcaacttataattcccgttgctctgctgcatgttgctgcctttgcacttgggtattggttatcaaaagtttcctcttttggggaatcaacttctaggactatctctattgaatgcgggatgcagagttctgcacttggatttttacttgcccaaaagcacttcacgaatccactcgtagctgttccatctgctgtcagtgttgtatgcatggcgcttggagggagtgctcttgcagttttttggaggaacagagggcttccagcaaatgacaaagacgatttcaaggaatgaaacaccaacaccctccagtttctagtcattacctagtgttgttttttagttcagtggagttatcacagcatttttcttgttacccatattttagcaagttgattatcagtaggacttgcctacttggtaggtctgttgtattgcactcttatcttccaaataagctgcaggtgcttctctgcaaagcactcaatttatagtccgttgccaagtgaatgcattgtaatattatgcgcggtgagtaaatagatttccaagaattgctattccaatctattgaaaggtcaataagctttgtatgtaaaaaaaaaaaaaacaagcgcgtggggccgctccggggtctgcagtgctccgcaccatcaaaaaaaaaaaaaaaaa

SEQ ID NO: 39488 - DNA, 606 bp, Oryza sativa
  Clone ID: PAT_MRT4530_43022C.1
atggtcagaggaaaggtgcaaatgcgacgaatagagaaccctgtccacagacaggtaaccttctgtaagcgccgtggggggctcctcaagaaggccagggaactatcagtgctttgtgatgctgatgtaggtgttatcatattctcctctcagggaaaactccatgaattagctactaatggaaatatgcataacttggttgaaaggtaccagagcaatgtagcaggtggtcaaatggaaccaggagctctacaaagacaggtagcagaacaagggattttcttgttaagggaagaaatagatctactacagaggggtcttaggtctacatatggagggggagcaggggaaatgacactagataaattgcatgcactagagaaaggtcttgaactatggatttaccaaatacgcacaacaaagatgcagatgatgcaacaagagattcaatttcttagaaacaaggaaggcatactaaaagaagcaaatgaaatgcttcaagagaaggtgaaagaacagcaaaagctatacatgtctttgttggatctccatagtcaacaaccaacacaaccaatgacctacggaaatcgcttcttctcaatctag

SEQ ID NO: 39489 - DNA, 2814 bp, Oryza sativa
  Clone ID: PAT_MRT4530_43023C.1
atggaggatgccctagatctgatgggtcccaagactaaagtctcgtttcccaaacgtgctctgcgcacggtgggcttgatggatccccgacctcagcacatcctcctgatccaggagttagatgaaaggctgaaaatactgctggagctatgggatcagttcagagatcaaagcggagaggatacaccggcgacgacgaagccggacgaaactgccggtcccagagttcccttgggctgcaggcttgccccagtgggcatccagcaccacaaggatgatcttattgacctgcttcagcatgtcgatggccaaccgaagcagctgagggtgatctccatcgtggggttccgcggcgtcgggaagaccaccctcgctaatgaagtgtactgccacgacgacggttccgatggcgagccgttcgactgcaaggccttcgtgcgggtggcgtggtcggcgccactagcagcggagagcaaagacgatgcagccagactcctcaaggaaactgtctatcaacttcattgtgcgtcggccgatatcaacgacaacaccgatatcatgacattgcgcgaaactatctgcaaattcctcgaggacaagaggtatctgattgtgattgatgatgtgcggaaagacgaagtctgggcggagatcgaaggcgccttccccaaggagagcagcagccgaataatcgtgacgacgagcgtgcaatccgtggccaagaagtgcagcttgggcggtttcatgtacaggctggaaggactcaacgaggtcgactccgataaactgctctggcagctggtcggctgcgatcgaaacgagcttcctcaggacgtgcagtcccactcggttgacatcgtgcgaaagtgcgacggtttgccgcttgcgctcactggcgtggcggagtacgtgcggctcaagctggaggatctgagacggggggagctgagatgcagcgccatcgttcgtgacctgggaaacaacctcgcaggccggctgcataacgcggccttcaaggcggcgcacgcgacgctgaaggagtgctacgaaggtctgtacagccacgacctcaagacgtgcctgctgtcggtgagcatgttccccaagaactacagcatcaggaggaagagcttggtgcggcggtggatggcggaacagctggtccccgtccccttcgacggccaggaacacgcgagcacggttgccgataagaatttcgagaagctggtggaccggatcatgattcagcgtgcggacgacgaggaggacccagcgccagcagtggtgccgggggcagtcaagaacaagtgccgggtccaaggtgtcctgctcgatttccttcacaacaagtcggtctccagcaagttcgccaggctaatccagaacggggaacacctgcagaccaccagcggcgacaataacctcggcccccgccggctagccatcgtctatgatcctaaggctaacagggccggcgggggcaacagcaacaaggctaagctggcggagatggtggaaggcttagacctgtcccacgtcaggtcgcttactgccgcggggaccgagctgtcggacttcaagttgaaacgctgcaaggtgctgcgcgtcctggacctggacgggtgcaccggcatcaccggcggcgtgctccgcagaatctgcaagctcaaggtcctcaggtacctcagcctcaggggcaccaccatcgatgcctgcggtctccccgcggagatagcggagatgcgcttccttgagacgctggacgtccgggacatcgtgatcgtggtgcggggctccaagtcaaaggcggaggaggaccacgtggccaccatcaccctgccttgcaacgtcctctgtctgccttacctcaagtacctttttggcgccttcgagctgccacgcgacatcgcaggcccagctcgcggtggcctagccttgtggccgaaagctgctagagcgagtggtggcgctgctgcccaggcctgcaagctacacactctcgccggcatcttcattggtgggggcgatagagaggggcaccagcgcctgcagaacttgttcggtctcatgcaccaagaccggttgaagaagattaagatatggtggaacaagaagggcgtcaagggatccaaacccaagccaaccaccgctcacactgaccttctggtcaagtttctcgagaaccgatgcttcaccctcgaatctctgtcccttgatttcggcgacgaatccctcgacttcctggatttcgcccccgtgaatgcccatcttccgtgcaagatcgagtccgtcaagctacgcggcaagctgagcaaactgccagccttcatcaccgcaaatgaacatacgatgctagaccacgctctctccaagctatacctctcatacacgggcttgagctgcgaagccctattgctcctgcagtgccttccaaatctcaagtacctgaagctcatcgaagacaacagcaacttcacggacggcacactcacgctcaacgacgcacgcgggttccggagccttcggggtctccacgtgcaggcccccaagcttcccaaggtgataatcgtcgtcagcggcaaagacaaaaccgtcgccatgaaacacctcaccaccctccagctcctctgcaaagacatcagcggattccaggctgctcacatcgattacttccatcggctggagcaagtggtgctccttaaatcatccctcgacatcaacgagaagacggccatggaatgggaggaggcgagaaagaagcacatgaacaggcctagaattgatactatagagtgtagaggtcaagatcagtga

SEQ ID NO: 39490 - DNA, 1514 bp, Oryza sativa
  Clone ID: PAT_MRT4530_43024C.1
gctctcaacgagcgcacaaggacaaataccccatccctgtcgtcgacgagctcctagacgaactacacggcgccaccatcttctccaagctcgacttgcggtccggctaccaccaggtccgaatgcactccgatgatgtccacaagacggcctttctcacacatgatgggctctacgagtttctcgtcatgccgttcggcctgacgaacgcgccggcaacgtttcaatcactcatgaacgatgtgctctggccgttcctccgccgtttcgtcctcgtcttcttcgacgacatcctcatctacagcccgtcttggacgtcgcatctacagcacctgcgcaccatcttcaccgcgctccgagcggcccgactcttcgtcaagcgcgccaagtgttcgttcggggacgccagcatcgcatacctggggcatatcgtgtcgctccatggcgtcgccatggacgcgtccaagattcaggccgttgtcgagtggccgcgcctgcgatcgcccaaggatcttcgtggcttcctcggcctggcagggtactaccgcaaattcatcccggacttcttcacagttgcatgcctgcggcgccactcacacagctcctccgcaaggatcgattcacctggtcgccgccggccgacgacgcgttccagcggctcaagctcgccctcaccaccgtgcccgtcctcgcactccaagacttcagatcggcgttcacggtctagtgcgacgcatcgggcatggggttcgaggccgtgcttctccaaggggctgggccgatcgcctacttcagccgaccagtcgccacacgtcatcaagctcttgccgcctatgaacggagaactcctcgctctcacgacgccggtgttcgacctactccatgacctgcgcacggcgacgtcgtccgacccggtgttgctagctctccgtgacgagatcgccgccggtacacgtggcgcaccgtggacggtcactgatggcttcgtcacctacaagcggcgcatctacgtcccaccgggctcgccatggctctcgacgatcgtggcggccgcccacgaggaagggcacgaggggatccagaagacgctgcaccgcctccgccgcgacttccacacgcccaacgaccgccacctcgtcagcgacttcgttcagggctgcatcacatgccagcgcaacaagacggagcacctgcatccagcgggattactgcgtcctctcccgattctgatggccgtctggtccgatgtcgccatggatttcgtcgaggggttgccgcgcgttgccggcaagaccgtcatcttgacggtcgtggatcgcttctccaaatatgcccacttcatcgccctcgcacacccctacacggcggagacggtggcacgcgcgttcttcgcagacatcgttcggctacatggtgttcccgtgtcaattgtctctgatcgggatccagtgttcacttcggcgttctggacggctctcctcctggcgaccggcaccaagcttgcatgcctgcag

SEQ ID NO: 39491 - DNA, 222 bp, Oryza sativa
  Clone ID: PAT_MRT4530_43025C.1
atgcccttcttctctgcctccgacagttgcatgcgcttcagggattcctgcactgcctccatgatcaacgtgaaaaaacaccctccccggctagcaagattggttcggctccgaaacggagaatatgaacatggacacaagcgcaggatgggatgtggactcgagatccaaaccgagacgatcgatcagatcaggcacccgaagacagagaaagggaactga

SEQ ID NO: 39492 - DNA, 1509 bp, Oryza sativa
  Clone ID: PAT_MRT4530_43026C.1
atgtcagatgaactcggaaaactagtttcccgaactttgttggcaagaagcaagaatgggaaactaggcaaaaaagatacgagcattgttgctgctcaatttggtttaggaattcagtcagttcaacgtttatggaagcgaggtaaaatacaacttgcaaactctattcctgttgtggtttctagtctaaagaagggtagagttggtcgtaagaaaatccctgttgatttagaagcattgcgcagcattcctctaaaagagagaacgaccatagaggatgtgtctgccaaacttaacatgagcaaatcaaagattcaaaggtatttgagaaaaggtttccttaggcgccactctagtagcatcaaaccatatctcactgaagctaataaaaagtctaggttgaagtggtgtgttgacatgattaagagggatttgcatggtggtccaaggtttaaggatttttttgactttgtgctcattgatgaaaaatggttctacctctctcaaaaatctgaaaaatattatttgctacctgaacaagatgatccccatcggacttgtaagaacaagaattacatccctaggctcatgttcttgtgtgtttgtgctcggccaaggtttagggatgggaattgcatttttgatggtaggattagttgttttccacttgttacttatcaaccggctatgagaggcaatgtgagaaccggccgtgtccgtggagacttggttttgaagcccataacttcgatcaccagagaagtgattagagatttcatgatcaacaaagtcttgcccgctattcgagccaaatggccaaaagaagatgtgggcaaaccaatcttcattcaacaggataatgcaccttcccatctaaacttggatgattcggatttctgtgagcatgctaagcaagaaggatttgatattcgcctaatttgccaaacaccaaattctccggatttcaacattcttgacttggatttttttcgagctattcaagcaattcaatacaataagaatgcaaaaacaatagaagctctagttccaacagtggaagaggcattcatggagtattcggcacacaaagcaaaccgaatgtttgtaacactacaaagtgttttgatggaagctatgaagatgaagccaaggctactctccgattccggtgcgagctcctgcaactccggtgcaaaggagtccggcacgagctctgactccggcgcttccacggaatctggcgcgagctcctgcaaatctggcgtgaaggagtccagcacgagctccgactccggcgcgtccatggagtccggcgcgagctcctgcaactccagcgtgaaggagtctggcacgagctccgactctggcgcgtccatggagtccggcgcgagctcctcctctgcgacggtgtttctggggcagcggtgtttctgggcggtggcgtttgtggtgaataagaaggatgagcgagggaaaagcgcgtggtggaaccgaagagtgcgaagttaa

SEQ ID NO: 39493 - DNA, 448 bp, Oryza sativa
  Clone ID: PAT_MRT4530_43027C.1
agctggcacgcgtgcgtgtgccggtacgctatacagcggtcgacctacgcgttcggttgagcatgaaggatgccgatacatttcattcagggaccaatgcaaactacatggtgagccacctagcggggaagaacctagtagtatgagccatgccagacgatgagaccgttaatgctgaccgtatatctagggagcaagcacgaaacctaaagaataatacgggagaagagctgggtgcctacactcctagagatggacaacagatctactcaggcattttaaatgaggctgagaacgaggtcttagagtgatgtactagtgaaatacgatacgtgcatcagaaaagaaatgccacatggatgtgaaacttggaggggggtttgccatgaggttatgatggactaataaagagctgcatctgcattgttcatgctaaagcaagacacgt

SEQ ID NO: 39494 - DNA, 941 bp, Oryza sativa
  Clone ID: PAT_MRT4530_43028C.1
atggcttctggtgaaaacaatgttgaagaggagctgagaaagacccgtaagcctctgggaaatagagaagcagtgcgcaagtaccgagagaagaagaaagcgcatgcagctttcttggaggaggaagtcaagaaacttcgcaccacaaatcagcagctcttgaggagattgcaggggcatatatcactcgaggctgaggtggtgaggttaagagcccttttgtttgatatccgaggcaagattgatgcagagattggtactttcccctttcagaagcagtgcagttttggttctgttacttgtacagaccattctccgtgctttaacactagcactgaggtagcagtccgggaagagagctctagaccaacaattgtggattgcgggattgatggaactggcattatttcgcacgagcttgatattcccaaaatggtgaattcagtggatgtcattccaagctttgtgaattctgcctcattgactgaatgaaactgatcaagttcctcataagttctccatgctagctccggttgcttgatgttgcgaccttgtgggtaatagctttccgttgttatagcctgctcgaataaaatggtggctatgatacgagtaaaagtctaaaattagtctaccatgcagatgttactgactgtaagtgttgggtacttatgatttattatgaagtgtgatatgtgctgtactgtatgatagtattagaagaggccatagtcagtatgccaaatgtggtttacgttctgcagaatactgcaagcgtcaagacgagctgaactttattcctgatgttggtttctcttgctagaactattttcgccagatactaatactaatatatcttttcaggtagctgttataatgagaccagagatgtatgtacatgccattttttttgctcgctggacaaaaaaaaaaaaaaaaaa

SEQ ID NO: 39495 - DNA, 1374 bp, Oryza sativa
  Clone ID: PAT_MRT4530_43029C.1
atgacaccaactcttctagatattaccatgctcactggcttggatgtgacttcatcggctaatcccataagcttgaataccaaaaacacctttgaattcaagaccaagagcattgggggctggacaggctatattggagcatatatgtgtaaagggtctgtctcttcccgagaacatgtggccttcctgctgatgtggctagagaaatttctcttctgtggatcaagctgcggccccacaaccaattggcgattcctagctgaagcccttgaaaccaaaaaacaaatccccttgggcaagatccttcttggctatctttatcaaatgctgagcaatgcattggataaaatagttgtcggctcagtggttggagcaggtggatcgtggtggttgctacagccttggctaaatttggtagacatgaaagctgtcaatcggccagctgtaacaaaagctgaattcccaaggttggagccgattacagataatgatggagaaaaaaaactcaccgtaggtgcatgtcttatggagagtatgcatctacaccagccgattctggatccaagttatcggctgagctgctcaaggactggttctgcagcttttatgatggcttatggaaagatgcaagagtctgcctccatgtacatgacatatctctttccatatgtcattcctcaaaaaaagaagactgccgtgaaaaagaaatcggccccaatgcctcctccttcttcgcctcctgggcagccagaaacaagcaatcgcactccatcggccgcaagtagtcacaatgtcgaagaggaagaaccaccagctgctcctgctatcccagtcttacccgatccattctcgtttgatatcaaggattatcttgatgaagaaacagaagaagataccaccagcaaggctctagcccctctatccgatgatgtgaagaaaatacttgaagacatatctcattggctagggtcatcgttagatagcttggtggccgattgtggttcaatccggactagattcaaggaaattcaacttctgatcccagatgatcttgccaataatattactccagccatatacctcgagctgcatcaattcaagctggaaagagccaagcaaagattagctgatcggcaggagcgtaagtatatcgaagccacaatccaagccaatcaacagttggtgcatgaagaaaaatccaagcttgatcagctgcctgagggtccaatcagttccaacattgatcggctcgaagcccgaaagattgttctcatggcacaacttcaagaatgtaatgccgagttggatctggaacataagaaactaactgatctcccgaaagctgttgaagagcagaaggctaagctgaaatag

SEQ ID NO: 39496 - DNA, 655 bp, Oryza sativa
  Clone ID: PAT_MRT4530_4302C.1
gagatctgacacccctgtggctaaagcaacaattgtatcaattgatccaagttcccttggtgggaggtcaacctctaggtgttgaattctatgaagttgttgtcaatgtcgtgcttaaaagagatgcattgcttcctcgtccatatgatgatatgcaaactatggctgatgctcagtacacatccattgcatggccaaacaataggttgaatgttagcaagaggtctgctatgtccaaaagtgctaactccaaaagtgcaggggttgtttagtctggataacaaaatgctggctgcaaagggagtattttggtcaaatggtggctgatgaaaattaccaacttagggtagtgcacttttagaaaccatgtaacttgtatgccttttgtagtaaacactgcttgtcccttgatcgtttcaacaactgatgttagaagcatgtaagcttttggagtaatgacttgtagttgacatgaacctgtgacaacaaactgatgttagaagcatgtgaacttttggagtaatgactcgtagttgacatgaacctatgacagggcagcaatatacatgttgatgtaatcttcggggctaatgtctggaatttggtgtctacttccactcttttgctagttgcaattatcagtaatttgctattg

SEQ ID NO: 39497 - DNA, 690 bp, Oryza sativa
  Clone ID: PAT_MRT4530_43030C.1
atgatgtttgctgagaaaaagaagactgccgtgaaaaagaaatcggccccaatgcctcctcctcctacgcctcctgtgcagccagaaacaagcaatcgcacaccatcggccgcaagtagtcacaatgttgaagaggaagaaccaccagctgctcctgttatcccagacttagccgatctgttctcatttgatatcaaggattatcttgatgaagaaacagaagaagataccagcagcaaggctctagcccctctgtccgatgatgtgaagaaaatacttgaagacatatctcatcggctagggtcgtcgttagatagcttggtggctgattgtggttcaatccggactagattcaaggaaattcaacttctgatcccagatgatcttgccaataatattactccagccgtatacctcgagcagcatcaattcaagctggaaagagccaagcaaagattagctgatcggcgggagcgtatggatatcgaagccacaatccaagccaatcgacagttggtgtatgaagaaaaatccaagcttgatcagctgtctgagggtctgatcagttccaacattgatcggctcgaagcccgaaagattgatctcatggcacaactgcaagaatgcaatgccgagttggatctggaacataagaaactaaccgatctcccgaaagctgttgaagagtag

SEQ ID NO: 39498 - DNA, 2734 bp, Oryza sativa
  Clone ID: PAT_MRT4530_43031C.1
gctgtgagagcccctcgcgcctcccctccccccccccgcctcctcgggcccgctctccccatgcacagtgatagtacattaaaaggagacaaatatgcagggctgatggaaaatttctccccgagaaccctgctcaatagtatcttgcgtatcactgtcttaacctccgatggctctactgcaaggcccaagcccattcagaagtactgccaaaatgtgtgtgatatctcaagcattgtgagccctctcatagaggatctatgtgagtctcctgaagagcaactcaatgaggtgttaagggagcttggcactgctattaacagagcttcagggcttattgggaactggcaacagacaaccagcaaaatatattttatatggcagattgaatcatgtaatctcagatatccagggatgttctctacagctgtgccagcttgttaactctctattaccttctttgactggccgtgcatgcacatgtattgagaaactccaagacataaattatgaaaacatgtttgatctggtaaaggagtcttcattggagctagttgagacggacacaacaagtcctgagaatctgtcgagactatctagttcattgagtttgtcaactaacctggaattttacatggaagctgtttcccttgagaatctcagagcaagggcaatgcggagtgagaaccgtgaagaaatggatctggctgacaagatgatccccctggtcaactatatgcatgaccaccttctgagggaaacacaactgcttagcatcaatggggtgcccattcctgcagatttttgctgcccgctgtccctagagctgatgtcagatcctgttattgtagcatctggtcagacatatgagcgggtttatatcaagttatggcttgatgagggttttactatctgcccgaagacacgccaaagacttggtcactccaatttaattccaaattacaccgtgaaagctttgatagctaattggtgcgaatcacacaacattaggcttcctgatcctatgaaatccttgaaattgaacttccctttggctgcgtctgctctccaggattcgagcaccacaggaagcagccctctacatcctactgtcgctgctaagggtaatattcctgggtccccggaagctgacctttatatgagaagcttgaatagagcatctcctccacacagtgtagtccatcagaattctcatgcgcatgtgaaccatgctggtcatgaagcctccattaagcaatcttcagaaaatgctaatggttctgcatcagatgtttcaaggttatctcttgcaggttctgaaacaagagagtctagtctggaagaaagaaatgctggttctatcggtcaaacttcagaacagtcaattgaggaagcatttcaagcatctaatttggacagggattcacatgaccatgtgggtagttcttcggtgaatggtagccttccaaatagcggtcaacttgatgcagaatgtgacaatgggccaagcgaaaggacaaattacagtagtgatgcatctggagaagttacagatgggccttcagcatcttctgctcctcagagggagcatctaatcccttctagattggctgatgttcgtagtagaggccaatttgttcggcgaccatctgaaaggggtttccccagaataatatcttcctcatccatggatacacggagtgatctttccgccatcgagaatcaggtccgcaagttagttgatgatttaagaagtgattctgtagatgttcaaagatcagcgacatcagatatccgccttttagctaagcacaacatggagaacaggatcatcattgcaaactgtggagctataaacttgctggttggtcttcttcattcgccagattccaaaacccaagagcatgccgtgacagcccttctgaatttgtcaatcaatgataataataagattgccattgcaaatgctgatgctgttgaccccctcatccatgtccttgagactgggaaccctgaagccaaggagaattcagcggctacattattcagtctctcggttattgaagaaaacaaagtgaggattggaagatccggtgccatcaaacctctcgtcgacctactaggaaatgggacccctcgaggaaagaaagatgcagctactgcattgtttaatttatccatattacatgagaacaaggcgcgtattgtgcaggctgacgctgtgaagtacctagttgaacttatggaccctgctgctggaatggttgacaaagctgtggctgttttggcaaaccttgctaccataccagaagggaggacagcaattggtcaagcgcgtggtattccagcccttgttgaagttgttgaactcggttcagcaagggggaaggaaaatgcggctgcagcattgcttcagctatgtacaaacagcagcagattttgcagtatagttcttcaagagggtgctgtgcctcctctagttgcattgtcacagtcaggcacgccacgggcaagagagaaggttagccatttctcatcatttcctctttcaattagaaatgcagctaagcacatcctgaacatttatgcgaaagccagacattttagtcacaatgttttgaacatgctgcttggtcttacaggcacaggctcttctcagctactttcgcagccaaaggcacgggaattcagcaaggagatgaccttctcagaattttttgtaggtatacattaa

SEQ ID NO: 39499 - DNA, 1241 bp, Oryza sativa
  Clone ID: PAT_MRT4530_43032C.1
gaccggcacgaggaaagagaccctcgagcgggctctctcgaagcaaaaaaaaaaaaaaaaccaaaaagaaaatttttggtttattttgcctccccaaccaagcacaaacacaagcctcgccgtattctctcggagcaaagcgaacgcgaaaccccacccgcggcggcgagaaatccggcgacgatgagccgcggcacgggcgccggctacgaccgccacatcaccatcttctccccggagggccgcctctaccaagtcgagtacgcgttcaaggcggtgaagtcggcgggggtgacgtcgatcggcgtccgcggcaaggactccgtctgcgtcgtcacacagaagaaagtgccggacaagttgctggaccatacgagcgtcacgcacttgttcccgatcaccaagtacatcggtctgctcgccactggcctcacagctgatgcaaggtccttagtctaccaagcaaggaatgaggcagctgaattccgtttcaaatggggctacgagatgcccgtagacgtattagcaaaatggatagcagacaaagcacaagtctacacgcagcatgcctacatgaggccccttggagtagttgctatggtcttgggctatgacgaagagaaaaacgctcaactattcaaatgtgacccggcaggtcacttctttggacataaggcaactagcgccggtcttaaggagcaggaagcaataaattttctggagaagaaaatgaaggatgacccacagttctcctacgaggaaactgtccagattgcaatttctgcattgcaatcagttcttcaggaagatttcaaggccaccgagattgaggtcggtgttgtgaggaaagatgatcgtgttttcagagcactcacgacagaggagatcgatcagcacctaacagccataagtgagcgcgactgagctacaatgaagttggacatgttactgcttcacactgcactctagtctttcagcagtgtcattttatttcatgttcagccaagaaacattcagtgaaccatttcatgtaactccaaaaaacagtcatcagctttacttgttggatcatcctctatcgttgtggttgaatttactacgatttacttgtaaaaaaaaaaaaaaaatttgtgccttaagcccttcttcttaagtcagatgattttttaaccttttctcttatgcctctcctttggtttcacgccgattagttttctagttttggaacgagtttattaatc

SEQ ID NO: 39500 - DNA, 155 bp, Oryza sativa
  Clone ID: PAT_MRT4530_43033C.1
attttgtttgctatcttttctatagtatatcttgttataggaacttcccatcgctttcattatatatttcgatggctctgtatatcctttgtatacgaagaaagacttgtatatagaatgagcttgtattgtgggagaagtaaaaaaaaaaaaaa

SEQ ID NO: 39501 - DNA, 375 bp, Oryza sativa
  Clone ID: PAT_MRT4530_43034C.1
atggcgggcggagcagcatggacgcttcgagcagggagcaacgcagcaagtagagcggagcggcggcaggcatgctctgagcaaggagcagcaaagcaggcaagaagactggagcggcggtgggcgaagcagtgcgggtgccgacagccccaatctgaatggtgcgtggcaaatcaatgtaggaggccgccagctccccaacggcgacgcggaccgacggatcatgggagtggaggcagcggtgatggtggtggtcaagaaaccggaggggttgccggtgcggcaagcctccatcacgtcgatttggagttgagggtgtccctcttcatcctcttcgacaccattgttctcctctccaccgacctgctgctctag

SEQ ID NO: 39502 - DNA, 519 bp, Oryza sativa
  Clone ID: PAT_MRT4530_43035C.1
atgacgacggcgacgcggcacggcggcgtggggcgcgacggcgacgggacggcgacaggtgacatggcgcagcggcgcggggctcggggcgcggcagcggcacatggcgacgggcgagcggcacagcggcgtggcgacagtgacgcgcacggcgcggtaggggtgcggggcgcgaggtggcgcggcatggggcacgacgcgggggcgacggcggcagcgcgcgcggaggggaggggctcgagacgacgcgacagacgacggcgatgcgatggagtgtggcgcggcgacaggacggcgcgcggcgcggtagtggagtcgacgggacggcgatggcgcgcggcgggatggagacggcgcggcaacggcaacggcgcggcgctcgaggcgagcggtgatgtgacggcgacacgcgacgacgtgacggcgacggcggcggcacgtgcggaggagcggggctcggcgcacggcgatgggacgggcgcgcagcggggcaggggcgcggggcgcacggccagctag

SEQ ID NO: 39503 - DNA, 193 bp, Oryza sativa
  Clone ID: PAT_MRT4530_43036C.1
ggtaacctccaaaccgtgtcaacctgcgatgtttgattgaataaactacttgacgagaccttgctgtggtacaatgatgcccttgatgctgcaagttttttggatcacaacccatgccattgacacataacgttccatgggcgaaaaagtgagttgtttggttccctgggagggtatttcgaccgggagagcc

SEQ ID NO: 39504 - DNA, 726 bp, Oryza sativa
  Clone ID: PAT_MRT4530_43037C.1
atggtggagctaaggctggtggtggctggcctagctagcgatggcagcggagtagggtgggtaggtgaggtggtggtggtggtgctgatggtggtggagctggggctgggcgtttccagccacacccgcgccttcttcaccgggtcacagatcaccgccatgtaccgcccccatggccgcttctgcaccccgcgaaaccgcgtgcacctcccgccgatgaggaagaagctggaggtggatggaaaatatgatgatagtggcacgaggaagcaaggtggtagcgtcggattgtctctggggacaaagccaagcagagcggtggcggcatggccgaagcagcgacggtggctccacctctcctcctcctccgaccggtggcccaagcgggggacggcgcggcaggagctcgctggcgcgagggggggatggtgcagcgggagctcagcggggggagggcgcggcaggagctcgccggcgcgtgagggggggacggcgcggtcctctccgtcgagctgccgttgctgtggtactcagtggcacggaacggcgacgacaacgaggttaggtcatcagatccaccacctcttcttcctcctccgccgccgccccgacaagctcgccagatctagcctcgggttcgctggatctagcgagcgacaccactttgtgggcaatgcacctgctcggggtggtagcctcatcggcaaccggcgccgcctcgaatga

SEQ ID NO: 39505 - DNA, 639 bp, Oryza sativa
  Clone ID: PAT_MRT4530_43038C.1
ctgtactaattaaggtggactatgacaattcttggtccaaccattttcagatatttctcatccggcgggaggtgcacgcggtttcgcggggtgcagaagcggccatgggggcggtacatggcggtgatctgtgacccggtgaagaaggcgcgggtgtggctggaaacctatgactccgccgaggaagacacataggcctacgacgctgcgcgggcctacgatgtggcagcgcgggcgctccgggtcccaaggccaagaccaacttcactctctccctccctcacgcccagccccagctccaccaccatcagcaccaccaccaccacctcacctacccaccctactccgctgccatcgctagctaggccagccaccaccagccttagctccaccattgagtcattcggcaccaggccgcgaccggtgctccttccacggctttcgccatcgtagatccttgatggtgactgccacaatgattgcgggttgtcggcgtcgatggttgatgaggactgcacggacgccaccgcctcactgtcgtgtcagctcacgtttcagtttgacctcaacctgccgcctatcggcgccatttggctagatcgaggtggttggcgactccatatcaccgcaaggcgttta

SEQ ID NO: 39506 - DNA, 457 bp, Oryza sativa
  Clone ID: PAT_MRT4530_43039C.1
gattctaaatctagtcaaacacatttttgtgttagctgaagtattatcctctctttttttttctgttgtgcacctatttgcatgttgaaagagttggaatctttgtctggtatacattttaagcatgttatttcgatacccacaattcatactattcttccaagattggtttacatgcttatgtggaattctagtcccagaatactgtctgatggaacttggctgtatcaaacggaaatctggcattgggctgtctgcatcggttatctatcgacggaaacttacgtgcttaccaaattttaaactctgtgattgcttcttcctcaggcgctggatattccattcatgataaccaatgctctctctgctcggtctaagacccattcctaatgtgagtttttgtcctcaaacatttttttatcttagtacttgttagtgataagcagttcattttttg

SEQ ID NO: 39507 - DNA, 314 bp, Oryza sativa
  Clone ID: PAT_MRT4530_4303C.1
atgcacgttggcccgcgcgaggccttatacgttcgcaaaaacgtttgcgatcacagacgaggccaacacccccgcgggagagcgaagacaaaggtcacggcgctcccgcggggaagcaaggacaagtggatcggcgcgactcctgccgtcctacgagcgcgcggttggacgatccgcgcggcggctcgtgtcgtcactcgtcgcctgcctcgccatgtggcgggccacatgcaccggggaattggtatcatccgcggccgcgcggggccggagcgtagcgagcgcgagaggctgcgcctgcgcgcgtcaggccg

SEQ ID NO: 39508 - DNA, 360 bp, Oryza sativa
  Clone ID: PAT_MRT4530_43040C.1
atggggttggtacctacaagcatcggaggctttgattggtacctcccagtgaaggataggggtaccagcctcacacaatacaggtaccagggtctggtgcctagaaacaacccaggtatcaggtctggagcactcctgctcggagtgaggcgtgctgggttctggctggggccgctcggagtagttgcggcgtcgcggagcgtcaccggtgaggtatcgcacacctccgcgcgtgataccgagcggggttctggcttgggggagtccctacttggagtagttgctggcggtgccggcgaggtatcgagggttcggggcctcgatacggggcggaggaagaagcactcctgctcggagtag

SEQ ID NO: 39509 - DNA, 117 bp, Oryza sativa
  Clone ID: PAT_MRT4530_43041C.1
atgccgccttggcagctcgacggccccgtcgctgtctgggcatggccttggtccgccattgtcgtccatggcggattgttggcacttggaagtgctgttgagcagtgcctaagctaa

SEQ ID NO: 39510 - DNA, 715 bp, Oryza sativa
  unsure (1)..(715): unsure at all n locations
  Clone ID: PAT_MRT4530_43042C.1
ccggccggaacaacccaagcctacaaagttccctaaacaacttttaacaacaatcatctacacattttcgagtaattcctcgtcttcacaaccgacaacatgcctttcaccgctagcgacatctgcaagatcatccttgccatcatcctccctcccgtcggtgtcttcctcgagcgtggttgtggtgccgacttcttcatcaacatcctcctcaccattctgggttacattcccggtattatccacgctctatacatcatcctgaagtactaagccttaccgcacttgacttctcagggccacggcgcttccctaatggcttaatgagtaccccgctttccaaccatcgtcaataaatggtcggtcatcggttgtcctggaccatgcgacatgctgtctgacggccaagacaccaatgactgccgtgtcgaccgggtacgcgcagtcggctggaagctctgtgtttctatttgcgcaaccttggcttcgctttgatacctcacgccggtgatccgcgcttacgagtttggacgccgattttacgacgggcatggacgcaatgcgatatcagttccttatttcctttgtttacttgcggatggaggcgcatgctggattggctctcaaggcataatgcactgngctttttattaattaattcgatacccatcaatccaacgtttccttagcaaaaaaaaaaaaaaaacccgcggcc

SEQ ID NO: 39511 - DNA, 544 bp, Oryza sativa
  Clone ID: PAT_MRT4530_43043C.1
acgccattgtcaattgcggccctcgcgaagacagcacccgtatgggcagcgctggaaccgtccgtaggcaacccgttgatgtttcgcctttgcgccgtgtcaaccaggccatctccctcctgaccactggtgcccgcgaggcctctttccgcaacgtcaagtccatcgctgagtgcttggctgaggagttgatcaacgccgccaagggcagcagcaacttgtatgcgatcaagaagaaggacgagttggagcgtgtggcaaagaacaaccgttaaggaaaatttcctttttatgtggatatggggacgggcgcagaatcgggctgctgggtctgttttgctatttggcaatcggaaagttctttctcggggtttatgtctctcatcggaaagttgcatttgcgcgttcaggctttggcaaaggtggattgcggttttttctccaacggcaatctttgtcacatagggcttatctaaaaaaaaaaagaaaggctccgctcacgggagggcgaatcccgaaaaaaaaaaaaaaaaaaaaaaaaaaa

SEQ ID NO: 39512 - DNA, 1767 bp, Oryza sativa
  Clone ID: PAT_MRT4530_43044C.1
atgaactcgatgctgctcaggccgctcccgagcgcgggggcgagcggtggtcggggctcgccggggagggggcgggtggttggctcggcggtgagtttcggcgggcgcgggagatggcggcgcggggtggcggtggtggcggcgggggcgggggcggaggcgtcgtggatggaggaggcgggggtggcggtgctggaggagggggtgaggcggaacccggcggtgtcggactcgtaccggccgccggggatgccgcggccgaacgcgacggtgctggaggcgcaggcgcgggtgtgcacggggcccgagcagacgcgcccgctcggggaggagcaggccatgcgcgtcctcgacaccatcctccgctccggaatgggagaactcaaagatgagccagtatccagtgcacaactgggtgcattcttcgctggcatgacaataagagctaattcctttccagaagccacccaatggagtgagggtgagcgtcgtgccatgagcttattttggccacggcttgtcaatgttcttccccccgaggtgaaatttatagcagatccggaaggaacaatcatgggagcaaatggtttaactggacctcggtatgttggtcaaagcactgcagagatgagacttgtcagtgctttgagagaagttcttgctggtggccatttgggttatgaggaagttcagggtgtactaaaggatgttctaccagttgaattagccagtgcaaattcaactatggttaatgaagcactgctggcagcatttcttattggacagcggatgaatagggagactgatcgcgagctcaaaggatattgtctagcctttgatgatgaattaggtccaactccagttgctgatgtcaaatcattgacacactatggtgagccctatgatggaaatacacgctttttcaggagtactctgtttgttgcagctgttagagcctgctatggtgaggcttgtctcctccatggtgttgagtggatgccacccaagggaggcataacagaaggtcagatgcttaaattcatgggtgcaaacacacatttgtccacattacaggccaaaacactactggaggatgagaataccggctttgcatatttgggtctccaagaagcttgcccaccattatattcgattattgggcttagggagcatattaagaaacggccaccgctagctacctctgagaaagttcagcaatttgtgagagcgcgaggaagagaatcaatggttgctggattttatcatgtgggctatgaagatccattgcttatgctcatgaggaggagaactgttcatgctggactagttgtaaagggtgaggagggtgcgctttctatgacaaccaaagaaagatctgctcatgcatcaaaaggacttccagtgaaccattgctcagggttccggataccaaacagcacagatttctccgagactgatggcatttctagagagggcttcagtgtcattgtgaatgctcaggaacttggttttgaatccactgagactccacgaactgatagatcagtcctgaaaaacttggagttgggtttggcagcgctgagtggggagaaaggaccagcctatgacagaatagtcctaaatgctgccatggttgaccacctcttaggctgcactggagctgaggatatcaagtccgcacttgacagggcaagagaagccattgacagcggtaaagccctgagcaggctcatgaattacataaaaatctcgcacaaagtgtcctag

SEQ ID NO: 39513 - DNA, 1352 bp, Oryza sativa
  Clone ID: PAT_MRT4530_43045C.1
ctccgattcgatcgctcgccgtcgccgcggggccgctccgatcccgccgctcgccggcgatccggttcgagccgccggaagggaggcgatcatgaggaagcgggagcgggagaacccgtgcgggatctgcgggcactaccacaagtacgagctcggggaggtgtgcggggtgtgcggccaccgcccgccggcgtcggcgggggctcaggcggcggcgggggcggccgcaggcggcggcgccgaggcaggactcggcgttcccgtcggagatcctcaaggacttcctcttcctcggcagctacgacaacgcctcccgctccgagctgctcaagaccatcggcatctcccacatcctcaatactgtacccttatgccaaaacctttaccgaaattcgttcacgtaccactgccttcaagacgagaagactttgcagtttgatgatgcaatccaatttttagaacagtgcgaaagagataaatcaagtgattatatctgctacatgacaacaataaccagatcagcagcatttgtgatagccttcttgatgaagaccaaaggctggagactttcccagtgtttccaatgggtgaaagaaagaagaccacaagtgcaattggctgatgcggcgcagcggcaactgatcgaatatgaacagaagcttttcaattccactgttggcattccagctcaggcttttgttccaacagatgcgttcccttcacttggatttggtttcccaaaaccgtcaggagacatccaggtgcctatctttaaccagcaggctccagcatccatctttgagcgtgtaagcccacacaacatccctagcaatttcacatttggggctgaaagaactactgaagtgaagctcccagataacaatagctttggtgttgtcaactcatctgggggcgatagcatgatggacagctcctagtatgttttgcattgatacaaaaggaatcaactccgaatttagtcagatttctcgggatgttttagatttctgagaaggaaagttgcattttttgtacaaggatttcaagcgttttgaccattgcagttctgcgttttaacaaacatgtatgtgctttttcatcgaacttttcaagtgtaattcaagttaactgaaattacgctggaaagctcaagtaaaagctatgcatgtgtttttgttgaaacgtagaaatgtagtcgtcaagaatgctgtaacacccagaaatattactcccacggctgcaagatgaactgagaaatctggaaaatacacacatggtttgtttgtttgtatcttggcagttgttgatatactagcttgagtcccttgcttacagtgaaaaaaaaaaaaaaa

SEQ ID NO: 39514 - DNA, 120 bp, Oryza sativa
  Clone ID: PAT_MRT4530_43046C.1
atggcggcaccgacggcaggggtcgcggagcctccgatggcaaggaaaaataaggacctcacccttcatgcaccgtccgatgtccacgggttcatcgatccatccgtctacgcctcatag

SEQ ID NO: 39515 - DNA, 496 bp, Oryza sativa
  unsure (1)..(496): unsure at all n locations
  Clone ID: PAT_MRT4530_43047C.1
gaggacaaatatgatcttattttattttaaacgattgatacacggttacagtgtcagcttgcaaagacaaacatatgcacacgcatcgacacacacaacaaaccaccgataaggacagcatgaggctgaagggtctttgttgctccaagaggcatgcatgattgatcttcaggtcttaatcttttgggtgaccggctgggtatcttgttcttctggagttggaagttgcaatagatatgaaattttggagtttcatcttcttgcccccaagagaccatttgcgcaatcagtaactactaatagggcttcatttgctaaagtagtagtactagattttatacatcattatatcaacaaagtgtactagaaaattataacaagccctaaaaataagacaggtgggaggaaaaaaaaggaaaagaanagacaaactctaaatctcataggtgatcccaactttgagcagctggtccttgggaacggacagcgccttggg

SEQ ID NO: 39516 - DNA, 653 bp, Oryza sativa
  unsure (1)..(653): unsure at all n locations
  Clone ID: PAT_MRT4530_43048C.1
cccacgcgtctcatcacgccaccgcaaactactggtgcttataaggaaacggtgttgcatagactgggaaaaggaggcgaccttggcattagacagggtcttcagctcatctcttccagtagcatgaaaatgtagtgtgccacatctcacatgcagtgcaccaggcaattaataggatgcaaaattggtctatagcacatcagcatcaatcatcattctaaaaagcatacgaattgatcatcgttcggaaaagcatacgaattgatctgcaagaggagaataggagccgtcttgtaacttctattgggatttcgaagaagtcgaaggaaaaacgtagttgaggactgcatcaatcacaatatgatcgaggccatgtcagcaattttggacttcgcgtgttgtgtatgactattgtttttgccaacagtgtacaactgagctctagttaggataggtataggtacagtgagagtatgtacctagtatgaattttgatgatttttgatgtctctgtcagtgacattgtaatgagcagcgcacaacatctcggaatgaacaaatgaaaactttgaccatctcggaattgaaacaaatgaaaactttgaccaaaaaaaaaaaaaaaaaattccctttagtngaggggnaattccncc

SEQ ID NO: 39517 - DNA, 563 bp, Oryza sativa
  Clone ID: PAT_MRT4530_43049C.1
tggatttctcaactcatgttacttcccaagttcagattcagcatcgtgttcatcaaggttggctcagtgatgatggcggaaaatcagatgttgcggatgctacgactagtggcagtgctttgttgatggcagagaatacgtgcgctgaacttccaattgatggtctcgagcaacttctgatgcaaatatcggatgatcaacagacagttgaaatgctctctggtttctcagcatccgttccccaatcgcagcttcaacatgattatcatcagggttgtcttggtgttcatagggaggaggttgtgttgcagattctaccactgttagtagtgctgtggtgacagaagaatgtactgtccgtgagcttcaggatattgaagggcttctgatgcaaatagaaaatgaccaggaaaatgccgaatcactgccagatttctccacaccagttcatctccatgattgtcatcaggccgccttcggagattttcaaggaagccagagggctacattcaacattgcaaatctttctactatggtgcaggaaagcccaaattttgatctgc

SEQ ID NO: 39518 - DNA, 4032 bp, Oryza sativa
  Clone ID: PAT_MRT4530_4304C.1
atggataaacagtggatggataagcctaggcactctagagaatattcagaagggctggacatattcctacaacatgaatttagttcagcagtaggcaacaaaatacaatgcccctgtaaaaaatgtgctggttcattctggagagatgaaagcgaagttcatgagcatttgatatgtgagggctttctacgagggtacaaaccattgatgtttcatggagaaggtagctcctttgtgaattctgctgagtatgatgaggttggggatgtggagtcaagtgaacatgatgacatctttgatttgcttcgagacttggcatgtggcttagatgataggggggaatttgaggatgagggtaattcagatgtaacaaatgaagatctgaatgctcttaaaatgctgtcagatgattatgggcaagaactgtacccagggtgtgataaattctcaaagctgcatttcatagttaaactactacacatcaaattgcttgggggatggtctgataagagttttgatctattactaaatctacttattgaagctttccctaaagggtcagcactaccaaagaactacaatgaagctaagaaaacagtgaaatgcttagggcttggatatgttagtattcatgcatgtaaaaatgattgcatcctttattggaaggatgatgctaatgccaactcttgtccaaaatgtgaaacctcaagatggaagtcagaaaacaagagtctaaatggcaaacgcatacacaaggttcctaataaagttcttcgctattttccaataaagagaaggtttcagaggttgcttgcatgctctagaacagcagctctaacaagatggcatgatgaagagcgcacacaagatggtttggttagacatccagcagattctcctctttggaaggattttgaccataagcacccagaatttgcctctgatcctcgcaatattagatgtgcattagctaccgatgggtttaatccattcagatccatgaatatttcttatagcatttggcctgttattataattccatacaactttccaccatggatctgtatgaagcaaccaaacttcataatttctttgttaattcctggtcgatatgctcctggtagtgacatggatgtctttatggagccactagtcgatgatatgtacgatatgtttgtccatggtgttagaacttttgatgcctccaagggtgagtatttccagttgcgtgctgctatattatgcaccatttcagattatcctggtcttgggtatgtggctggttgtactacctcaggtgagggagcatgcattgagtgccatcaatttacacgctctcttcgattgaaaaatggcagcaagacttgttacatgggacaccgtaggtttctacatgcaaaccacccatttagatttgatgctgattcatttgatggtgttgttgagcttgagtcagcacctgttccactttctggaaaggaaattttgaagcagacagaagggatgcaaacatcttttgggaaggatccatctggaaagaaggtaacgaaaaagagaaagcgtaaggaggaggagccaattaatatttggaaaagaaggtctatttggttcaaacttccatattggaaggacttgcttttgcgtcataatcttgatgtaatgcacattgagaaaaatgtatgtgataacataatcaatacactcttgggtactgacaagaagtcaaaagacaacttaaattctcggttagaccttcaagctctaggcataagaagtgttcttcatcctattgaagtagaagataaattttatttacctccagccccatactcaatgaattctgaagagaagaaattgttttgcaaagtgttaaatggagttaagttccctgatggttatgcctctgatatacggcgcaatgtccaggttaatgagaaaaagataatcggacttaagagccatgataatcatgttatccttcaacaattgcttccacttgctgttagaaggatattaccagaaaatgttagtgcagcactgattcgtgtgagcaatttttttaagcaaatatattcgcctgttatccgtgtaagtgatatgcaaaaactagaggcagaaataactgagaccatatgtcttcttgagaaaatattcctaccctcattttttactattatgatacacttgatggtccatctacctgctcaagcaagaatagctggtccggtacattttcgcaacatgtaccctggagagaggtttttgatgagatgtaaggggtatgttcgcactagaagtcatcccgaaggatcaattgcggagagctatttatttgatgagagtcttacattctgttctcgttatttacatggtgttactcgttttactcggcgagttaggaatgacgaaggcctgcccatggaagttcagagtaccactcctttctttcgcaacattgggcgagggttagctggcaaatgttgcgtggctttagaccacaaaaattggttgcaggcacacagcaaacacattgactatctttcctcaactggccttcaaaacaaacgtgaaattgaccgtgtgcaccatgaaacctttcatgagtggtttagattgcatgtcactgagatgggtgatgatgaaccagaagagataaaaattttagctaaagagcccatcatggctgccaataaatataacagctacaccataaatggttttaactttcatacacagtcttatgatgagggaaggcctgttcaaagtagtggagtgtctctaatggctgagaccacatgttttgaaagaggcaataatgattgccgcgtagtaggaaacaagatctattatggtattataaaagaaattattgagttgaattatagcaacagaggtaatatagtgctcttcaagtgtgattgggttgataatcgcatacagcacaagtgggtaaagactgatcagtttgggataactactgtgaatttcaagcatttattcaataccggtgacaatatatcagatgagcctttcattttagcatctcaagctattcaggtttactatgttcaagatcctgttgatactgaatggtttgctgttaggcaatcaaaaccacgtgacttatataatatgagtgaaactgaaaaagatgatttggggaatgacactgaagtatccatcattttgcctgatgtgcatcccaattcaactatgaatatctctgttgaagaaactgtttttgttaggacagacatagatggaataattgttgaagcaaacaaacctaagacgaaaaacaatggaaaaggcaagaggaaggtaactgatggtagaaacatggtgccatgtggagatcataacttgcggtctaggtcaagaaataacctagaggaaaatgtagatgaaaatgttggcgatgatcctgaataccaactagaagaagatgccatggatgacaatgaagtagatgtagaagaaactcttgaacttgaaaaagttcagcagaaaaagaaggaaggaaggggtatcactcaaaagctcaacataatttcaagggtgggtgaagctaaaatcaaaattactctcaacgaatttggtcagccggtggggcttgattctgaggaatttgccactacttttgggacatttgtgagaaagaaaatacctgttgcatgtggtgattggagagatgttgacgtcaaagacaagctgaaagtatgggaagatgtacagaaacattatgagatcaatgaatatggtttacattttgtgttggagacatcacatatgatatggaaggattataaggctgatttgaagaagaaacattttgatgcaaatctgactgatgaggaacttatggacagacgtgacttaagagtcaacgaggcacaatggaagtggcttattaaccattggagatctccagaagctgtggcccgctccataagaggcaaggcaaatcgcggaatgttgcgcatgttacatacagctggtagcaagagccacgctcgtgttggccatgacatg

SEQ ID NO: 39519 - DNA, 3354 bp, Oryza sativa
  Clone ID: PAT_MRT4530_43050C.1
atggcggacattgtgcttgggctcaccaagtcggtggtggaggggacggtgatcaaggtgcagtcggcgatcttggaggagaaccagctcaaggagagggtgcagcatgacctggtgttcatcacggatgagttccagatgatgcagtccttcctcaacgtcgtcgggagggggcaagcgaacaacaatgtggtgaggacctgggtaacgcagaagtctgcttggtggcaccggttgttcccctcgttcatggcgccggtgctgccgtcctgccttgcgccggttcttcccctggatgaggcggtggctgacataaagcagatcaaggccagagtggaggatgtgagccagaggaacatgcgctacaacctcatctctgactccggctccaaacctgtcgggccagctgcaggtggctcatcagcatctgatgccctcgttgaggtgagagacatcgcaaaggagctgagtggttcaggggatcttgctgaattgctcaccaacaatgatggtgaccttcaggtcatctccatctgggaaacagaaggcgatcatggggaatcatccatcatcaggaatgtgtatgatgacccagaaataaaaagaaactttgaatgtcttgcctggataaagataatgcatccatttgatctaagtgagttcttccaggctttgcggagtcagttctacacaaactctggacaacagcgacaaggagcagaagtcaagcttttcactaagttcaggacggaagtatataaaaagaggtacctcattgtgttagaagacctgaacaccgtttcagaatgggaatccatcagatcgaatctaccaaacatgcgaaatggaagccgagttgtggtgtccacacagaaggtcgaaattgcaagcttgtgcacaggacatccgttccaagtatcacagatcaggcgattctcatattatcactgtgtctgcatgtttttcaaggagataagcgcagccaatgagctagatcgaatgaagcctaagcaggagataaagggcatcgacacggttcaggccatctggaggtgtaaaaacctactcatgtgttttggttctttgtgtgagttgagacagttggtcagcttcagaatcttactttatttatgctgtctcgggctcttcgggcaccggcttgagccagttggggatcaccctgcccaccatgtgtcctgtggtggacccgggacccccccaaacctggctgaggaacgtgtgacctacgagggcaaaggcggggccgagccccagaacaaggccacgacccaggctggcctttggcctaccatcttaagacgtgtgtcttatacgctttcatgccctaaaggaggctacgcggcatataagaagtcgccccagggatcttatcgtgacagcagaagtaaagatgaaaagactttcggctgtaataatgatatattaattgattggttattaatgaaggatggactaagacaggatgatatttcctctttctatgcaaaaacaggccttgtcttggatgacatgtttacacgccttcgggagtgtaataaacagctgttgtttttaataactgaggcaatttttcgaagtagaggtgaattcaggtttggagtgatctctgtgtgggggattgctggtgttgggaaatcaacttttgtaagaactatctacaactcacatgatcaatttgagatgtatggttgggtcaatgtatcccatccattcaatttaagggacttggcttgcagtttactcttggatttgcatcaaaacggcagatgtttcttatggttaggggaaaaggacattgatatgttcaggaccaaagacccaattcaggagtgtcataagcttctacacaagcacaaattcctcattgttattgatggcctgcagtccacagaagaatgggacttgataaaatctaccttactatctggaaattcagaaagttttatcattgtcattacaaatgaagaaagtgtcgctagacattgtgcagtagaagacaatttcgtgtttaacgtcaatggtctaaaagccgatgcggccctttatctgttcataaaagagttttgtgttttgcaacaatttggtcaaagtatcacttttttgaaatttactcttccccttcttgcttatttgagtggtatcctggtgtacggatctgcacattgcatgagtgatacagagttaaggcttatgttaggtaaggcgaatactcccgggatgactgaagaaatatctcctttactaaagaagcatggccaggaccgcctgctttacaaacagaacattgatctgactcccgagatgattgatgaagcaaagctcatcataaagaagtgtggtggacttcctaaacagacctcacggagcggcaacagaatagtctggtgcgaggtgaacagtttcttccatgagtacatcatgtcgcagcaaatggacgacaaccacatcttctcactgcaggggcgctgcagcctgaccagccaacgcacgggacggcaccttgtcatagggagcacctgggagagggacaagatcgtgttcatgagcatcgacttctcccggctacggtctctgacagtgtttgggaaatgggaatcattcttcatctctgacaatatgaagcttcttcgagtgctggatctggagaatgcatcagatgtaacaaatgacgacctcgagcgtgtcgtaagcctgcctcgtctgaagttcctttccttacgaggatgcaaaatggtcagccgcttgccagactccttgggtggcctgaggcagctgcagaccctggatatcaggcacacctctattgtcagattgccaacagtcatcgtcaagctgcataagctgcagtacattcgtggtggcaccaaagtcacattgggtgaagaaggcacatctgcaagcctagcagctgctgagacagagacacaaccaaaatgcaggtcaacacatgctttgctatcctggctgcctgatctgtgcagaggcaggcatgctggtgatccttgctctggtattgaggtgcccagggggatcgaggagctgacggcattgcacacgctgggcgtcgtcaatgtcggcgtcgcaggtggcaaggccttcctgaaagagctcaagaatctcacgcagctgcgcaagcttggggtttcaggcatcaactggaaaaacatccaggagctgtgttctgccgtctcgtgtcaccgctacctggagtcgctgtcagtgcggctggacaaggacgagcatggttccagtgatgacaggctcaaggaagatctgcggaaccggattgctgaacatccgaacaagcttgttcttaagctgaagatggagtaa

SEQ ID NO: 39520 - DNA, 596 bp, Oryza sativa
  Clone ID: PAT_MRT4530_43051C.1
ttggaaaccctgattgccttggatttgtggtgagagctcttcactaatcctctggtgctctgaccccgtcttgagggtatgggaccctcgtaaacctggaactctagctccacatgttttcagttttcctcccataaaagctggatcagtgcttgcaaatggcatccaagttcgtggtttcatttggtatcatcttcatttgatgggaaagtaatttgtgggatctaaggacagcatgccactggcttctgtggagtcacacacaagaccaggttttatgtgcggactggtggaaaggggatagcgtcatcagtgggggactgattccaactgtgtatagcttcagggattgaaatagtgtgatgatgttccctcgtttttgaccaggtttaaacatttttcatctcaattgattgaaaaatatcctgatttgatatccaggatctagtatctaactgctgttcagaattgaacagaatgttatgtatggaaagatacctgcaaaggaagctgtgccattttggtagggaacatgtgtaatcgtttggcagattcaatacatcacataatttatcaaaaaaaaaaaaaaaaaaaaa

SEQ ID NO: 39521 - DNA, 1023 bp, Oryza sativa
  Clone ID: PAT_MRT4530_43052C.1
atggcgtctcctcctccgggagcccaccgcgcggcctcctcgagtggggcgctcgcgccggcggccttccccgccgcgtcccacttcgcctcacgcgccgccgccccgttcctccggcagcaaccccaccccggcggcggcggcgactccgacggcgacaacgccgtggaggaggtcgacgagggcgacgacgacgaagacgacgaggaggaggaggccgagctggcggacggagcgccctgcagctcgcagcagcggtgcgcctccactccaggaatcgggcgggcagggatgaacagggggaatggaatgaggcaaatcgaagaggagcagcaatggcagcacagccacatctacaactgtgggaacgagcagtatgggcatgcctcgtctagagaggatgaacccagcaccatccccagggagatgagggtggagaatggatatggagttattgggagaagagagggaggtcctgcatccagctactgggacctactcagagcacacctctccgatccgttgacgtggaaagcttgtggcaaatgtggtcagccaattaccgaggactctattcgaccaaacttggctctccgccttgcagttcaggcatttaaacgcgaagaagagtcagctaaatctctaaaaagaagaagagagcgccttgagcagtgttctaaactctgttctttctctgaaatgaggacaaatgtggcaatgatgaaccaaatccaactgagatttctagagacactcgcttttgtttccgtttgccccatatttgttacaagcaaaatgaatttctcagggcaacaaaaggaccccagaacgatttgtgggacgcgtagcagttgtgacagcacagtgtctaaatggatggttagaaacatttttttcccaagttttaatatgatcatcgttgatatcaaacaccgtgcttacccggtacctgcacaccaggtatgtggtgaagaccttagacaatgcagagagtgtgaagttgcaataccgttctctggctaa

SEQ ID NO: 39522 - DNA, 478 bp, Oryza sativa
  Clone ID: PAT_MRT4530_43053C.1
tggaggtcctgcatccagctactgggacctactcagagcacacctgtccgatccgttgacaggtatactcatggatgatgcaatgattctatcgtgtgggcactcttatggaagtaatggaatgcagcatatctacagaatgaaagcttgtggcaaatgtggtcagccaattaccgaggactctattcgaccaaacttggctctccgccttgcagttcaggcatttaaacgcgaagaagagtcagctaaatctctaaaaagaagaagagagcgccttgagcaggacaaatgtggcaatgatgaaccaaatccaactgagatttctagaggtaaaggtgtccagtttccttttgctgtctttgaccgagtcataatcaagggcaacaaaaggaccccagaacgatttgtgggacgcgtagcagttgtgacagcacagtgtctaaatggatggtatgtggtgaagaccttagacaatgca

SEQ ID NO: 39523 - DNA, 1599 bp, Oryza sativa
  Clone ID: PAT_MRT4530_43054C.1
atggtgaacaaaatctcaccctgggatcaacaagagaagatggccttgagaagtaatggagcattggtgaagtcactgagcttcaaagaatgggaaggaggtgaacaaaccaaaacaaattcagtgaaccacaagaacaggccgagcctgatcaacgtcgtcgtcgacaaccggagaaattcagacattttcatggcagaatcaagccccatagtgtcttccagccccaaatgtgagcttgatgctgcagcagtgaaggttcagaaggtgtacaagagctaccggacgcggcgaaacctcgccgattgcgcggtcgtcgtcgaggagctatggtggaaagcattggactttgcatcgctgaagcacagctctatatcattcttcaatggcgaaaagcccgaaaccgcggcgtcgcggtgggcaagagcaagaacaagagcagccaaggttggaaaggggttatcgaagaacgggaaggctcagaagctggcattgcagcactggctcgaagctattgatccgaggcatcgatatggccacaatttgcatatttattatggtgtctggtccaggagtgagagtacagagccattcttttattggttggacattggggagggcaaagaagtaaatcttgacaggtgtcctaggaacaagcttcagagccagtgcgtcaagtaccttggaccaaaagagaggcaggagtatgaggttgttgtggagagtggcaggcttgtttacaaacagtctggagtttttgtccacacttcagatgattccaagtggatctttgtcctcagcacaaccaaggcattgtatgttggccagaagaagaaagggtcatttcagcactccagctttctggctggtggagcaatcacatctgctgggagattagtggtcaaagacggaatcctcaaggcaatctggccttacagtggtcactacctcccaaccgaggagaatttcagagagttcatcagctaccttcaggagaacggcgtcgaccttgccgatgtcaagagatgtcccatggacaaagacgacgagtacccattgctgacaaagcctgacgtcaccgccgcctccattgccgccaccaagaacgtcgagaaggtcgccgccgccaccgcagccgcagccgagcggctgaccgagaccgtctccgacgacacggaccacgccgccgtcgacgaagacggcagcatgagcgaaggcgaggacgaagacgccgacgtcccaacggcaaccaaagaagacgagcacaaggcgacctcctcgtcggcggcgagcaccaccgccgccgccgccgccgcagagaaccacctgccgtgcaggtggtcgacggggacggggccgaggatccggtgcgtgcgcgactacccgcaggacctgcagtcgagggcgctggagcacgtcaacctgtcgccgcgcctcgccgccgccggggtggcgccggcgacgaggaagagggacccggtgccgtcgccgcggccgagccccgggatgatactgtcgccgcggctggcctccgtgggcttccggccgccggtggtggcgctcacgctgccggacttcaagaggagcagattgcagtga

SEQ ID NO: 39524 - DNA, 261 bp, Oryza sativa
  Clone ID: PAT_MRT4530_43055C.1
atggcgaagccaaggctgctcgccctcctcctcctcctcgccctctccttctcgcacggggtggtggtggcgacggtggcgaaagcgagggacgtgcagctggtgaagctagtgcgccgctacgtgcggtggcgctcggttttccaggccggcatcgggatggtgtcgacggtggcggactactcggatcccaagaccaacaccaacccccgcggcggcgtgctccccccgaccaaccctaactcgccgccggcgcactga

SEQ ID NO: 39525 - DNA, 633 bp, Oryza sativa
  Clone ID: PAT_MRT4530_43056C.1
gtcaatgcaagcttcaggaccggtaatcaggcccaatgtttatagtatgtactatcatatagtgtagtatcatatgataaaacccacagaaaaatgtcgctgctaactctatcgcaattgtttacctaatgcatgtgcaagccaagttctggcttagactggagatgctaaggctccaacctcccaaaaggccaaagaaacgaactgcatttcagcgagtaccaaacaaatcatgcacgtacatgcgcaagccaagttcttgtcttaaactttcgaagctaatagctcgcatgatataatgtcgcttaacgatgtgaagcaaccagatgccgacactggcacgatgttgaaaataggaaccccatcaggtgtgcaggaaccaacaccaccttcttcaagctcggcgaatgcctcagaaaatacacgggacatcacatccgcagtcactgggtgctctactgaatagtagaatcttaacatcgttaggttgtcccaggaaaagccattatctatcagaatcttagcaagctggaatgcacaaaatctagccaaagctttcaaatgctcctccgagtggtatagttgttcagttgtagaacagattttcaatgcaatatcatttgtgactgaaac

SEQ ID NO: 39526 - DNA, 1461 bp, Oryza sativa
  Clone ID: PAT_MRT4530_43057C.1
atggcgcagccgcagaagcgagtctacgaagcttggaaagggaataataggttcttgtttggtgggaggttgatattcggacccgatgccaagtccctgctcgtctctgtttcgctcatcgtggtgcctgttctcgtcttctgcgtgttcgttgcgcggcatctccggcatcagttctccacctacaacgcaggatatgcgattcctgcggttgcagtactcttcatgatctatgtagtagccacatggtactgcattttgagcactcgactgaatacggctttgttgtccttcttttgtgtgcatttgcaggatcctggcattgtgcctcgcgcatcgcatccaccggaggaagagtttgcctatggcaatccattgaacgggggcacaccaggcaggctgcaatttccccgtgtaaaagaaataatggttaatgggatgcttgtgaaagtaaagtattgtgacacctgcatgatttaccggccccctcggtgttcgcactgttcaatatgcaacaattgtgtcgagcgctttgatcatcattgcccttgggttggacaatgcattggacagggcctatttggcaaggctcgaactcctaaatttaactccgttcattttgtgggagcactccagcccactccgctcctttttagggtggagctaaaactgtttggttgggttccagctctaggagagcgcaattatcgattctttttcctgtttgtttcctcctcgactcttctttgcatttatgtatttgcaatgtcggcgttatacatcaagttcctcatggaggagggctatcctacagtgtggaaggctttgaaacactctccagcatctttggtgcttatgatatactgtttcatcgccctctggtttgttggtggactcactggatttcattcatatctcatttgcactaaccagaccacatacgagaactttcgatacagatcagacaacaggcctaatgtctatgatcaaggatgtctgaataattgcttaggagtcttctgtagtaagacaaaaccttcaaaacacaaattcagagcctatgtacaagaggaagtacgagctccagtagttaactttggcaggcagatggaagaagagccagctggtggccctcgggcaaaagtagaagatgatcttgagatcggtagtgatctcctgcagatctctcagcggcgcaactatggggatgttgatcttgaaatgggaagtcaggactgcagtgagatggaaggcattcccaacgccaaacttgcgataggttctgaatcgcagattcctgcaatcggaagtgaggtacgagtgcggcactcgagctgggatcgtagaagtgggaattgggacatgtcattagatgtaattggaagaagtgcatcagatgtaattagaagaagtgcttctggccatgaggctgcacctccatttcaaacagaaactcactag

SEQ ID NO: 39527 - DNA, 3204 bp, Oryza sativa
  Clone ID: PAT_MRT4530_43058C.1
atgaggctgctggtgcaggtgagcgaggcacgcaacctgccggcgatcgacggtggcggcgggctgagcgacccgtacgcgaagctgcagctggggaggcagcgtggcaagaccagggtggccaagaggacgctgagcccgacctgggacgaggagttcgcgttccgggtggtggacctcaaggacgagctcgtggtggtggtcgtcgacgaggacaggtacttctccgacgacttcctcggccaggtcagggtgcccctctccgccgtgctcgacgccgacaaccgctcgctcgggacgcagtggtaccagctgctgcccaagagcaagaagtccaagatcaaggattacgatatgaaaaggtattatgctgctgttttgcaaattcatccagcttgtgctgttttggatggtttgcctcgtgatgatgacctcgcgtcatattctgacaaatcaactgaattacagaaaggatcttctttgccaaatattcctatagaaatacccacgtcagtatcagggggtgatgaaacagaaatcatcaaggaggatagatcaaatggtgtcccatcatttgtcaatcgtctgtatcaatttttctcagcgaaaccaaaagatgcagaagcttcagcttcagctccacctctcactacgggcgatggtaattcagatattcttgaagaaacaccatcaactagttcagaacttcctgataaccaggattatgaaactggtgtaactatgtcctttgatgaacaactaaaagcctttggatcttgccatgaagggaatgaaatacctgaaaacttgtcaggtggagttcttattgatcaagtttatgctgttgcacccagtgacttgaatggacttcttttctcaccaagttcagatttcttgcaatcactagcggagatgcaaggaactactggtcttgaaatccaacaatggagacttgaaaatgatggtgaggtcttgaagagggtagtaagctacacaaaagctcctactgcactagtcaaggctgtgaaagcaacagaggatgtgtcatatctgaaggcagatggagatatatatgcaactttagctgatgttagtactccagatgttccatttgggaattcttttagggtggaggttttaacatgcataatgccagggcctgaactacctgataatgaaaaatcctcacgtcttgtagtctcctggcgcttgaattttatccagagtacaatgatgaagggcatgatagaaaatggggctaaacaagggttgaaggataactacattcagttctctgaactcctggctcgaaatatcaggccagttgattcaaaagatgcagcagctactgataaagttttgtcttcagtacaaccagagcaagaatctgattggaaactagcattccgtatatttggaaattttactgttgtatcctcactggttgcattcatttatgttttttcacacatcatccttgcaagccccagtataattcaaggtcttgagtttcctggcctggacctaccagattctgttggtgaagtcgtggtttgtggagttcttgttctgcaaggacagcgtgtcctaaatatgattgcacgattcatccaggctaagaggcagagagaaatttttgaatttgatgccatggaagatcctccatccgttatgaaaataaatgtctacgattttgatggaccatttgatgaagttgagtctcttggtcatgctgaagtaaatttcttgaaatctaatctatccgagctttccgacatttggattcctctcaagggtaagctggctcaagcatgtcagtcaaaattgcatttgagaattatcttgaataattcaaggggtactgaagtcatgaaggactacctagacaaaatggagaaagaggttggcaaaaagattgctgtaaggtctccacacacaaactcagcattccagaagatcttttctttgccaccagaagaatttctaatcaatgattttacctgtcatctaaagcgcaaaatgctcacacagggccgcctgtttttatctccaagaattattgggttctacactaatctttttggccacaaaacaaaattcttctttctttgggaagatatcgaggacatccaagtgatgcctgcaacactatattcaatgggaagtccatctctgcttattattcttcacaagggcagaggaatggatgcaaggcatggagcaaagcaacttgataatgaaggccgactcaagtttcatttccagtcttttgtatcgttcaatgtggcacataaaacaataatggcgctctggaaggcaaggtccttgacccctgaacaaaaagtacagctggtagaagaagaatcagaaatgaaagacctccagaataatgaaagtgattctttcttaggaatagaggatgcaaaaatgtcagaagtattttcatctacaaaaccttttgatgtatcaacactcatgagcatatttgagggtggtcctttggagcatcaagtgatggagaaaattggctgtatggagtactcagtttcaccatgggagtccgtcagagctgatgcttaccagaggcaaattcattacaagttcgacaagagattggcacgccatgaaggggaagtaatgagcacccaacagaaatcccctttgcctgataaaaatggatggcttgttgaagaagtgatgacgcttgaaggtattccagttggtgaatacttcaacattttacataaaataatactgatagtttccaagtttccacctaagctgcatatgcgataccaattggagcagatctcatccaagcccaaggcatgcaatgtccaagtgtctattgggatcgcatggttaaagagctgcaagaacagaaagaagattgctcaagagttcttgaacaagaggtttggtatcttgcctatactcttcaagatagatcattcgaaactttggggattcaaaatcttgcactgtttggaattagatggtcgcgagtcagccaacaaatcaccatgccgtcttcccagccgccgaacgacccaagcgctacgtctaaccatctacctgtcgaacgcagctcatcgaaaagtccggaccaccccatccggagtgttcgattccaccgaccaagaatgccgattgcctccagcttcaatcaaccccaagcgtgcggccgcacgtctccctgggtga

SEQ ID NO: 39528 - DNA, 2073 bp, Oryza sativa
  Clone ID: PAT_MRT4530_43059C.1
atggatagatggctccgcccagcgaaacaaccggcgtggtcgcgtccagtcagctcgtctgccttggcccgcagccagcgcctgactgccggcaaggtgttcgacacaactcccctgaggaggctctgcgtgctccacaccgtttcctggatcgtttcatcgaggcaggtagcgaggttcagcaccggcgtcgacaatgccaatccaggggctcactgccggttgtctgagcttttccggccagttcgcacagagaccagttgcgttattattgggcgagcgctggagtgtgggaggtggtcagagtcggttgagctggagctggagggcctccatgtcgagctggatcctttcgtcgtcaacaaggtgctccgtggcttgttggactcggggatggcagttcggttttactggtgggcagagtcacgccctggattttatcataacaattttgccatagcgtacatcataagcttgctgtttgtagatgacaatttcgccctgctttcggagttcctgggaagagtaaggagccagggggtagcatttcatcgctctctctatcgggtacttttggctggctatgcccgagctggcaagtttgattccgtcatagaaacatttgatgagatggtcacatcaggttgtcgtgagttcggtgtcgattacaacaggttcataggtgttatgattaagaactgttgctttgatttggtcgagaagtattacaacatggcacttgcaaaaggattttgtttaactccattcacttactcaaggtggattactgcattgtgtcaatcaaacaggattgagcttgtagaggagcttctgactgacatggataaatttgggtgcttcccagatttttgggcatgtaacatatacgttcactatttgtgtggtcacaataggttatatgatgctttgcaaatggtagagaagatgaccatgaaaggaaccggcccagatgtcgtcacctacacaacagttgttagctgtttatgcgatcacaggaggttctcagaagcagttgggctctgggaagaaatggtgaggaggggacttaaacctgatgttgtagcttgtggtgcattgatatttggtttgtgcaagaatcaaaaggttgatgaggcttttgaattagcatcaaggatgctaactctggatatccaacttaatgtttcgatttataatgccctaataagtggtttctggagagctggcagcatagagaaagcctacaaaactgtgtccttcatgcagagaaatggttgtgaaccagatgttgtgacgtacaatatccttctaaaccattactgtagtataggtatgacagataaagctgaaaatttgatcagaaagatggaaatgagtggggtgaatcctgacaggtacagctataatatactgttaaaagggctatgcaaagctcatcaactggacaaagcatttgctttcgtttctgatcatatggaagttggtgggttctgcgatattgtatcctgcaacatactcatcgatgcattttgcagggcaaaaaaggtaaattctgcactgaacctattcaaggaaatgggttacaagggaattcaagctgatgctgtgacttatgggattctgattaatggtctttttggcataggatactcaaatctagccgaagagctttttgaccagatgctaaacaccaaaattgttcctaatgtaaatgtgtacaatattatgctgcataatttatgtaaggttggtcatttcaaacatgcacagaaaatattttggcagatgactcagaaagaagtatcaccagatacagttacttttaacacactaatatactggcttggaaaaagctcaagagccgttgaggcccttgacctttttaaggaaatgaggacaaaaggggtagaaccagataacttgacatttaggtatataatcagtggtcttctggatgaagggaaagctacgttggcttatgagatatgggagtatatgatggagaatggtatcattctcgatagagatgtttctgaaaggctgataagtgtgcttaagttgaagaacaactaa

SEQ ID NO: 39529 - DNA, 159 bp, Oryza sativa
  Clone ID: PAT_MRT4530_4305C.1
atgatggagcggggcgggccctgcgacggcctctatcgcttccggattcacctaggcatgacaggggactgccctcgtgcccgcggttatgggcggtcgaccagattcaccgtgattagtctcacacttaataaatcgacgcaatgcactgtagttcag

SEQ ID NO: 39530 - DNA, 2183 bp, Oryza sativa
  Clone ID: PAT_MRT4530_43060C.1
atggccgacccgacgacgccggcggacgcgcagccggagcaggcccacgccgccgagaagccccccgcggcgccgctgacgcccgaggaggcggaggcggaggcggagacggcggggtccggggatgacgaggagtacgtgagcgaccccgacgacgcgctgctcccggagatgcggcgccgggaggccagcgacgacgaggggtccgaggaggggagggcgcggatcgggtccgaccgcggcgacggcgacgacggcgacatctggcccagcagttagaagggattatggtgcacgtgacaggtttcaacatgctgatggtcctgttagacaatctccaaggagtggaggaacatcgttgaattcatcaggatttgcagcatcgacagttaatcatggtcaatcttctgttgttagaactcaaggaggaaatgggattccttcaaacaatcagtccacttcgtctcttcaccaaaatcctagggctcctacacaccagcaaagtcacacatcagtcgtgcaccagaagtcagggcaagtgcaaactcaaagtcgtggccgccgcaggagaatgtttggtgggaggaagttatgggacgctaaagatgatcaagcgtgggtgcatgacagatttgaggaaatgaatttgcatgaggagcactatgaggataagcgaatgtcaaggggtcgctttagaggccgtggtggtgggggtagaactcggggcactggtcatgggtttgccagaggtggaaagtatcgcggttataatgaagatatcaacaacaaccaccaaaaccgaccccaaaaggttgttagagggagaggacctcgacgttatgaagctgttgcaaagaacaaccgagatgttgttggattccagcggaaacaacctgcaagatcacgagagtctgctgcaacgtcaccaccattttatccctctggtgcctccaacccagatttctctgtgccagctcaaagaagggacaatatgcaagcagggggttccaataaagtctttccatcttctatgaagatggatgacaatgcaaaggtacaatctggcccagcagttagaagggattatggtgcacgtgacaggtttcaacatgctgatggtcctgttagacaatctccaaggagtggaggaacatcgttgaattcatcaggatttgcagcatcgacagttaatcatggaaaaaccaacagtcaggaagcaggaaggggttcctttatgtatggtggagcccaggttattggggctgctggggctattggtcttgcccagggcgaacaaaattttcctggcactccagctctccttccagtcatgcaatttggcagtcagcatcctggtggtgttggagttcctactgttggtatggccctccctggctatgtggctcaacagcagatgggaatgggaaataacgaaatgacatgggaatctattgctaacaagggggcttcccctcctcgaaatgatattgtcaatgaagaggttgatcagcgtcagaacaagcctaggaggcaagcacagcgtgaggctggcttcacagagcagcgatcactgcccgcttccatcgagggcttccgtatggctgcaagaggtctgaagaaggctttccgttggtttccgcattccaatgaagatcatcatcacctggaggaagacgagggaagcagcgagaggcgcggcctgctgaggagccacttggaacaggttgtgccggtcactgatcttgaagacgaaccgaacgcatcatcatcagctgtgaaagaaccaaagacagtagcactgaaggtgtctatgcactgccattgctgcgcgaggaaggttgagaagcaaattttgaagatggaaggagtggtgtccttcaaggtggagctggagaacaagaaggtgaccgtggtcggcaatgtcagccccatggaagtcctggagagcatctgcaaggtgatgaagtctgcacagattttggcggctgcctagtggctagtacttttgttttgtcaacgtgtcatacatagtacatgtttatcggacgaattccgatcacgattgtaatctttaagagaaacgattcttcaattaaaaaagatgcaaatattaggaaatgacctaatacaaaataattagaagaggtaaggtttcgaacccaaaaaaaaaaaaaaaaaaaaaa

SEQ ID NO: 39531 - DNA, 273 bp, Oryza sativa
  Clone ID: PAT_MRT4530_43061C.1
atgcatggcgatgaatcggagaccaggaatgcaagcaagctagctagacttcgatcagctcaattatattggccgtacatatatgcagacatcatcgtcgatatggtggttacattaatttgtgctgttctgcagtttgatcaagacttggttgaccccgttttaaatgtgaaattttattacaacacttttgccggccattgcctgcacaacaaggtcaaaggagaaagatgtatcaaatatttgcaagttcgtagggtatggggaattttt

SEQ ID NO: 39532 - DNA, 200 bp, Oryza sativa
  Clone ID: PAT_MRT4530_43062C.1
aataaaactgataagctgagggacgccacttgaactgatacgggtaagtgatcatttcggctgcccatctaacgtaagctgacaacagaagtgacgctcactctgaccactaaataaaataggtccttactaccaccaacaaataaatttatcccttttagccaagagtgaaccaatcacttcaacagcggccccatgct

SEQ ID NO: 39533 - DNA, 1085 bp, Oryza sativa
  Clone ID: PAT_MRT4530_43063C.1
cccacgcgtccgcccacgcgtccgcccacgcgtccgcccacgcgtccgaaggccccttgcagcggcggcaacactgaagcaaccaaaatcttacagcggcggcagccatggcgtcgttaggagctaacagccatggccgagtcctgcacacctgcacactctccccaaagccggttacagctttgagcagaagcatggcggccattcctggacaccatgtttttcagtctccacgagctcggattgcagtgcgagctagcaccgagcgtgcgacctggctgcctgggctcgatccacctcctcacctcgacggcacattacctggcgatttcggatttgatcccctgggtctcggggaggaaccggcaaacttgaaatggtatgttcaagccgaacttgtgcactgccggtttgcgatggcaggggttgctggcatccttgcgactgatttgatacgtgtatcaggaatcaacaacctgccagtgtggtttgaagcaggtgcaacaaaattcgacttcgctaacaccacggcactcttctttgtccagcttctcttgatgggatttgctgaaaccaagaggtacatggactttatcaatccaggatcacaagcagaggaaggaacattccttggtatcgaggctgcacttgcaggttcacagccaggctaccctgggggtccactgtttaatccactaggactggccaaggatatagagaatgcagatgaagcgaaactgaaagaaatcaagaatgggaggttggctatggttgctatgcttgggtttattgtgcaagcatctgtgactcatgttggaccaatcgacaatcttttgacacatctttcagacccgttcaacaaaaatatcatccacaccctctcctcttcttgaaaatatcctggaccgtcaaactttttgttcctttcttcatcttaattaatctatcaatcaacacattcacaatgttcgtggacaacataagtaactcactacgcaattgccaagtccatgtgttatgaaaatggagattcaccggatgcataactacattaattgtttatggaaaaggaaatttccttccct

SEQ ID NO: 39534 - DNA, 606 bp, Oryza sativa
  Clone ID: PAT_MRT4530_43064C.1
atggcgaatcgtgatacaacatcttcctgtgtgacattcgtaaatgcagttgcacaactcaagcttgtcgtcggggcgtgggcgtgcgcctcgaggacaccgtgctcctactcccacgtcatcattgtttccaccctggtgcccaagattgttaggctccacctccccggcatccacctcgatgacgacgcaaaggccactgcttccttgcctctagacaccaccatcaagcctcccccctcttggggttatacccggttttatgatggtgggatgctattcaaccagggacatgagttgcgggagcctctgcctttctccaagtcagcgctgtccttctccccgccgcgcgccactcgcttcctcccgtcggttgccaccctctccaaattagtggagatgaaggattgggcgccggcgatcatcgcgtcggcgctgttcgcgctgctgtgcccgggaggcatcctgcagatgccgggcaggaaccggccggtggacttcatgaacatgaagaccagcttggcgtccatcgtggtccatgccgtcatctacggcctgctgctcatgctgttccttgtcatcttggaggctcatctctacatctga

SEQ ID NO: 39535 - DNA, 1612 bp, Oryza sativa
  Clone ID: PAT_MRT4530_43065C.1
atgaggcgaggaggggcgccgcggagctcacccaccgagagccgcgccgcaagcatgctgcctctcggcggggcaagaggagagggttggattgatatgggttccaatctcaagtaccgtgctggcctcgtcctcatcgtcgccgtggtgctcatatgggtcacctccgcggaggtcacgcaggggatattcactaaatacaagcaaccctttgcaattacttacctgggggcctcccttatgatcatctatatacctctttcatttttaaaggattttatatgtaatttgttgagaaggtcttcttcaagtagtagagtttcaaaagttaccaacaaatcttctttcggtggttgtgctcctctgaagaatggtgaattccagaagatgttggaaatggaatctcaaaaaactatagtcataaactatactgatgtggatattcctgtaatagaagagacaaaacctcttatatgtggaatcactgaattcgatgacgttttgaaggagcaagaactttccactaaggagattgcaatgtatgggttgtatctttgtcccatatggtttgtgacggagtacttgtcaaatgcggcacttgcaagaactagtgttgctagtactactgtactatcttcaacgtcaggactcttcactcttttcattggtgtgctacttggccaagattctataaatgctgcaaaagttattgctgtttttattagcatggctggtgtggtaatgacaaccatggggcagacttgggcatcagatgaatcagaaatcagcaattctggtgccactcagagaactcttctaggtgacatgtttggtcttctgtcagctatgtcatatggtttattcactgtgcttctaaaaaagtttgctggagaggaaggagaaaaggttgatgtccaaaaactgtttggctacctcggacttttcagtcttgttcttctctggtggcttgtctggccattgaccgcattaggcattgaaccaaagtttacaataccccactcagccaaagtggatgaagtggtgttggcaaatggccttattggaagtgtattgtcagactacttctgttgtgctatttttgacatggagcttctggtcagggctctttctgttgtttggactactcctttggtggccaccttgggcatgtcactcacaattccactagcaatggtggctgatatgatcattcatggtcgtcgttattcagcggtctatatctttggttctgtccaggtattttctgggtttgtcattgcaaatcttgcggatcgcttttcacgttttctagggctctagtgtcacgaaatcaaccaggttttattagagtgtacatctgtgtggatcgttagacaaatacccttgtttcataagattgcgaaaatgttactgtagttttttttttctcttggccctttacacaccaggaatggaaaatttttgtggcggtgaaatagaaaagagtgacttgaagaaactttatgctgtagcacccttgcaactgtaaattcttttgctataaaatccttctcaatgtatactactgtagcttcctacagtagacttgcatatattaaaaaaaaaaaaaaaa

SEQ ID NO: 39536 - DNA, 351 bp, Oryza sativa
  Clone ID: PAT_MRT4530_43066C.1
atggcagtagggccaaaacgcggcgctgcactatctccgacacgagggagacagaacgacgtgcagcgagccgggcagagggtgagcagtggcgggcggtggcgcagagggctgtggcgcgagcggtggagtccaagtggcggggcagagggtgtgcggcagcaggaggcggcggggagggctgctacacgggcgacggcgcggcgagtgcaggtggcggggcacttggcgcgtggagtgtgtgaagcagccgaaggtcacggatccggcgtccctgcccgccacggagaagagccggcaacaacgggcgcccggtgcgactgtgcgagggatgacgccgcactcgattga

SEQ ID NO: 39537 - DNA, 669 bp, Oryza sativa
  Clone ID: PAT_MRT4530_43067C.1
ccggccgggcactgcagtgccctgccagtcacaggcaaaccatatctagctagacacataccactcactcattcacccatcaacgtacgtacgtcggtacgtgtgatctgcttaattgagagttagaagaagaggccgacgtaagttgaatttgctgcagagagaatcaatggcgcttatcccgtcgctggccaccgcccgctacgcgctgctcgcgttgccgcctctcatggtggccgcgtatgtttataacggcgggggtcggggaaatggagatagaccgcgtgcaagaagcatcaacaaattcaccgatggcggtccagctaccgccggtcctgcagcccggaaagacaacagtgccttgtgatcgatcaactgtaagccctccacatgtacttcctccgtcttataatgtccttacaagacggagaaagtacgtaatttaccgatgattgctgtatccaactaagctatgcggatttatgtacgcatatgcaactactattaagcttttatgtcgttggtttttctctaccgcggtgtgtaccgcaagatatatatgtatttttttctttccagggcttttatctgatgtaatgaaagtactacgtacgtacgtctcgtaccaacgcaacacttgtgtgtaaaaaaaaaaaaaaaaaagcggcc

SEQ ID NO: 39538 - DNA, 711 bp, Oryza sativa
  Clone ID: PAT_MRT4530_43068C.1
tgttcagtcacaggcaaaccatctacattctacacacatatctcactcatcctgtcatccacccatcaacgtacgtacgtgtgatctgcttaattgggagttagaagaagaggccgaggtaagttgaatttgctgcagagagagagagagagaatcaatggcgcttatcccgtcgctggccgccgcccgctacgcgctgctcgcgttgccgcctctcatggtggccgcgtatgtttataacggcgggggtcggggaaatggagatagaccgcgtgcaagaagcatcaacaaattcaccgatggcggtccagctaccgccggccctgcagcccggaaagacagcagtgccttgtgatcgatcaactgtaagcccttcacacatgtacttcctccatctcataatgtaaatcattttagcattgcgcatatttatatatctagatttattaacatccatatgaatacggacaatgctagaatgacttatattatgaaacggagggagtacgtaatttaccgatgattgctgtatccaactaagctttgcggatttatgtacgcacatgcaactactattaagctttatgtcgttggttttctctaccgcggtgcatgtgtaccgcgagatatgtaaatttatttccagtgcctttttctgatgtaatgaaagtactacgtacgtacgtctcgtaccaacgtacacttgtgtgt

SEQ ID NO: 39539 - DNA, 4029 bp, Oryza sativa
  Clone ID: PAT_MRT4530_43069C.1
atgtcgaacactggagacaaggagaaggagactcccgtcaacaccaacggaggcaatactgcctcaaactccagcggaggactattcttggggtataaccttattacattatttcaattagaagttttactgttaatgttcatcgcaatgtcaacattgtgtcattatgtgattgttgatgcttattcaacgttaagcatgctcatgttgattacattcaccactatcactggatcaaatcctattgtaaatatcatgtttattatcttgttattttggattaaaatatgccgaattatgaccaaatttccaacaatccaaaaacctgataggtcattttcggtagttggctttgctgctgcactgaaaccacatgcctttgatggttcaaactataagagatggaaagcacgtgcactattgtggttgacagcgatgcagtgcttctatgtttcacggggcaaacgaagtgaaccacctctttctcctgaggaagaggctaagttcgaggcttcggattgcctgttccgtggagcattgatcagtgtactcgctgacaacatagtggacgtgtacatgcacatgccttctgggaaggacatgtgggatgcacttgaggccaagttcggagtttctgacgccggcagtgagctgtatgttatggagcagttctatgactacaagatggtcgatgaccgttctgtagttgaacaagctcatgagattcagatgctggctaaggaacttgagaacaacaactgtgagttgccggacaagtttgtggcaggtggcattattgccaaactaccaccttcttggtcggactttgccacttctctaaagcacaagagacaagagttcagtgttcctgatctcattggctctttgggtgttgaggagaaggcgagggcaaaggacgtccggggcaaaaaggttgagggaggttctagtgccaatatggtacagaagaagaaccctcatgcatcccacaacaacaagaaagtcaagcctgatgtcaaacccaaggctgcaaccaattttaagaagaaaagcaagggaaaggcaaagggagactgctttgtgtgtggcaagtctgggcattgggccaaggactgtcctaagcgcaaagacaggaagtctgccaacatgatcattagcgagggcggaggaacatcggggtacggtaaaatattacctacagttctctctgtttttcattcacctgattggtgggtggacactggtgctaatattcatgtcgggagaggttcctccttgttgatgggaaacgggtcgcttgcggctgttcatggtgttggtacggtcgatctgaagtttacttcgggaaagaccgtgcagctgaagaacgtgcagcatgtcccttcaataaagaagaatctagttagcggctctctattgtgtagagaaggttttagacttgtgtttgagtccaataaatgtgtcgtatctaaatatgggacttttgttggaaaaggttatgacagcggaggcttgttccgcttttctttgaatgacatgtgtaataatcataatgctgtgaaccatattagcgagaatgatgagtctaatgtgtggcattcgcgactctgtcatgtgaatttcggttgtatgacgcgcttagctaacatgagtttaattccaaaattcactttggtaaaaggttccaagtgccatacttgtgttcaatcgaaacaacctcgcaagcctcacaaggcatctgaggcgaggaatttggcacctctagaacttgttcattccgatttgtgcgaaatgaacggcgtgttgactaaagggggaaagaaatatttcatgacactgatagatgattgcactagattttgctatgtgtatctattgaaaacaaaggatgaggcattgcatttctttaaaatctataaagctgaggtagaaaaccaacttgaaaggaaaatcaaacggttgaggtctgatagaggtggggagtatttttccaatgagtttgcatccttttgcgaagagtttggaattattcatgagatgacgcctccctattcaccccaatcaaatggggtggccgaaagaaagaaccgtactctaactgagatggtgaatgccatgttagacactgcggggctttccaaggaatggtggggtgaggcagttttaactgcgtgtcatgtcctgaataaaattccaatgaagcataaggaagtaacaccattcgaggaatgggaaaggaagaaattaaatctctcatacctacgaacatggggctgtttggccaaggtaaatgtacctatagccaaaaagcggaaacttggaccaaaaactgttgattgtgtgtttcttggttatgctatccacagtgtgggttatagattcttaatagtaaactctggagtacccgacatgcatgttggtataattcttgagtccagagatgctacattctttgagaatgaatttcctatgaaatatacacctatcacttctagtaaagaaactgtcatgccccatgagcactttgcaccgatagaacacaatgatcaaacgcctgaggaaaatcctgaggaggacaacattgtagatactcgcaagagtaagagacaaagggttgcaaaatcctttggagatgactacattgtatacctcgtggatgacaccccaagaaccatagaagaggcatattcatctcctgacgctgactactggaaggaagcagtacgcagtgaaatggactcgattatgtctaatggtacttgggaagtcgttgagcgtccatatgggtgcaagcccgtaggatgcaaatgggttttcaagaaaaagcttaggcctgatggtacaatcgaaaagtacaaggcaaggcttgtggccaagggttatacccaaaaggaaggcgaggacttcttcgacacatactcaccagttgctcgcttgaccacgattcgacaagcacctaagcaatggcatgagaagtttgacaccacgcttacatctgcaggctttgttgtgaacgaagctgacaaatgtgtatactatcgctatggtgggggagaaggggtgatcttgtgcttatatgtcgatgacatactgatctttgggaccagccttaatgtgattgaggaggtcaaagactatctgtccaagagttttgaaatgaaagatttgggagaggctgatgttattcttaacatcaaactacaaagaggagatgagggtgggattacacttgtgcaatcccactatgtggacaaggttttgagtcgctttggatatagtgactgcaagccagctcctactccttatgatcccagcgtgctattaaggaaaaaccgaagaatagcaagggatcagctgagatactctcaaatcattggttcattgatgtacttggctagcgcaacgaggcctgacatctcatttgctgtaagcaagctgagccggtttgtctcaaatccgggagatgatcattggcaggctctggaaagagtaatgcgctatctaaagggtactatgagctatggaattcactataccgggtatccaaaagtactagaagggtatagtgactcaaactggatatctgatgctgatgagataaaagccacaagtggatatgtgttcacacttggaggtggcgctgtttcctggaagtcttgcaagcagaccatcttaacgaggtcaacaatggaagcagaacttacagcactagatactgcgacagttgaggccgagtggcttcgtgaactcctgatggatttgccggtggttgaaaaaccagtgccagctatcctaatgaactgcgataatcaaacagtgattattaaagtgaacagttcaaaggacaacatgaagtcatctagacacatcaagagaagactgaaatctgtcagaaagcagaaaaactccggagtgatagcattggactatgtccaaacggctagaaatctggcagatcagtttaccaaggggctaccacgtaatgtgatagacagtgcatcgagggaaatgggcttgatacccacctaa

SEQ ID NO: 39540 - DNA, 317 bp, Oryza sativa
  Clone ID: PAT_MRT4530_4306C.1
gccacccggtgctgctcggctgcccgcggacccgccgcaacgctcacccgccgctcgccaatcgccgccggcctcatccactgaagaagaagaagagaaagagaagagaagttgaggggcctccggtgaacttattccgcatagaattgtcaaaatccagaccagtaaatttttcggcccagatatccggtcgaaatgggcctgacagtccaagacaagtccgccccaacctgaagttcagggacacggacggatcctctgtagtcgatactgcgtcggatggaaaatctacagctgagatcagttcatggctgtag

SEQ ID NO: 39541 - DNA, 2544 bp, Oryza sativa
  Clone ID: PAT_MRT4530_43070C.1
atggcgacagtgtgcccatgtgcgcggctaccgacgggcatgtcttctgtctacctggtcgtgtccgagtgcgtggccctcgcacctgcctccgaaaccacgcgctgctgcgacgtttgcacggacgggcgggcgatcaggtttttggagagcgtaaggcgcgactactcactgttcgtcaacatctacttcaccttcaccaatatgtcgaacactggagacaacggcaacactggatacaaggagaaggaggctcccgtcaacatcaacggaggcaatactgcctcaaactccaacggaggaccattcttgggtgtactcgctgacaatatagtggacgtgtacatgcacatgccttcagggaagaacatgtgggatgcacttgaggccaagttcggagtttccgacgccggcagcgagctgtatgtcatggagcagttctatgactacaagatggttgatgaccgttctgtagtggaacaagctcatgagattcagatgctagcaaaggaacttgagaacaacaactgtgagttgccggacaagtttgtggcgggtggcattattgccaaattcccaccttcttggtcagactttgctacttctctaaaacacaagaggcaagagttcagtgttactgatctcattggctctttgggtgttgaggagaaggcgagagcaaaggacaaccggggcaaaaatatcgagggaggttctagcgccaatttggtgcaaaataagaaccctcacgcatcccataacaacaacaagaagaaagtcaagcctgatgtcaaaccaaaggctacaaccaattttaagaagaaaggcaagggaaaggccaagggcgactgctttgtgtgcggtaagcctgggcattgggcgaagaattgtcctgatcgcaaggacaagaagtctgccaacatggttattagcgagggcggaggaacatcggggtacggttattttttacctacagttctctctgtttttcattcacctgattggtgggttgatactggtgctaatattcatgtcgggagaggttcctccttgttgatgggaaacaggtcgcttgcggctattcatgtttttgatattgctgtgtacctattgaaaacaaaagatgaggcattgcattactttaagatctataaagctgaggtagaaaaccaacttgaaaggaaaatcaaacggttgaggtctgataagggtggagagtatttttccaatgagtttacgtccttttgcgaagagtttggaattattcatgagagaacgcctccctattcaccccaatcaaatggggtagccgaaagaatgaaccgcactctaactaagatggtgaatgccatgttagacactgcgggactttccaatgaatggtggggtgaggcaatttttactgcttgtcatgtcctgaataaaattccagtgaagcataaggaagtaacaccattcgaagaatgggaaaggaagaaattaaatctctcatacctacgcacatggggctgcttggccaaggtaaatgtacctatagccaaaaagcgtaaacttggaccaaagaccatagactgtgtgttccttggttatgctatccacagtgtgggctataggttcttaatagtaaactctggagtacccgacatgcgtgttggtacaattactgagtccagagatgccatattttttgagaatgaatttcccatgaaaaatacacctagcacgtctagtctagaacctgttttaccccatgagcactttgcaccgataaaacacaatgagcaaacgcttgagggaaatcctgaggaggatagcattgtagatactcgtaagagtaagagacaaagggttgcaaaatcctttggagatgactacattgtatacctcgtggatgacactccaagaaccatagaagaggcatattcatctcctgacgctgactactggaaggaggcagtacgcatcgttgagcgtccatatgggtgcaagcctgtaggatgcaaatgggttttcaagaaaaagcttaggcctgatggtacaattgaaaagtacaaggcaaggcttgtggccaagggttatacccaaaaagaaggcgaggattttttcgacacctactcaccagttgcccgcttgaccacgattcgagtactacttgctctggcagcctctcatggtcttctcgtccatcagatggacgttaagacagttttcctaaacggagagctggaggaggagatctatatggatcaaccagacaggtatgtactaaaaggtcaggagggaatggtgtgtaaactgttgaaatccttgtatggccttaagcaagcacctaagcaatggcatgagaagtttgaccccacacttacatctgctggctttgttgtgaacgaagctgataaatgtgcgtactatcgctatggtaggggagaaggagtgatcttgtgcttatatgtcgatgacatattgatctttgggaccagcttcaatgtgattgaggaggtcaaggactttctgtccaagagttttgaaatgaaggatttttga

SEQ ID NO: 39542 - DNA, 3156 bp, Oryza sativa
  Clone ID: PAT_MRT4530_43071C.1
atgcgtaaggagaaaataccgcatcaggcgccattcgccattcaggctgcgcaactgttgggaagggcgatcggtgcgggcctcttcgctattacgccagctggcgaaagggggatgtgctgcaaggcgattaagttgggtaacgccagggttttcccagtcacgacgtttgaaccacctgtctctcctgaggagaaggttaagttcgaggctttggattgcctgttccgtggagcattgatcagtgtactcgctgacaatatagtggacgtgtatatgcacataccttcaaggaaggacatgtggaatgcacttgaggccaagttcggagtttccgacgccggcagcgagctgtatgtcatggagcagttctatgactacaagatggtcgatgaccgttctgtagtggaacaagctcatgagattcagatgctggctaaggagcttgagaacaacaagtgtgagttgccggacaagtttggggcgggtggcattattgccaaattgccaccttcttggtcagactttgccacttctctaaggcacaagagacaagagttccgtgtttctgatctcattggctctttgggtgttgaggagaaggcgagggcaaaggacaaccggggcaaaaaggttgagggaggttctagtgccaatatggtacagaagaagaacactcatgcatcccacaatagcaagaaagtcaagtctgatgtcaaacctaaggctagaaccaattttaagaagaaaggcaagggaaaggcaaagggagactgctttgtgtgtggcaagtctgggcattgggccgaggactgtcctgagcgcaaagacaggaagtctgccaacatggtcattagtgagggcggaggaacatcggggtacggtaaaattttacctacagttctctctgtttttcattcacctgattggtggattgatactggtgctaatattcatgtcgggagaggttcctccttgttgatgggaaacgggtcacttgctaatattcatgtatgggttgttcatggtgttggtacggtcgatctgaagtttacttcgggaaagaccgtgcagctgaagaacgtgcagcatgtcccttcaataaagaagaatctagttagcggctctctactgtgtagagaaggttttagacttgtgtttgaatccaataaatgtgtcgtatctaaatatggaacttttattggaaaaggttatgacagcggaggcttgttccacttttctttggatgacatgcgtaataataataatgttgtgaaccatattagcgagaatgatgagtccaatgtgtggcattcgcgaccctgtcatgtgaattttggttgtatgacacgcttggctaacatgagtttaattccaaaattcactttggtcaaaggttccaagtgccatacttgtgttcaatcgaaacaacctcgcaagcctcacaaggcatctgaggcgagagatttggcacctctagaacttcttcattccaatctgtgcgaaatgaatggcgtgttgactaaagggggaaagaaatatttcatgacactgatagatgattgcactagattttgttatgtgtatctattgaaaacaaaggatgaagcattgcattattttaagacatataaagctaaggtagaaaaccaacttgaaaggaaaatcaaacggttgaggtctgatagaggtggagagtatttttccaatgagtttacatctttttgcgaagagtttggaattattcatgagaggacacctccctattcaccccaatcaaatggggtaaccgaaagaaagaaccgtactctaactgaaatggtgaatgccatgttagacactgcgagactttcccaggaatggtggggtgaggcagttttgactgcttgtcatgtcctaaataaaatcccaatgaagcataaggaagtaacaccattcgaggaatgggaaagaaagagattaaatctctcatacctacgaacatggggctgtttggccaaggtaaatgtacctatagccaaaaagcgtaaacttggaccgaatactgttgattgtgtgttccttggttatgctattcacagcgtgggttatagattcttagtagtaaactctgaagtacccgacatgcgagttggtacaattattgagtccagagatgctacattctttgagaatgaatttcccatgaaaaatacacctagcacttctaatcatgaaactgtcataccccataagcactttgcaccgatagaacacaatgatcaaacgcctgagggaaatcctgaggaggataatattgtagatactcgtaagagtaagagacaaagggttgcaaaatcctttggagatgactacattgtatacctcgtggatgacactccaagaaccatagaaaaggcatattcatctcctgacgctgactactggaaggaagcaaaaaagcttagacctgatggtacaattgaaaagtacaagacaaggcttgtggccagggttatacccaaaaagaaggcgaggatttttttcgacacctacttaccagttgcccgtttgatcacgattcgagtactacttgttcgagcagcctctcatggtcttctcgtccatcagatggacgttaagacagctttcctaaacggtgagctggaggaggagatctatatggatcaacaagacaggtatgtactagaaggtcaggtgggaatggtgtgtaaactgttgaaatccttgtatggccttaagcaagcacctaagcaatggcatgagaagtttgacaccacacttacatctactggctttgttgtgaacgaagctgacaaatgtgtgtactatcgctatggtgggggagaaggagtgatcttgtgtttatatgtcgatgacatattgatctttgggatcagcctcaatgtgattgaggaggtcaaggactttctgtccaagagctttgaaatgaaggatttgggagatgctgatgttattcttaacattaagctactgagaggagatgagggtgggattgcacaatcccactatgtggacaaagttttaagtcgctttggctatagtgactacaagccagctcctactccttatgatcccagcatgctattaaggaaaaaccgaagaatagcaagggatcaactgagatactcctaa

SEQ ID NO: 39543 - DNA, 1669 bp, Oryza sativa
  Clone ID: PAT_MRT4530_43072C.1
ctaggtcgcgacgacgggagaggcgaggcgacgcgggcgtggcagcgagcggcgcagaacgggcgtgatgatgtgcgtcttgccagcggggtcgacggcgaagtacatggtgctcagcctcagcctggggcactcccccgtggatgccgcccccgcaccagacgcgtccacgaccaccgccacgtcgccgatgtcgtctgcctcctcccacgtctcgccgcactcgtccagcatgcgcaccttgaacccctcctcctcagctgcggccacgggtcggagcagctccacctgcatcagcccgcggcggtcgccggtgcccggtggagagcctggtggggactccaccaggaagctgcgctccacgtatgcagctcggggaacgcatacaccatcccgtaccgcgtgttggcgtagagcttctagcggtggacgcacacggcggggatgctcgtcggcttcacggacttccacgtgcggtcgatgcgcagcatcttcgagctccacggcttcctccttcctgtcaaccatgtcgctgtcttccggcgcggcggcgcagatgggggagaaggcagcggcgcacgcgtgcgtcggctgccggcggcggcagcggcatgcccgttcgttggctggctgcagcggcagcggcggtgtagatgcgcgtgcgatggcggcatgcatgtaatcgaagtccaccgacgcggtgcacgctcgccatgaacggcacccgccgccgttgacccggatgacctggccgttgacccactcggcggcgtcggtgcagaggaacccgaccactggcgcgatgtcgccggcctcgccgagccgccccatcgggttcgtggccttgatctcgtcgacgcgctcctcgctcttcccggcgaagaacatgtccgtcgccgtggcccccggcgcgacgcagttggccgtgatgcgggtgcccttgagctccttcgccatcgtccgcaccatcgcctccacggccgccttcgacgccgtgtacgcggagtaccccgtcggatgcgacccgaccaccgacgaggtgatcgccacgatgcggccgccgccgccgcggggcagccggtgggccgcctcgcggaggcacaggaacgcgccgcgcgtgttgacggcgaaggtgcggtcgaagtccgccgtcgcggtgtccaccagggtgggatacttgtcgtcgagcaccgccgcgttcgccaccacgatgtgcggcgcaccggcgccgaaggcggactcggcggcgtcgaagagcgaccgcacgccggcctcgtcggccacgtcggccctcaccgccacggcgcggggaagccccgcggcgagcgcgtcggccttcgcggcgctggacgcgtacccgaccacgacgctggcgccgagcgcggagaggtgggccgcgatggcgcgcccgatgccgcgcgacgcgccggtcacgatggccacacgcccggcaaggggcggggcggccgccggctgctgcgacgacgcggcagctgcgacggcggcggcgtccatttcttcgctcgagcgagtgtagcgtgcggtgttcgcgtcgagtggtcactagagagagttggaatcgattggactggatccgcgcgcccgtgtcggcccgtggccgcgccccgcggctcgctcctcgtgccgcattcggcacgaggcctcgtgc

SEQ ID NO: 39544 - DNA, 5826 bp, Oryza sativa
  Clone ID: PAT_MRT4530_43073C.1
atggcggcggagctagtgggtgaaggagacggtggacgacgccggcggtcaggggtagaggccgccggatccaacggttggcggtgcggtggaggaggctgccgctggatcgggcaagcggcggtggggtggcggaggaggaggcgactggtggtcgggggagaggcgccagatctgcgtcccccaaacgtgttgaggctggcggtcgttaggcaggagaggcggcggcggctggcgatcgggacacggaggaggaagtggccgacggtgaggggagaggccgcggtggccggatccgtgccctgtaagaatgaaaggcagcagctgcaggcgggagcagcagcagcagcagctgcaggcgggatcagcatcgagtacccgttctgcgtggagcctggctgctaccacccaggcttcaacctcacctgcaaccactcctacagcccgcccaggctattcctcggcgacggcacggtgcaggtgctcgagatcgccatcccccaagccaccgtgcgcatcaacagcggccgcatggtgttcaattctactggcaatcatgccgtcaacagatcattattggatcaggtgggaaggccgtacttcgtggcagcttcaaacaggatagctttgctaagctgcaacgcccgggttgacgtccgcgcggctgggagaaacaacaacaaaactagtactaagttgctcagttcctgcactgccatctgcccaacagacgatggaggtggtgctaccactatcctcgatattggtccagagggtccatgctcagggattggctgctgtgaaacaagcatgctactagcaggaagctcgactgctgcctacagcatccaggtccagaacttgcaggagcaggccgtcgtgctaaatcgaacggatgatctggtgtacttggtagatgagagatttaactataccttggacatgtctttcggctacagcagtcctgaagagctcccagcacggctagactggtacataaatagttcatcagcgtgtccgttgcccgcgtccgcccccgaatgtcgcagcgcgcacagctattgcgacagtacttacgacaacaaggcgtacatctgccgctgctccgaaggttacgaaggaaatccctacgttcctgatggatgccatgatacggatgaatgcagttctggatactgcagttacggcgagtgcaggaacacaccaggatcgttcatttgcaactgccctcgtggctacgagggcaatccatcgccaaaagatggatgcaaagcacgagatttaggtctacgcatcgggcttggggttggtggtggcacaattcttttgctcctcgcactaagtgctccctttatatcaagcaaaatgaagctgcgcaagatgaaaagaatgaaagagacttttttcaggcaaaaccatggcttgctattaggacgattggtatcacaaaacgcagatattggtcaaaggatgatcatgactttacaagagctagagaaggccacagacaattttgataaatctcgtgaaattggtggtggaggacatggcgtcgtgtataagggaattttagacctgcaagttgttgccattaagaaatcaaggattgtcgtaaaaagagaaatcgatgactttataaatgaagttgcaattctttctcaagtcaatcatagaaacgtggtgaagcttctaggatgttgtcttgagacagaagttccattgttggtttatgagttcatttcaaatggatctctagatcaccatcttcatgttgatggaccaatttcgctaccatgggatgatcgaataaggattgctcttgaagttgctagagccttgacttatctacattcagctactacaataccaatattccatagggatattaaggcatgcaacatacttctcgatgaaaatttaatatcaaagaattgctcactcgaaaaaggcccatgtataggactgatcacggtgaaagtcttgtgttatattttgcctcgcttcatagacaagatgagctacaaagctactagaaatcgaatgccaaagcctgaaggtgagatcaaagcaaccaacctcagagcattcaacagctcatcagtagaaatcccctctggagtagacttcgaattagggaacacaaccaccggcacggtgtcatcatcattaccttgggatgatcgattaaggatagcttttgaagttgttagagctctttcatatctacattcagctgcatcaatgccaatatttcacagagatattaaatattcgaatatacttcttgatgacagcctaacagcaaagttacttactcggaagaaaccaattggtggtacatttgataatggcgatggtcttgtttcacatttcgtctcacttgtctcaaaaggtaacctttatgacataatagattctcaagttagggaagaggaagatggagaagtccaggaagtagcaacactagccgcaacatgtactaaatttaaaggagaagagcggcctacgatgagggaagtagagatggagaacgacttgcaagaaaaccggtcggccatgaagaaatgccccgaccttaagattgagagaaggtttttggggagcgcaaggcgcgactactcactgttcgtcaacatctacttcacattcaccaatatgtcgacaaccggcgacaacaacaacactggagacaaggagaaggagcctctcgtcaacaccaacggaggcaatactgcctcaaactccagcggagggccattctcggggtataaccttcttacattattaccattcgttcttcgtttcctacaactgttcatcgcaatgtcaacattgcgttctcttatctatgttgatgcttattctatattaagcatgctcatgttgtacacatctagcactatcactggatctactcaaattacaaatgtcatgtttattatcttgttattttggattaaaatatgccgaattatgaccaaatttccaacaatccaaaaacctgataggtcattttcagtagttggctttgctgcaacactgaaaccacatgcttttgatggttctaattataagagatggaaagcacgtgcactactatggttgacagcgatgcaatgcttctatgtttcacggggcaaacgaagtgaaccgcctctctctcctgaggaggaggctaagttcgaggcttcggattgcctgttccgtggagcattgatcagtgtactcgctgacaatatagtggacgtgtacattcacatgcctttagggaaggacatgtgggatgcacttgaggccaagttcagagtttccgacgccggcagcgagctgtatgtcatggagcagttctatgactacaagatggtcgatgaccgttctgtagtggaacaggctcatgagattcagatgctggcaaaggaacttgagaacaacaactgtgagttgccggacaagtttgtggcgggtggcattattgccaaattgccaccttcttggtcggactttactatttctctaaaacacaagaggcaagagtttaatgttactgatctcattggctctttgggtgttgaggagaaggcgagagcaaaggacaactggggcaaaaatatcgagggaaattctagcgccaatttggctacaaccaattttaagaagaaagacaagggaaagggcaagggcgactgctttgtgtgcgataagcctgggcattgggcgaagaattgtcctgatcgcaaggacaagaagtctgccaacatggttattagcgagggcggaggaacatcggggtacggtaattttttacctacagttctctctgtttttcattcacctgattggtgggttgatactggtgctaatattcatgtcgggagaggttcctccttgttgatgggaaacgagtcgcttgcggctgttcatggtgttggtacggtcgatctgaagtttacttcgggaaagactgtgcagctgaagaatgtgcagcatgtcccttcaataaagaagaatctagttagcggctctctactatgtagagatggttttagacttgtgtttgaatccaataaatgtgtcgtatctaaatatggaacttttattggaaaaggttatgacagcgaaggttccaagtgccatacttgtgttcaatcgaaacaacctcgcaagcctcacaaggcatctgaggcgagaaatttggcaccactagaactagttcattccgatctgtgcgaaatgaacggcgtgttgactaaagggggaaagaaatatttcatgacactgatagatgattgcactagatattgctatgtgtacctattgaaaacaaaggatgaggcattgcattactttaagatctataaagctgaggaatggtggggtgaggcaatttttactgcttgtcatgtcctaaataaaattccagtgaagcataaggaagtaacactattcaaagaatgggaaaggaagaaattaaatctctcatacctacgcacatggggctgcttggccaagaatgaatttcccatgaaaaatacacctagcacatctagtcaagaacctgttttaccccatgagcaccttgcaccgataaaacacaatgatcaaacgcctgaggaaaatcctgaggaggttaacattgtagcaactcgaaagagtaagagacaaaggactgcaaagtcttttggagatgactacattgtatacctcgtggatgacactccaagaaccatagaagaggcatattcatctcctgacgctgactattggaaggaagcggtacgcagtgagatggactcaattatgtctaatggtacttgggaagtcgttgagcgtccatatgggtgcaaacctgtaggatgcaaatgggttttcaagaaaaaacttaggcctgatggtacaattgaaaacctcaatgtgattgaggaggttaaggactttttgtccaaaagctttgaaataaaggatttggaagtggctgatgttattcttaacattaagctactgagaggagatgagggtgggattacactcgtgcaatctcactatgtggacaaggttttgagtcgctttggttatagtgactgcaagccagctccaactccttatgactccaatgtgctattaaggaaaaatggaagaatagcaagggatcaattgagatactcccaaatcattggttcattgatgtacttggctagtgcaacgaggcctgacatctcatttgctgtgagcaagctgagccggtttgtttcaaatccgggagatgatcattgtcaagctctggaaagggtcatgcgctatctaaagggtacaataagctatggaattcactatactggttacccaaaaatattggaagggtatagtgactcaaactggatatctgatgctgatgagataaaggccacaagtggatatgtgttcacacttggaggtggcgctgtttcctggaagtcttgcaagcagaccatcttaacgaggtcaacaatggaagcagaactgacagcactagatactgccacagtaaaggccgagtggcttcgtgaactcctaatggatttgccggtggttgaaaaaccagtgccagctatactaatgaactgtgataatcaaacagtgattattaaggtgaacagttcgaaggacaacatgaagtcatctaggcatgtaaagagaagactgaaatctgtcagaaagcagaaaaactccggagtgatagcactggactatgtccagacagctaaaaatctggcagatcagtttaccaaggggctaccacgtaatgtgatagacagtgcatcgagggaaatgggcttgagacccacttag

SEQ ID NO: 39545 - DNA, 891 bp, Oryza sativa
  Clone ID: PAT_MRT4530_43074C.1
tcaatctttgcttttaaattggacggcgggagaggtgggcgacacgtagctgcccgctgcggcgaggctgtatgtgcacacgcgcgtctcgccggtggggtcgacggcgaagtacatggtgctcagcctcaacctggggcactcccgcgtagatgccgcccccgcaccggacgcgtccacgaccaccaccacgtcgccgatgtcgtccgcctcctcccacgtctcgccgcacttgtccagcacgcgcaccttgaacccctcctcctcagctgcggccacgggccggagcagctccacctgcatcagcccgtggcggtcgccggtgctcggtggagagcctggtggggactccaccaggaagctgcgctccacgtacgcagctcggcgaacgcgtacaccatcccataccgcgtgttggcgtagagcttctcgcggtggacgcacacggcggggatgctcgttggcttcacggacttccacgcgcagtcgatgcgcagcatctccgagctccacggcctcctccttcctgtcatccttgtcgctgtcgtcttcctcatcttccggcacggcggcgcagatgggggagaaggcagcggcgcacgagtgcgtcagctgccggcggcggcagcggcatgcccgttcattggctggctgcagcggcagcggcggcgcagatgtgcgtgtgatggcggcctgcgtgggcgcacgaccgcgggtggaggtggtggcggcgctgtgctctggccggtgtgacttgtgagggaaggggcaaaatcgtactctcactagtgtttctctcagagccaaataaggttgtagtcttcctctcccattccaccccgattttaagaacagttccatagtgattgtttccagtttctttgtatccat

SEQ ID NO: 39546 - DNA, 204 bp, Oryza sativa
  Clone ID: PAT_MRT4530_43075C.1
gcacgaggagattgtggcggcgatgcggcctcgcgcttttgctcccccttgcctgccgggcagtggcccgctgcctggcctggcggtccccgggcgcggcgacctcttcccggctgccggcagcgtcgtcggcaggagggccgctcccgctcccgccggccggggcgccgtcgctcgcgcagtggacgggccgtccgccgctgc

SEQ ID NO: 39547 - DNA, 2092 bp, Oryza sativa
  Clone ID: PAT_MRT4530_43076C.1
taagcggcggtgagatgggaagctgcgggcggcggcggcgccctcccctccgccggatccggcgggaggggaggcgggagtcaggaggcgggaggcgggggcgacgggcttcatcaacggagacaattatgcctcacaatccagcggagggccattctctgggtataatctctctatactattgtttactgcgttaattcttattgtgtttctgtttagcgcaatgttttcaatgcattgctgtatgatggatgtctatgcttattatatattaagcatgattcgttcgttacatttgtttaacaattgcactagtttattccctgttaaagtcatgattattatcttgataatttggattaaaatatgctgaattgtgaccatatttccaacaatccaaaaacctgataggtccttttcggtagttggatttgccgcatcactgaaaccgcacgctttcgatggttcaaactataagagatggaaagcacgtgcactactatggttgacagcgatgcaatgtttctttgtttcacggggcaaactgagtaaaccgcctctctctcctgaggaggaggccaagttcgaggctgcggattgcatattccgtggagcattgatcagtgtgctcatcgacaacatagtggacgtgtacatgcacatgccttcaggaaggaaatgtgggatgcacttgaggcgaaattcggggtttctgatgctggcagtgagctgtatgtcatggagcagttctatgactacaagatggtcgatgatcgatctgtagtggaacaagctcatgagatacagatgctggcaaaggaacttgagaacaaccgctatgagttgccagacatgttcgtggcgggaggtatcatagccaaattgccacctttttggtccgactttgctacttctctaaaacacagaggcaagagctcagtgtcactgatctcataggctctttgggtgttgaggagaaggcgagggcaaaggacaaccgcggcaaaaaggtggaggggagttctagtaccaatttggtatagaagaaaaaccctcaagcatcccataacaacaagaaagtcaagcctgatgtcaaacccaaggctacaactacttttaagaagaaaggcaagggaaaggctaagggtgactgctttgtgtgtggcaagcctgggcattgggccaaggactgtcctaagcgcaaagacagaaagtctgcaaacatggtcattagcaagggcggaggaacatcggggtatggtaaatttttacctacagttcttcctatttgtcactcacctgattggtgggttaacactggtgttaatattcatgtgtgtgctgacatttccttgttttcttcttatcaagtcgggagaggttcctccttgttgatggaaaatgggtcgcttgcggctgttcttggtgttggtacggtcgatctaaagtttacttcgggaaagaccgtgcagctgaaaaacgtgcagcatgtcccttcaataaagaagaatctagttagcggctctctactgtgtagacatgattttagatttgtgtttgaatccaataaatgtgttgtatctaaatatggaacgtttattagaaaatgttatgatagcggaggcttgttccgcttttctttggaccatgtaagcaatgatgacgagtcaaatgtgtggcattcgcgactctgtcatgtgaattttggttgtatgacgcgcttagccaacatgagtttaattccaaaatttgctttagttaaaggttccaagtgtcatacctgttttcaatcgaaacaacctcgcaagcctcacagtgcatctgaggcgaggaatttggctcctctagaacttgttcattccgatctatgcaaaatgaacagtgtgttgactaaagggggaaagaaatatttcatgatactgatagatgattgcactagattttgctttgtgtacttattgaaaacaaaggatgaagcactgcattactttaagatctataaggctgaggtagaaaaccagctggaaagaaaaatccaacgattgaggtcagataggggtggagaccgactcacggatacttttaggttcac

SEQ ID NO: 39548 - DNA, 900 bp, Oryza sativa
  Clone ID: PAT_MRT4530_43077C.1
ctatccttttgcagccactaacccacgttcccacgattccctctgcaacagcgcgtccacgttctttctcctgatagataaggaggccgcgagtccgatccgacttcttcgcttctttcccggtgttagtttctccttctccgcgcctgagttgctctcgcttccccgcttctgatctcttgcgcgcacgagagattggaagaagcagtgcctccgaaaccacacctttgcctgagatctgcaccgggtaggcgggtgatcaggtttttggggagtgcctcctgcacgactgctcatcgccatgtctggagttgctgccgccgctattggcggaggtggtgcgtcgccgccgacaggagctgcgccgctgccgacgccgacaggagctgcgccgctgccgatgccgacaggagctggatccggagctgcaatactaatgtgtcgaactgaactcttcacatctcgcgagtcctcgggattagttagcctcttacattcaccctgctgctgttgctccaaaattacacaaatcttgaagaaatctatgccagtagtcatgggagtccctccaagtttctttgcaatttcggccccaatttttcgtaattccagataatcttctgctcccacttcctgaccagcaaacgcataacgccagaaaaggtctagattttcatcgtcgtcaagttcatgcaacctaagtttcagctctttacatcctgtgataagttggactgattgcgttctggttgtcaataaaattttgcttctggtcttggaggccttgaggacacgaaatagtttctccaattgatctcgcgctttatcttcccagacgtcatctaaaacgagtaaagcagctttagtggaagataatttctctcggagaatctgttccat

SEQ ID NO: 39549 - DNA, 331 bp, Oryza sativa
  Clone ID: PAT_MRT4530_43078C.1
aacactgaaaatgggtttccattgaacattgagtccaatactcaatattcacggtagtaaacatcatattacaaataatctcgatatatgcataaaagaaaggtacaagagagaattatcacactgaaatggattctaaaactccctccatacaaaaaactgaattatgcaccctttagatagattcatacattgctaaagaccagtttaactaatgtcggtatattatcattttgaagcttgacaaacatatctcagatttatcccaatagttgataatatgaatgcaagccttctccggtccttctattaccctggatcattacaaatg

SEQ ID NO: 39550 - DNA, 2940 bp, Oryza sativa
  Clone ID: PAT_MRT4530_43079C.1
atgagtcaagttggagatagcttggtctcggaatatagtggagcattgatcagtgtactcgctgacaatataatggacgtgtatatgcacatgccttcagggaaggacatgtgggatacacttgaggccaaatttggagtttccgacgccggtagtgagctgtatgtcatggagcagctctatgactacaagatggtcgatgaccgttctatagtagaacaagctcatgagattcaaatgctggctaaggaacttgagaacaacaactgtgagttgccggacaagtttgtggcgggtggcattattgccaaattgccaccttcttggtcggactttgccacttctctaaagcacaagagacaagagttcagtgtttctgatctcattggctctttgggtgttgaagagaagacgagggcaaaggacaaccggggcaaaaaggttgagggaggttctagtgccaatatggtacagaagaagaatcctcatgcatcccacaacaacaagaaagtcaagcctgatgtcaaacccaaggctacaaccaattttaagaagaaaggcaagggaaaggctaagggagactgctttgtgtgtggcaagtctgagcattgggccaaggactgtcctgagcgcaaagacaggaagtctgccaacatggtcgggagaggttcctccttgttgatgggaaacgggtcacttgcggctgttaatggtgttgttacggtcgatctgaagtttacttcgggaaagaccatgcagctgaagaacgtgcagcatgtcccttcaatagagaagaatctagttagcggctctctactgtgtagagaaggttttagacttgtgtttgaatccaataaatgtgtcatatttaaatctggaacttttattggaaaaggttacgacagcggaggcttattccgcttttctttggatgacatgtgtaataataataatgttgtgaaccatattagcgagaatgatgagtccaatgatgaagcattgcattactttaagacctataaagctgaggtagaaaaccaacttgaaaggaaaatcaaacggttaaggtctgatagaggtggggagtttttttccaatgagtttacatctttttgcgaagagtttggaattattcatgagaggacgcctccctattcaccccaatcaaatggggtagccgaaagaaagaaccgtactctaactgagatggtgaatgccatgttagacactgcgggactttccaaggaatggtggggtgaggcagttttgactacatgtcatgtcctgaataaaattccaatgaagcataaggaagtaacaccattcgaggtatgggaaaggaagaaattaaatctctcatacctaagaacatggggctgtttggccaaggtaaatatacctatagccaaaaagcgtaaacttggaccaaatactgttgattgtgtgtttcttggttatgctattcacagcgtgggttatagattcttaatagtaaactctagagtacccgacatgcgtgttggtacaattattgagtccagagatgctacattctttgagaatgaatttcccatgaaaaatacacctagcacttctagtcaagaaactgtcatacccaatgagcactttgcaccgatagaacacaatgatcaaacgcctgagggaaatcctgaggaggataacattgtagatactcgtaagacctctcatggtcttctcatccatcagatggacgttaagacagctttcctaaacggagagctggagaaggagatctatatggatcaaccagacgggtatgtactagaaggtcaggagggaatggtgtgtaaactgttgaaatccttgtatggccttaagcaagcacctaagcaatggcatgagaagtttgagaccacacttacatctgctggctttgttgtgaacgaaactgacaaatgtgtgtactatcgctatggtgggggagaaggattgatcttgtgcttatatgtcgatgacatattgatctttgggaccagtctcaatgtgattgaggaggtcaagaactttctgtccaagagttttgaaatgaaggatttgggagaggctgatgttattcttaacattaagctactaagaggagatgagggtgggattacacttgtgcaatcccactatgtggacaaggttttgagtcgttttggatatagtgactgcaagccagctcctactccttatgatcccagcgtgctattaaggaaaaaccgaagaatagcaagggatcaactgagatactctcaaatcattggttcattgatgtacttggctagtgcatcgaggcctgacatctcatttgccgtaagcaagctgagccggtttgtctcaaatccgggagatgatcattggcaggctctggaaagagtaatgcgctatctaaagggcactatgagctatggagttcactatatcgggaacccaaaagtactagaagggtacagtgactcaaactggatatctgatgctgatgagataaaagccacaagtggatatgtgttcacacttggaggtggcgttgtttcctggaagtcttgcaagcagaccatcttaacgaggtcaacaatagaagcagaacttacagcactagatactatgacagttgaggccgagtggcttcgtgaactcctgatggatttgccaatggttgaaaaaccagtgccagctatcctaatgaactatgataatcaaacaataattattaaagtgaacagttcaaaggacaacatgaagtcatctagtaatatcaagagaagaccgaaatctgtcagaaagcagaaaaactccggagtgatagcattggactatgcccaaacggctaaaaatctgacagatcagtttaccaaggggctaccatgtaatgtgatagacagtacatcgaggggaatgggcttgatatccacctaa

SEQ ID NO: 39551 - DNA, 568 bp, Oryza sativa
  Clone ID: PAT_MRT4530_4307C.1
aactagtggatcccccgggctgcaggcaaaatcaacacacatggccaagaacgtaatgcgcctcgcaatactggccatggcacagctagtgctgctgtggcctgctactacggctgggcagcgggcggtgttgccgagcaagtgcggcgacgtcgacatcccctcccctttcggcgtcggcgacgaactgggcatggccgggtccagataacttcaccgtcacattgcaagcatagcttcagccctcccagaacctaatacttgaacatagagatcatgaacatctcggtggcggcgggggagatgcgcgtctactctcccgtggtctcccagtgctacaactcatccaacaccacggactctgacagattcgagttgttgcagctcaacgtcaccgacacgccgttcctggtcgctccggagagaaacgagttcacggccatcggctgtgccacgttgggatggctgcagggcagagacgatgggaactacttgaccggctgcatctcgacgtgcgcgagcttggagacaggcaccgacgacggtgagccgtgcacggggctgggtt

SEQ ID NO: 39552 - DNA, 534 bp, Oryza sativa
  Clone ID: PAT_MRT4530_43080C.1
atgcaatgtttctttgtctcacggggcaaactgagtgaaccgcctctctctcctgaggaggaggctaagttcaaggctgcggattgcttgttccctggagcattgataagtgtgctcgccgataatattgtggacgtgtatatgcacatccctttagggaaggacatgtgggatgctcttgaggccaagtttggagtttccaacgccggcaacgagctgtatgtcatggagcggttctatgactacaagatggccgatgaccgttctgtagtggaacatgctcatgagattcagatgatgccaaagaaacttgagaacaacaactgcgagttgccaaacaacatggctgttggcgattttgtgtccatctacacgcagctgaacatcgagctggccgagcaagcagcacagtggcccgtttggccggcaagcagcgacatgactggggagcatcgtgcgagcagctggacagccacgccggctgtgaaggacagcgccgaggcagccgcagcctggcgtgtcggccgatgctag

SEQ ID NO: 39553 - DNA, 160 bp, Oryza sativa
  Clone ID: PAT_MRT4530_43081C.1
gcggttgtccgagcgttcattgcgacatcgctgctcaggtgctattatggagatatagtgtgcttaactaagaataagagagagcgagacagacatttggaggggctccacaagaaggcaaaggcgaggggagctagcctgatcgttgggaatgacaact

SEQ ID NO: 39554 - DNA, 351 bp, Oryza sativa
  Clone ID: PAT_MRT4530_43082C.1
cagtaaaacatttaccccagattcctgaattcagtcaacatcacccactcacatttatcacatacctattatcgtcgtcttgatgattgttgggcagagtattttggaaagatgagtattaattgagatttgtcagaacaagaatagtatgatggagtatgtattgtagtggagtgatgtgtatggtgatggatgagtatgtggatgagtgaatggtgtatgaggttagagtagagtgatgagtgatgagattagggtaggggcttgtgagtggttgttatgtggtgaatttggtgtgttcaagtttaatctatagaattacgaggataggtgagtgaactaggagaaagg

SEQ ID NO: 39555 - DNA, 4194 bp, Oryza sativa
  Clone ID: PAT_MRT4530_43083C.1
ctctgttcctgagctgcaaaatccttccccggttctgttcacctgcactcacaggtgtacaggacgagcaggtgcttctggaactccgtccgcttgagaacttgcacgggtaggcgggcgatcaagtttttaggtagcgcttcaagcgcgactgctcctgttcttcgcgactactactgctacatcgacgcctttgtcaacatgtcgacggagattggagacaaggaggtgaacgacatcaacggaggcaatactgcctcaaaatccagcggtgggacgttcttagggtctttttcggtagttggctttgctgcatcactaaaaccacatgctttcgatggttcaaattataaaaaatggaaagcacgtacacttttatggttgacggcgatgcattgtttctttgtctcacggggcaaaccgagtgaaccgcctctctctccagaggaggaggctaagttcgaggcttcggattgcctgttccgtggagtattgatcagtgtactcgttgactatatagtggacgtgtacatgcacatgccttcagggaaggacatgtgggatgctcttgaggccaagttcggggtttccgacgccggcagtgagcggtatgtcatggagcagttctatgactacaacatggtcgatgaccgttctgtagtggaacaggctcatgaaattcagatgctggcaaaggaacttgggaacaacaactgcgagttgccggacaagtttgtggcggatggcattattgcaaaattgccactttcttggtcagactttgctacttctctaaaacacaagaggcaagagttcagtattactgatcttattggctctttgggtgttgaggagaaggcaagggcaaatgacaaccggggcaaaaagatcgagggaggttctagcgccaatttggtgcagaagaagaaccctcacacatcccacaacaacaacaagaaagtcaaacttgacgttaaacccaaggctacaaccaattttaagaagaaaggcaagggaaaggcaaaaggagattgctttgtgtgtggcaagcctgggcattaggccatggattgtcctgagcgcaaggacaagaagtctgcaaacatggttattagtgagggcggaggaacattgtggtatggtaaatttttacctacagttctctctgtctgtcactcacctgattggtgggttgatactggtgctaatattcatgtgtgtgcggatatttccctgttttcttcttatcaagtcgggagaggttcctccttgttgatgggaaacggatcgcttgtggctgttcatggtgttggtacggtcgatctgaagtttacttcgggaaagatcgtgcagctgaagaacgtgcagcatgtcccttcaataaagaagaatctagttagcggctctctactgtgtagagatggttttagacttgtgtttgaatacaataaatgtgtcatatctaaatatggaacgtttattggaaaaggttatgacagcggaggtttgtttcgcttttccttgaatgatatgtgtaataaagttgtgaaccatgtaagcgatgataatgatgagtccaatgtgtggcattcgcgactttgtcatgtgaattttggttgtatgacaggcttagccaacatgagtttaattccaaaattcactttagtcaaaggctctaagtgccatacttgtgttcaattaaaacaacctcgcaaacctcacaaggcatctgaggcgagaaatttagcaccactagaacttgttcattccgatatgtgcgaaatgaacggcgtgttgactaaagggggaaagaaatatttcatgacattgatagatgattgcactagattctgctatgtgtacatattgaaaacaaaggatgaagcattacattactttaagatctataaggctgaggtaaaaaaccaactggaaaggaaaatcaaacggttaaggtctgataggggtggagagtatttttccaatgagtttacttctttctgcgaagagtatggaattattcatgagaggacgtctccctattcaccctagtcaaacagggtagccgaaagaaagaaccgcactctaactgagatggtgaatgccatgttagacactgcagaactttccaaggaatggtggggtgaggcaatattgactgcatgtcatgtcctgaatagaattcctactaagcataaggaagtaacaccattcgaggaatgggaaaggaagaaattaaatctctctcacctacgcacatggggctgtttggccaagataaatgtacctatagccaaaaagcgtaaacttggaccaaagaccgtagattgtgtattctttggttatgctatccacaatgtgggagataggttcttaatagtaaattctggagtacccgacatgcgtgttggtacaattactgagtctagagatgccacattttttgagaatgaatttcctatgaaaaatgcacctagcacttctagtcaagaacctattttatcccctgagcactttgtgccgataaaacacattgatcaaacgcttgaggaaaatcctaaggaggataacattgtagcaactcgaaagagtaagagacaaaggactgcaaagtcttttggagatgactacattgtatatcttgtggatgatacttcaagaaccattgaagaggcatattcatctcctgacgctgactattggaaggaagcgatacgctgtgagatgaactcaattatgtctaatggtacttgggaagtcgtcgagcgtatatatgggtgcaagcttgtaggatgcaaatgggttttcaagaaaaagcttaggcctgatggtacaattgaaaagtacaaggcaatgcttgtggccaagggttatacccaaaaagaaggtgaggattttttcgacacttattcaccggttgctcgcttgaccacgattcgagtactactcgctctggcagcctctcatggtctactcgtccatcaaatggatgttaagacagctttcctcaatggagagttggaggaggagatctatatggatcaatcagatgggtatgtactagaaggtcaggagggaatgatgtgcaagctgttaaagtccttgtatggtctcaaacaagcgcctaagcaatggcatgagaagtttgacaatacacttacatctgctggctttgttgtgaacgaagctgacaaatgtgtgtactatcgctatggtgggggagagggagtaatcttgtgtttatatgtcgatgacatattgatctttgggaccagcctcaatgtgattgaggaggtcaaggactttctatccaaaagctttgaaatgaaggatttgggagtggctgatgttattcttaacattaaactactgagaggagatgagggtgggattacacttgtgtaatctcactatgtggacaaggtcttgagtcgctttggttatagtgactgcaaggcagctcctactccttatgatcctagtgtgctattaaggaaaaaccgaagaatagcaagggatcaattgagatactcccagattattggttcattgatgtacttagctagtgcaacgaggcctgacatctcatttgctgtgagcaagttgagccggtttgtttcaaatccgggagatgatcattggcatgctcttgaaagagtaatgcgctatctaaaagggacaatgagctatggaattaactacgctgggtacccaaaagtactggagggctatagtgattcaaactggatatctgatgctgatgagataaaggccacaggtgggtatgtgttcacacttagagggggtgttgtttcctagaagtcttgcaagcagaccatcttaacgaggtcaacaatggaagcagaactcacagctttagatactgccacagttgaggccgaatggcttcgtgagctcctgatggacttgccggtggttgaaaaaccagtaccagcaatcctgatgagctgtgataatcaaacagtgattattaaagtgaacagtttgaaggacaagatgaagtcatccaggcatgttaaaagaagactgaagtctgtcagaaagcagaaaaactccggagtgatagcattagactatgtccagatggctaaaaatctggcagatcagtttaccaaggggctaccacgtaatgtgatagactgtgcatcaaggaagatgggtttgagacccact

SEQ ID NO: 39556 - DNA, 443 bp, Oryza sativa
  Clone ID: PAT_MRT4530_43084C.1
catggctgtaacttaaaaaaaaagcaactcaagatctagcatacagtttgtttgctaaatgcatctctgttgattcatttccataacattcctactgctattgttgatgtggattcagagggcaaggtgatagttcttaacggaggtagtggtgttccggaaccactggcacctgctctgagtgtctaattgagggataatatcgtcgttctggaattatggccttttctcttctctgacctgaggcgctcatgatggtaaaactagatggcataaattctcccttcattgaggtgctttcactataccattgactgtccaaccaaggcgggtgagcctatcatgcaagttagtgctcacgtgctgccttttgcagactatctgtttgcgggatctagaggcgctatttatattagtgactgctctgcgttcgcgcggttcgt

SEQ ID NO: 39557 - DNA, 306 bp, Oryza sativa
  Clone ID: PAT_MRT4530_43085C.1
atggaacttgcctcactggcgaacgaaggaatcaagtcagtggctgcgacggcggtgttgtgccatgttggcgttgcgtccggtggtggaggcggtgaatacaccctaacgcagatctgcattcagcgtctgaaggcctggcatgcagcgacggcgccggcggcgttgcgttcggcgtttggcggcggtgctgagttcggcattcggtgtggtgggcggtggcgccgacgatgggaaagtgccgcgagcccgcggcggtctggtctcgggcgagaaaagcggaggcagcgcatccatcgttgctag

SEQ ID NO: 39558 - DNA, 602 bp, Oryza sativa
  unsure (1)..(602): unsure at all n locations
  Clone ID: PAT_MRT4530_43086C.1
atgccctgcgatctgatttctcaagttcttagctacgaggctcctttttaatttgggattgattgtatagcctttgaagtatccaaaattattgtaacatctatgtgaatgtaaccccccaactgtggtgttttctctactcctctttaagtgaatggcttgacaaatgttatccttagaagaaacgtaatatgttcattagattagcatgaactagcattctaggaaaaccattctagtagtatgttttatggtgtaaattgttaattactcctagtccctaaaggctttgacatgaatacaatcagtaaagcatcatggtgagcacaagaaatttctagcgtactccctccgtcccgtaaaaaacgaatctagaactagatatgacatattctaatactacgaatctggaacatatgtatacccagattcgtaagactagatatgtcacatccggtattaagttgattttttatgtaacacgagggagtatgtgctaacgatatcctaacacatccaaaatggtaaaaaaaaatatanttattaatttaactatcccctgtcaacttcaatgtgacgctgaaaaaaaaaaaaaaaaaaaa

SEQ ID NO: 39559 - DNA, 1508 bp, Oryza sativa
  Clone ID: PAT_MRT4530_43087C.1
gcacgaggtggacgaataatcaaaacctctcctcccctcttctgctgctgctactactactggtctactgcctctcgtctcgcctccctcacgttggatcccgtggagttgagatgattcgtagggaggcgtaggttgtggtcgttgttgcggtttggagttgcaccggcgagatcgagagaaaggggtggttcgtgggatggattccggcaacagcgggagtctccagtcgtcgagtggaggggacgacgagttcgactccagatgcggcggcggtggcgtggactcgtcgccgctctccgcgctgctgcggcagtcggcgtcggcgtcggggttcggtggtggcactggctcgttttatggcttgcaggagctcgcgtcgccgccgccccagctgccgcccttgtctcaggcggcggcgcatcagtggacggcgccgcttcccggtggaggtggagcggggggagcgtcgtcctcgccgccgtcgtcgtcgtcgccgcacggcgtgcaggtctctgccgagcaggagttcaccggcatcccctcgccgcccttcgccgggccacccgcgcgctcgcggttcgaccacctcttccccgccccctcctccctccgctccgccgctaccgccgccggcggcgggaacccgtcctcgctcccggcctacctcctccgcccgttcgcgcagaagcaccacccttccccgttcccgcctttcccctcgccctccacgtcctcgccgtcgccgtccaacattgccattgcaacctccaccgccgccgcaaccacggcggcggtggcggcacccggcgacaggtaccacctcgcgtcggcgccgtcgtcctctctcctagggatgcaggatcacggcggcagttacctctccttccagagccacctcggcggcgcccagctcggcgccagcgacgacgtcaagtacaccgcgcacaccatgttcgacgctcccggcagcgacctagccccgcggccgccgccgcagaggctgcaggatccggcggccggcttcctcggcctcacgcatggcatcatgggcgccgacgggtcgcacatgcaccagcaacaacgaagccgcggccacggccacggcggcgacgagctgtccggcgtggtcgggggcgcgtccatgacccggagcgtcggcggcggcggcaagaagacgaccttctcgtccggcgccggcgcggcggcccacgcagcgcctcaactggagcacaatgcggagagcacgtcggtcaccgtcgccgcagcgccgacaccttcgtcggcggcggcgacggcggcgatgagaacgcaatccgtggactcgtggatttgtacatcggagtaggtcaattcactcgcttcattatattccaagagcagattggcttgtagtagtaaagctcatttagctagtagcttaatttcatttggttctttaatatcttattaatctctactactcctttgggtgtttaaaaaaaaaaaaaaaaaaaaaaaaaaaaaaa

SEQ ID NO: 39560 - DNA, 1126 bp, Oryza sativa
  Clone ID: PAT_MRT4530_43088C.1
ccccacctgcagggagtcctcacaaggggcgccggtggtggtgttgttgctgctgctactactcttcttcccccttcctcgtgttcctcctcttcgcctcgtctctctgccctgcctcgtgcgcgtccagatccgggagggatgggggcgggggcgctgggggtggtggcgatggtggcggcggcggtggtggtggcaatggcgggggtgaactccgagggcgacgcgctgtcggcactgcggcggagcctcagggaccccggcggggtgctgcagagctgggaccccacgctcgtcaacccctgcacctggttccacgtcacctgcgaccgcgacaaccgcgtcacgcgcctggatcttgggaatttgaacttatctggtcatctggtgcctgagcttggaaagttggatcatctgcaatatctggagctatacaagaataatattcaaggtaacgatcccatcggaacttggtaatttgaagaatcttaataagctttgggacctgtacaagaaggcaacatttctgggcactatacctcccaacaccttcgggaaattaatcgttccttgtattcttgccggctcaatggcaatcgcttgactgggccaatcccaagggaactggccggaatatctagtcttaaagttgttgatgtttcaagcaatgatctgtgtggaacaattcctacatcaggaccatttgagcacattcccctaagcaactttgagaagaacccacgcttggaaggtccagaactacaaggcctggctgtatatgacaccaactgctagatggaaacacgaagaaaagaatgggtagaaagtaatgggcgtaaaatgttaccgaaaaccgggtgatatagattatgttaggtttggacctaccactctgtaatcctccatgcatagctcttgtttgtgctgtttgtcggcaatgaagttgtatgttgtagcagaatactttctttctgtgaaagtaaacatggaactgcttatgtcatgagtcaaatgttattgttatcaaaaaaaaaaaaaaaatattgaccaaactaaagatgaaagttcttgtctgctgattatatcctttgctaaaaaaaaaaaaaaaaaaaaaaaaaaaaaaaaa

SEQ ID NO: 39561 - DNA, 358 bp, Oryza sativa
  Clone ID: PAT_MRT4530_43089C.1
tttccttctactccttctggtagaatgcaacgggcattttaggctatcgccacacctggcactctccctacgtgtgctgccctgggacacatgagtggtcccaaaccactctatattacctgctgaatattgacgctccatgtcagatttatctgctcaaatagaggagagtggatacgagactgccactgcggcagaccattggatgtctaaggggaagagcgctgacagaccctgggtctggagcactactgatgactatggctacgatgctgtcaaagctatgactcaacacaatggtggagctccggcgggcggtaaacctggaccggattaaccaaccgctggcggtgttact

SEQ ID NO: 39562 - DNA, 1005 bp, Oryza sativa
  Clone ID: PAT_MRT4530_4308C.1
atgccgcgatctcatcatctcctcgcggcggcggtggcggcggtggttgtggtggtgatgggatggtcggcgcggccgtgcgaggcgtcgctgtaccagccgccgccgccggcgatggcgtaccacgacggcgcggtgctggagggcgccgtgccggtgtcggtgctctactacggcgcgttcccgccgcaccacagggccgtcgtcgccgacttcctcatgtcgctgtcgccgcgggggcgggaccaccagccgcacacgttcggcgcgccggggccggcgccgccgccgacggtggcgcggtggtggggcaccgtggagaggtacgtccgtaaggccggccgcggcggcggcgccggggtggcgcgcgtggtgctcgccagccaggtggacgacgaggggtgctccctcgggaggcgcctgtcgcgcgcccaggtcgagcggctggcggcgcggctcggcgtcgcgccgggcggcgtggccgtcgtgctgaccgccgccgacgtcgccgtcgaggggttctgctccagcgcctgcggcgcgcacggctcgtcggcgcccggcggcggcgctgtgcacgtgtgggtgggcgacgcgtcggcgcagtgccccggccggtgcgcgtggccgttccacgccgcggactacggcgacgccgacgccggccgccaccgccgcgcgcacggccacgacgtggcgctccgcgcgccgaacggcgacgccggggtggacggcgtggtgatcaacctggcggcgctgatggccggcgcggtgacgaacccgtacgggcgcggctacttccagggcgacgcggcggcgccggtggaggtggccggagcgtgcccgggggtgtacggccgcggcgcgtacccgggatacccgggcgccgtgagggtggacgcggccaccggcgccgggtacaacgtcgtcggccggaacggccggcgatacctcgtgccggcgctcgtcgacccggacaactactcctgcctcatcatgacctaa

SEQ ID NO: 39563 - DNA, 655 bp, Oryza sativa
  unsure (1)..(655): unsure at all n locations
  Clone ID: PAT_MRT4530_43090C.1
ctgctggatccttctttgccaggcttcattcacctgcccctntccttgggctacctactgggagagntgcgatccaacaagtgtctacgaccagaaccaattcagatagaagtnttataggatccaaccacaggnttcggcatgatgacaaagcgaagggagatcctgtgggtacatttggaaccaaaggcgcatacatgttcagatactgaacatcacccagctttnctggagtaccgccaaggacgcccatccagacgatattgcaggagncagtacgttcctctggacgaaagagcagattggcaaacccgagcatctgacgcagactgcacgcatntgggtggcctgccctgggagttgcctggaggtctgggaacgagttgcttgtatggcgtaccctgcatggcacaaatggatgatgatgtgatgaatgaatgtgaaccttgaattgtgccccaatgttgctgtgctgttggttaacctctgtggggtggtgctaagtgagggtataagtgcccagtacttgggcccccatcaattttttctgtttttgacatttacatcattacatgtaaagagaaagggaagaacataatcgcagaaatgaaaaggaagaagataagttgatttccaaaaaaaaaaaaaaaaaaaa

SEQ ID NO: 39564 - DNA, 3813 bp, Oryza sativa
  Clone ID: PAT_MRT4530_43091C.1
atgtcagcgccgaccgacttggcgctatgtttcgggacctcagcgccatcgggtctggcgctgagagatgattcttttgacctcaatcgcacactgttttatgatgaaccaaactatgaagcatttgatgatgaaggagctatgaaaagtcagtcggttaagtctttgacagttgaggaagtcatagaatctcaagggatgggggttgatgttaacatgcaaaagaaggaagcagttgatgcgaatgagggaaggagtcaggaatctgaaaaggtggagataaatgtggagttgcagaaggaggaagcagttgaggctaataaggcaagcaggcttgaatcagaaggggtggaggtaaatgtggaattgcagaaggaggaagcaatagaggtgaatgaggcaaggagtcaggcagttccgatagttggaaatcatgttgatgatgataatgaagtggcagatggatcaatggggggaggtggagaagagcgtactacggatgctcaattagcatccttagtgcggttctgttttcgagacaaaatatatactcggagggagtgtgaggagactttgttgatgaatggattgagtgttgatttgctgcacgaacattcagaggagtatgataacacacatgaggaggagggatatgaggttgagtatgccgtagactcagatgatgatcatccagtagccaagatgtctcaggaagaaagagaggtgtttgagaaattagttggacgcaatccagaggttgttcagttcgaggatgttagcaattctgagctagcagttgttgatggaggagtaacatacaatggcatcatcgatgcaatgggtgaggagccaaagaagggtttggaatttaaatctcttgagctattacagatatggctgcagagttactcgatcagtgtgcatcgtccattccatgtgaagcactccaacacttctaaaaagtatacggtggcctgcatcgaagaatcatgcgaatggcaggttcgtgcaaggaagactaaggatgggaggtggagagttaccggtgtaggcaaagagcacacatgttgtagtactgaggcttcgggcaagcacttgcaactaacttctaagttcatcggtaataggttgcaaccatttgtccgagctgagccgacattgactcctgctactatagttgaggctgtggaggccatatggcactatcgtccttcgtacggtaaagcttggcgtgcaaagcaggtggccatgaagaacatatggggagattgggatgaggcatatgttcggctcccaacgcttctaaatgctattaaggctaagaaccccacaatgcattatgttgttgagcctcacccagagaggtcgaggccggtggatggggtaatgagacgtgtatttgggcgtgccgcatggatctttgggcagtgtgtggaggccttcaaccacatgcgtccagtgatagcaattgacggtaccttcttgacagagaaatttcaaggtactttgctgacagcaattggttctgatgcgggtttgcaactagtccccttagcctttgctctgatgaaagatctagagcgcatttgtcaaataaatgagaagtctgagttcgagaaggaggtgaagcacctcattgatttccttgagcctcgaccaaagaagtggcttctagacattatgccacagaggcacaagtgggcacggtcctgtgatcctggaggtcgtagattcggcttcatgacgagcaacatggtagagagtttcaacaatgtgctcagaggcattcgtaggctaccagtaacagccatcgtggcatacacgttcagcaagtgcaatacgtggtttgttgataggcataagttcgtaacagatgcattacataagcatgagaggtggccgaaaagaattaagaaggagcttgacatacagaaagcacgtactctgggccaacgtacgacttgcttcgacttccctacagcgaagtacgaagtgactgagcaaggtggagttacagaaggtggagtgcaatggggtggccgacattatacggtggttgcgacagccaacacttgtacatgccaatatccggaattgcaccacatgccatgctcccacatgttcactgtttgtaggctaagacgtatggatgcagaggcgccccctaggatatgctttgaagcttctaacatagctttgcaacgtacatactcccctaggttcgagccatatctagatccaactcaatggccaagttatgacggtgaggtgtttgtaccagacttgtcaaagatgattgttactcctggcagaagaagaactaaaaggttcatcaatgacatggataggggatacaaggggatcggtctttgtcggtcacagaagccgaatgatggcaattctgagcgtgtagtgcctaacaggatggcgcatgccctagctttggagccacagtacgaggagaggcaccgagctcgcgggatagcggagggagggggtctgaagccgttgcagattcgagggcacttggcaggggatatgcccttcgacaaccgctacatccctcgactacgggccgccaagctcttgccgttcatcaccatggctcagaggccaatgcctgtttacaacgggccagcactcacagcgctcgtcgaccggtggcgaccggagacacacaccttccaccttccttgtggcgagctgacggtgacacttgaggacgtcgccatgaacctggctctccccatccaggggagagcggtcaccggtgacacgagctcgggtaactggcggctgacagtggccaactaccttggagtcgagcctccggaagcccctgccggtcataggcttacgaagacttccggagtggtgtggcagccctatgagcacatagggatcgacatcaatgccatgtgctacataccggaggatatgaagtttctcaggtgccccttgatttgcttctacgccgttgagtggcagctcatccatcgcgtgctaaggcagttcggcttgcgtcatcccataccagaaccattcccgacggggctcgacctccacaagttggaccgcaggaagaacaagaagattacggactggcatgctcatcatctccatcttattgagcggtgggacaacacaacagctaacgttctgcctcacggagtggagcacaacaagacatacttcgatgagtacctagcttggctcatgaggaactaccgccttttccttcggccggcatggactctagctgacatagctacagatcccgaggatgttgaggagatgaacgagtatgacacccacactcgagcaggggcgacggtcgagtacgggcctgtacatgaccgagtggcacgtgagctgatgaggtccgtgaacgacgcgggtgttgcccttggcacacctgctgggtcagagaatgaagttgggatacttcggagcgcacttcagaggctaaaacaacaaagtcggatgttagcggcaagacttggttgtaggtccacagacgcagtcgacccacaaccaagactaacgcggacacaggccggagaaacaagtcaacaaagagctgaagaggaaggggaggaagaacatgatgaaggggaggaagaacatgaggaaggggaagaaggagatggacaaagtgacgaagaggaagaggaacaacccgaagaaaccgggtcatctcagcttgcaggtgccccgcagccatcgcaaccttcccagggtcgcccgcagagaaagagggcaccggtggaccggtacacaccttccactagtggccggaggggtcggcactag

SEQ ID NO: 39565 - DNA, 1179 bp, Oryza sativa
  Clone ID: PAT_MRT4530_43092C.1
atggagcggcatctgtttctgcatggaggaaatacacaaggagattctgggctggttctctcaactgacgctaaacctaggttgaaatggacacctgagttgcatcagcgatttgtagatgcagttaatcaattaggtggagcagagaaagctactccaaaaacagtcatgaggctcatgggcattccaggactcaccttataccatctgaaaagccatctccagaaatacaggctcagtaagaatctccaaggtcaagctaatgttgggacaacaaagaatgcccttggatgtacaggtgttgctgataggattcctggaacaagtgcattagcgatggccagtgcaagcgccattccacaggcagagaaaactattcaaatcggtgaagcactacagatgcaaattgaggtgcagaggcagctaaatgaacaacttgaggtacaacggcatctacagctgcggatagaagcccaagggaagtatctgcaggcagttcttgagcaagctcaagagacccttgggaagcagaacttgggccctgcaagcctggaagatgcaaaaataaaaatatcagaactggtctcacaagtttcaaatgaatgtctcagcaacgcagttacagaaataagagaaagttcaagtatacacagactagagccaaggcaaatccagtttgttgaaagttcagccaataactgtttgactgcagctgaaggattcaaggagcataggctacaaaaccacggggtactcaaagcatatgatgatagtacattattttgccgaaaacagtcccaagatcaagaatctcaatattcccttaacagaagcttaagtgagcgtagaatgggtcatctgtatagcggtaaacagtatcacaaatcagagggaagtgacagtgatacagaggttctacatgagtatatcacgcctcaaaagaatggcggaggcagcacaaccagttcaacatcaggaagcaaagaaataaatgtagagaagctatatcttgatgaaccaagctgcaaaagacaaacagttgactatcaaagagaaagcaagctactagattttgatcaacaaagttcagggaagaatcttgatctaaatactcacaatatagatgataacgatcaaggttatagacattttgacttgaacggcttcagctggagttga

SEQ ID NO: 39566 - DNA, 2916 bp, Oryza sativa
  Clone ID: PAT_MRT4530_43093C.1
atggcgagattaggtcttgccgtgtgcgccgtctccttccacctctgccttcttctgtcgtcgacctcctcgctccggctaaaccccacgacggaggacacagccaaccatggcagaagaactgcttatcacttccagcctgcaaagaactggcagaatgagcaaagtaacagtggtagcaatttcgaggggatgagtgttaagcaacttatatttggtggaaaacctagttttgaggagttagtttgtcatacaaaggatgtgctggggtggagcaatcagtctatagctatacaaggtagatatgatgttggagcaggacccatttcacacaaagataattcttttgacctcaatcgcacactgttttatgatgaaccaaactatgaagcatttgatgatgaaggagctatgaaaagtcagtcggttaagtctttgacagttgaggaagtcatagaatctcaagggatgggggtggatgttaacatgcaaaagaaggaagcagttgatgcgaatgagggaaggagtcaggaatctgaaagggtggagataaatgtggagttgcagaaggaggaagcagttgaggctaataaggcaaggggatggatcaatgggggcaggtggagaagagcgtacaacggatgctcaattagcatccatgaggttgttcagttcgaggatgttagcaattctaagctagcagttgttgatggaggagtaacatacaatggcatcatcgatgcaatgggtgaggagccaaagaaggatgagcacatagggatcgacatcaacgccatgtgctacataccggaggatatgaagtttctcaggtgccccttgatttgcttctacgccgttgagtggcagctcatccatcgcgtgctaaggcagttcggcttgcgtcaacccataccaaaaccattcccgacggggctcgacctccacaagttggacaacaagaagaacaagaagattacggactggcatgctcatcatctccatcttattgagcggtgggacaacacagcagctaacgcacgtgagctgatgaggtccgtgaacgacgcgggtgttgcccttggcacacctgctgggtcagagaatgaagttgggatacttcggagcgcacttcagaggctaaaacaacgaagttggatgttagcggcaagacttggttgtaggtccacagacgcagtcgacccacaaccaagactaacacggacacaggccggagaaacaagtcaacaaagagctaaagaggaaggggaggaagaacatgatgaaggggaggaagaacatgaggaaggggaagaaggagatggacagagtgacgaagaggaagaggaacaacccgaagaaatcgggtcatctcagcttgcaggtgccccgcagccatcgcaaccttcccagggtcgcccgcagagaaagagggtaccggtggaccgctactgcttgacctcagcgccaaatagaatggcgctgagattgtacaccgaaggaaacggccgtcacgcactcagcgccgatgcggtcggcgctgagatgttcaacctcagcgccatcggccctggcgctgaggtcggggtccagatctgtaattatgtacgatttgtttttataaatgaatcaacttttacattggaggccaccttttttaaatcaactagcacacgctccaacggtggcgatgagtcttcctcaccgccatcacctattgatacttggaccccacaaaggcctttgtaccataacggtatgtaccatttgttctacaagtacaacccgcatagcgcgctctgggacatcggcaacctctcctggggccactttgtctccggcgacctcctcaactgggccgctctcgacaccgcgctcgaccccacctcgccttttgacgccaatggctgctggtcgggctccgccaccatcctccccggcggcctcccggccatcctctacaccggcattgacgccggcaaggagcaggtgcagaacgtcgccttcgccaagaacccctccgatccgctcctccgtgagtgggagaagcccgcgtacaatccggtcatcgcgctcccgcccgacgtccccggcgacaacttccgcgacccctcgacggcgtggctcgggcgcgatggcctgtggcggatcgccgtctccgccgaggtggacggcgtggcgtccacgctcgtctacaggagcgaggacttcgtccggtgggagcggaacgccgcgccgctgcacgcgtcgcgcgccgccggcatggtggagtgcccggacatgttccccgtggcggagaacggcgaggatggcctcgacacgtcgacgaacggcgccggcggcgtgcgccacgtcctgaagctgagcgtgatggacacgctccaggactactacatggtcggcacgtacgacgacgcggcggacgccttctcgccggcggagcccgagcgcggcgacgactgccggagatggcggcggctggactacggccacacgttcccgaggaagatgtggatcgccaaggacggcaagcagctgctgcagtggccaatcgaggagatcgagacgctgaggaggaagcgcgccgccggtctccggcgaggcaccaggctaggcgccggcgcggtgcaggagatcgtcggcgtggcgagctcgcaggcggacgtggagattgaccattcggtggtggagagcttcggcggcggcgggcgggcgtgcatcacggcgcgggtttacccggagcacgtggcgacgagcagcagccatttgtacgtgttcaacaacgggagcgacgacgttaaggtggccaagctggaggcgtgggacctggcgacggcgaccgtcaacgttgttgttggagaccaccacggccttgctgcgccggcgttggagttggagccgacacgtacgacgcagtga

SEQ ID NO: 39567 - DNA, 4899 bp, Oryza sativa
  Clone ID: PAT_MRT4530_43094C.1
atgccgaagctggagctcctgatcgccgttcatcgggacatcgcggccgccgccgagagcctggactacctgattcgcgccttcaccaccgcgcagcacccacctcccgctcccggctccccgatcagcctagagtccgtccgcctccgcctcaccgcctgcgtactcgacgacgccgacgaagacgacgacggggcctatcactttgccggggacgagctcctgcgcgtcacaagcctgcagcacgccggcaacgctctcctccacaagcagctcggcggcggcatcgtcgaggacaaggtgcgggggctgggcgagctcctcctcggcctcgccacctccatgatcacggagggtccgatcccctcggtgctgttcgacgacgtcccggtgcagcaccctccgctatccaaggccaaactgctccagttcatgcagcaggcgaagcgccaaatccttgatgtttgggatgcgcggatctccgggcccaacttcgatggaatgagaggccaaactgctccagttcatgcggcaggcgaagcgccaaatctggaccctgacctcagcgctaaggtcgatggtgctgaggttgaacacctcagtgccaaccgcatcggcgctgagtacttgacggccctaaggcgaacggcgcaattggttgcttcgaagcttgatcgtactgactgtagagatgattcttttgacctcaatcgcacactgttttatgatgaaccaaactatgaagcatttgatgatgaaggagatatgaaaagtcagtcggttaagtctttgacagttgaggaagtcatagaatctcaagggatgggggttgatgttaacatgcaaaagaaggaagcagctgatgcgaatgagagaaggagtcatgaatctgaaagggtggagataaatgtggagttgcagaaggaggaagcagttgaggctaataagtcaagcaggcttgaatcagaaggggtggagataaatgtggaattgcataaggaggaagcaatagaggtgaatgaggcaaggagtcaggcagttccgatagttggaaatcatgttgatgatgataatgaagtggcagatggatcaatggggggaggtggagaagagcgtacaacggatgctcaattagcatccttggtgcggttttgttttcgagacaaaatatatactcggagggagtgtgaggagactttattgatgaatggattgagtgttgatttgctgcacgaacattcagaggagtatgatgacacacatgaggaggagggatatgaggttgagtatgccgtagactcagatgacgatcatccagtagccaagatgtctcaggaagaaagggaggtgtttgagaaattagttggacgcaatccagaggttgttcagttcgaggatgttagcaattctgagctagcagttgttgatggaggagtaacatacaatggcatcatcgatgcaatgggtgaggagccaaagaagggtttggaatttaaatctcttgagctattacagatatggctgcagagttactcgatcagtgtgcatcgtccattccatgtgaagcactccaacgcttctaaaaagtatacggttcgtgcaaggaagactaaggatgggaggtggagagttaccggtgtaggcaaagagcacacatgttgtagtgctgaggcttcgggcaagcacttgcaactaacttctaagttcatcggtaataggttgcaaccatttgtccgagctgagccgacattgactcctgctgctatagttgaggctgtggaggccatatggcactatcgtccttcgtacggtaaagcttggcgtgcaaagcaggtggccatgaacaacatatggggagattgggatgaggcatatgttcggatcccaatgcttctaaatgctattaaggctaagaaccccacaatgcattatgttgttgagcctcacccagagaggtcgaggccagttgatggggtaatgagacgtgtatttgggcgtgccgcatggatctttgggcagtgtgtggaggccttcaaccacatgcgtccagtgatagcaattgacgataccttcttgacagggaaatttcaaggtactttgctgacagcaattggttctgatgcgggtttgcaactagtccccttagcctttgctctggtagagagggagaataactacaactgggagtggttcatcagtatgattaggagatgcttgataggacccaagagagaagtgtgcatcatctcagatagacaccaaggcatcctacggtcaatcaacaatgtcatcccaggtcaccgtccaatacatcacagatggtgtatgcgtcacttgtgtgctaacttctacagcgctggtgcaactcaaattcagatgaaggatctagagcgcatttgtcaaataaatgagaagtctgagttcaagaaggaggtgaagcacctcattgatttccttgagcctcgaccaaagaagtggcttctagacattatgccacagaggcacaagtgggcacggtcctgtgatcctggaggtcgtagattcggcttcatgacgagcaacatggcagagagtttcaacaatgtgctcagaggcattcgtaggctaccagtaacagccatcgtggcatacacgttcagcaagtgcaatacgtggtttgttgataggcataagttcgtgacagctgcattacaaaagcgtgagaagtggccgaaaagaattaagaaggagcttgacatacagaaagcacgtactctgggccaacgtacgacttgcttcgacttccctacagcgaagtacgaagtgactgagcaaggtggagttacagaaggtggagtgcaatggggtggccgacattatacggtggttgcgacagccaacacttgtacatgccaatatccggaattgcaccacatgccatgctcccacatgttcactgtttgtaggctaagacgtatggatgcagaggcgccccctaggatatgctttgaagcttctaacgtagctttgcaacgtacatactcccctaggttcgagccatatctagatccaactcaatggccaagttacgacggtgaggtgtttgtaccagacttgtcaaagatgattgttactcctggcagaagaagaactaaaaggttcatcaatgacatggataggggatacaaggggatcggtcttggttggtcacagaagccgaatgatggcaattctgagcgtgtagtgcctaataggatggcgcaggccctagctttggagccgcagtacgaggagaggcaccgagctcgcaggatagcggagggagggggtctgaagccgttgcggattcgagggcacttggcagggcatatgcccttcgacaaccgctacatccctcgactaggggccgccaagctcacgccgttcatcaccatggctcagaggccaatgcttgtttacaacgggccagcactcacagcgctcatcgaccggtggcgactggagacacacaccttccaccttccttgtggcgagctgacggtgacactcgaggatgtcgccataatcctggctctccccatccaggggagagcggtcaccggtgacacgagctcgggtggtgacatggcttcctggatgtggcttcgtcttctaggggattggacagaggcagggcagtacagttggggttcggcagccctagcttgcttgtacaggcagttgtgtgatgcctgccagcgtctttctaacacctctaacctagcaggctgtgtgtggttgctacagatttggatgtggattaggcttcccgttggacgaccgatgtggcacaaccaccctcagtggccatggcagcaggaggagaggcgtcccacggttgcttttctttgggagcttgtcccacagccagtagtagggcgcaaaaatgaggcctactaccactacacaaatgagatggattgcctccagcctcagcacgtggtgtggcagccgtatgagcacatagggatcgacatcaacgccatgtgctacataccggaggatatgaagtttctcaggtgccccttgatttgcttctacgtcgttgagtggcagctcattcatcgcgtgctaaggcagttcggcttgcgtcaacccataccagaaccattcccgacggggctcgacctccacaagttggaccgcaggaagaacaagaagattacggactggcatgctcatcatctccatcttattgagcggtgggacaacacagcagctaacgtagtgcctcacggagtggagcacaacaagacatacttcgacgagtacctagcttggctcctgaggaactaccgccttttccttcggccggcatggactctagctgacatagctacagatcccgaggatgttgaggagatgaacgagtatgacgcctacactcgagcaggggcgacggtcgagtacgggcctgtacgtgaccgagtggcacgtgagctgatgaggtccgtgaacgacgcgggtgttgcccttggcacacctgctgggtcagagaatgaagttgggatacttcggagcgcacttcagaggctaaaacaacgaagtcggatgttagcggcaagacttggttgtaggtccacagacgcagtcgacccacaaccaagactaacacggacacaggccggagaaacaagtcaacaaagagctgaagaagaaggggaggaagaacatgatgaaggggaggaagaacatgaggaaggggaagaaggagatggacagagtgatgaagaggaagaggaacaacccgaagaaatcgggtcatctcagcttgcaggtgccccgcagccatcgcagccttcccagggtcgcccgcagagaaagagggcaccggtggaccggtacacaccttccactagtggccggaggggtcgacactag

SEQ ID NO: 39568 - DNA, 2106 bp, Oryza sativa
  Clone ID: PAT_MRT4530_43095C.1
caacaagaaggcgatcagctcgttcttcttctccctctcctccagcggcggccatggcgagattaggccttgccgtctgcgccgcctccttccacctcttccttcttcttgcgtagacctcctcgctccggcgagctcccacggaggcggacacggccaaccatgccagaagaactgcctatcacttccagcctgcaaagaactggcagaatgatccgaatgggcctatgtaccataacggtatgtaccatttgttctaccagtacaacccgcatagcgcgctctgggacatcggcaacctctcctggggccactccgtctccggcgacctcctcaactgggccgctctcgacaccgcgctcgaccccacctcgcctttcgacgccaatggctgctggtcgggctccgccaccatcctccccggcgccctcccggccatcctctacaccggcatcgacgccagcaaggagcaggtccagaacgtcgccttcgccaagaacccctccgatccgctcctccgcgagtgggagaagcccgcgtacaatccggtcatcgcgctcccggccgatgtccccggcgacaagttccgtgacccctcgacggcatggctcggccgtgacggcctgtggcggatcgccgtctccgccgaggtggacggcgtcgcgtccacgctcgtctacaggagcaaggacttcgtccggtgggagcggaacgccgcgccgctgcacgcgtcgcgcgccgcgggcatggtggagtgcccggacctgttccccgtagcggagcgcggcgaggatggcctcgacacgtcggcgaacggcgccggcggcgtgcgccacgtcctgaagctgagcgtgatggacacgctccaggactactacatggtcggcacgtacgacgacgcggcagacgccttctcgccggcggagcctgagcgcggcgacgactgccggagctggcggcggctggactacgggcacgtgtacgcgtccaagtcgttcttcgacgtgcgcaagaaccggcgcgttctgtgggcgtgggcgaacgagtccgacagccaggccgacgacgtcgcccgcggctggtccggcgtgcagacattcccgaggaagatgtggctagccaaggacggcaagcagctgctgcagtggccgatcgaggagatcaagacgctgaggaggaagcgcgccggtctctggcaaggcaccaggctaggcgccggcgcggtgcaggagatcgtcggcgtggcgagctcgcaggcggacgtggaggtggtgttcaagattccgagcctggaggaggccgagagggtggacgaccccaaccggctgctggatccccagaagctgtgcggtgagaagggcgccgccgtgcggggcggcgtcggcccgttcgggctcctcgtaatggcctccggcgacctgcacgagcacaccgccgtcttcttcagggtgttcaggcaccatgacaagtacaagcttcttatgtgcaccgacttgacaaagtcgtcgacaagagcaggggtgtacaagccggcttacggcggattcgtggacatggacatcgacgatcacaaaaccatatcgctgagaacgttgattgaccattcggtggtggagagcttcggcggcggcgggcgggcgtgcatcacggcgcgggtttacccggagcacgtggcgacgagcagcagccatttgtacgtgttcaacaacgggagcgacgccgttaaggtggccaagctggaggcgtgggacctggcgacggcgaccgtcaacgttgttgttggagaccaccacggccttgttgcgccggcgttggagttggagccgacacgcacgacgcagtgatctgaggcctgaagcggctggccggcactggcacagttggttcgatagtttgatggcatcgtgcagccgattggttgtgtggtgatttgttcgattgttgtgaacagggtgtatgatctgtgacagaaagaagagcacaaaagaaatcattcgatagtatacgtcacgtgctttatatgttttgctcttttgttatagtacgtattccctgcgtttcatctataaattgttcggcttttctcttaaaaaaaaaaaaaaaaaa

SEQ ID NO: 39569 - DNA, 529 bp, Oryza sativa
  Clone ID: PAT_MRT4530_43096C.1
gttggaccgtaggaagagcaagaagattacggactggcatgctcatcatctccatcttattgagcggggggacaacatagcagctaacgtagtgcctcacggagtggagcacaacaagacatacttcgacgagtacctagcttggctcctgaggaactaccgccttttccttcggccggcatggactctagctgacatagctacagatcccgaggatgttgaggagatgaacgagtatgacacccacactcgagcaggggcgacggtcgagtacgggcctgtacgtgaccgagtggcacgtgagctgatgaggtccgtgaacgacgcgggtgttgcccttggcacacctgctgggtcagagaatgaagttgggatacttcggagcgcacttcagaggctaaaacaacgaagtcggatgttagcggcaagacttggttgtaggtccacaaacgcagtcgacccacaaccaagactaacgcggacacaggccggagaaacaagtcaacaaagagctgaagaggaagggtag

SEQ ID NO: 39570 - DNA, 510 bp, Oryza sativa
  Clone ID: PAT_MRT4530_43097C.1
ctttcctcactcttctatagaaccaccgggccgcgactctttttaactattggatcccccgggctccatgaattcggcaccacgtctgtcgggtgcatgcggctgacatcttccatctctccctccttgccgactattactgctccggcgagctccgcctcaccgtggatcataacatcctgatccctaacgtcaacaaccacaacgttttatttttttctcccccacccgctgcttcataagttctccccgcagccgtctctgtatgctcaagtggcctgcctcccgtgcaccgggcaatcacttcctgcccgccatgcccttcatctcacacctaaacctccgtggcgcctcgctgcgttcacgtcccccacgttcgcaacaaaccttccgttgttcctggtgccccccccgggctgggtttcccgattcccacttgccaacccggtctgttcccccaatactcactcttgtccggcccaatgttttcaatgttccccccaaatcatt

SEQ ID NO: 39571 - DNA, 828 bp, Oryza sativa
  Clone ID: PAT_MRT4530_43098C.1
atgcatggagatcgtcacgctgatctggaccccgacctcagcgccaaggccgacggcgctgaggttgaacaactcagcgccaaccgcatcggcgctgagtacttgacggccctaaggggaggatggacggaacggcgcaatgtcagcgccgaccgacttggcgctgagcttcgggacctcagcgccatcgggtctggcgcggagatggatagattagtacgattgcactatggtggttcggtggtagagcaaagtaacagtggtaacaatttcgaggggatgagtgttaagcaacttatatttggtggaaaacctagttttgaggagttagtttgtcatacaaaggatgtgctggggtggagcaatcagtctatagctatacaaggtagatatgatgttggagcaggacccatttcacacaagtacatgctagatttgaatggggagttggagtggaacacatatgtggatatagtgttgggctcccaattcaagtcgcttgaggtggttgcttcgaagcttgatcgtactgactgcagagatgattcttttgacctcaatcgcacactgttttatgatgaaccaaactatgaaacatttgatgatgaaggagatatgaaaagtcagtcggttaagtctttgacagttgaggaagtcatagaatctcaagggatgggggttgatgttaacatgcaaaagaaggaagcagttgatgcgaagaaggaaaggagtcaggaatctgaaagggtggagataaatgtggagttgcagaaggaggaagcagttgaggctaataaggcaagcaagcttgaatcagaaggggtggag

SEQ ID NO: 39572 - DNA, 402 bp, Oryza sativa
  Clone ID: PAT_MRT4530_43099C.1
cattctgccagttctttgcagctggaagtgataagcagttcttctgccatggttggctgtgtcctccgtcgtggggtttagccggagcgaggaggtcgacgacagaagaaggcagaggtggaaggaacggcgcacacggcaagacctaatctcgccatggccgtcgctggaggagagggagaagaagaacgagctgatcgccttccttcttgttgctcgctctgaacttactctgaagaggaccccagaaatattaatagcccacgaaggatggcaatgggtcgggtcagacacgggtagagcaaaaccatgcccgacattgcccacccgaacactgcctactagagttagcgggcaaaactccatgcccgtacccatgcccggcgggcgcgagtatatcca

SEQ ID NO: 39573 - DNA, 447 bp, Oryza sativa
  Clone ID: PAT_MRT4530_4309C.1
cttcgtaactaagatgaagtatttttgaaactgttcattattgaaaaccaggcattttaacgcccttcattgattgtggatacaagaacactaacactaccgatctcgggagcagctcaatatccatttgagccggttcgcacagaaaccacacaaattgaaccattcaattcattctagtgagtggaacctacaccgatgaccaagaaattttccctcgctggattccaggaaataatttaccttaacagcatatgggggtaataacatgaacccacgcttgctttatcactgatatttgatgacattcctttggagcctgacatttatgccttctcttgcttacggaagagattcattgaatcgctgtataaagcaacataatttgttaggacagtaagcaccatcatggctacaggccagatcttggcactcttggatgcgatt

SEQ ID NO: 39574 - DNA, 318 bp, Oryza sativa
  Clone ID: PAT_MRT4530_430C.1
atggacgacgacgagaagccgacggtggcggcaggcgctcgtggcagcaaggtggccggcaccggcgccgtcgacgcatgcctggtcacggcggccatggcgggggcgtcactgctagcgtgttgggccgtggcgttccacccgtccaacagccaacgctcgcccgccgtccgctccgcccgctccgcccgcggctcacagccgctctgctgccgcgctcgcccgccgctcgcatcggcgctcgctgattccgcccgccgccggcccgaagaagggaggagagaagagagaaaagagaagaaaaggaaaaggaaatag

SEQ ID NO: 39575 - DNA, 558 bp, Oryza sativa
  unsure (1)..(558): unsure at all n locations
  Clone ID: PAT_MRT4530_43100C.1
ttgggaannaccatcncnggagatagganggnaacatctccggagagcaaagngaagagtgggattantaaagggaaaatgggaaaatntaaggatataagtacaacnaaaaaccagggtacnngaaggtcccattggaagactgaagtgcatgaccggaagatggcctaccagataagtccatcaaatgatactttgctggttaaacctggttcaagtatgcttctgctgcctgtgggatggtctgcattgaaaaattggactgcactgtaggtagtgtagtttaagtgatgctttaggttagatcatcgatagcatctatctgtgctcacacaattgccaatgttagtgtttcgaggtcgatgactcgttgatagaaattattttcttctaatgtatggacgggacaattgattgttcgtgacggcttgtatagtatagtaatggtggtcgagctagtgaaaggcaaagctacatgccactatgctagagattctggcgaagttcatggagtatgttttcgggctgattcaaaaaaaaaaaaaaaaaaannnaaan

SEQ ID NO: 39576 - DNA, 212 bp, Oryza sativa
  Clone ID: PAT_MRT4530_43101C.1
ccatgtacggcgtcgcctcttcgcgagggcgagcgtcacggcgccacctacgctaccggcgaagaagaggcgacagctgagaccgcactgtggcaagtaccggggttttctctcggattccgggtcatggctattctcttacggtgactccgacttttagagatctttgttgagtgctgacggtgatgcttgtgtgacgacgatgtgacatg

SEQ ID NO: 39577 - DNA, 273 bp, Oryza sativa
  Clone ID: PAT_MRT4530_43102C.1
cggacacgtggacggacacacagaccgacgcgtagcgctatgcaagcaacaatggtcgggagacatgtatatcaccaggccttggatgacgcggtggactcataccaaaccatgcctatattaactaaggatgcagacctatcttaacacacgctagaggtagaggtcaagctgatggaactgaaaacagacatgctgccagaagaactgaaagaggctggtgagctgcttattggagagggacctacatggatcataaacatgctgagtgct

SEQ ID NO: 39578 - DNA, 885 bp, Oryza sativa
  Clone ID: PAT_MRT4530_43103C.1
gcacgaggctgtctctgtctctctctctctctctctctccaccaccatcctcttaccttcccggtttcccggcgtgcgtcacagatggaggtggcagccgcggattcctccggcggcgaccgttacaggtctcaccttaccggcgacggcgagaagaacacggtgtggcggcacggcgctccacccacgtacgacgccgtgaacagcctcttcgaggccgagaggacccaggagtggccggcggggtcgctggaggagacggtgcagaacgcgatcaagacgtgggagatggagctgtcgcacaaggccaagctcgaggacttcaagtcggtgagccccggtcggttccgtctctccgtgaacggcgggcggccgctcaccggggaggagacgctcgccgtgggcagctacaacgcgctgctcacgagcccgatcctgccgggcgccggcgcgtacgacgccgcggccgagacgttcgagtcctcccacgatctgttccgcgcggccttcccgcgcgggttcgcgtgggaggtgatccgcgtctactccggcccgccggtgatcacgttcaagttccggcactggggccacatggacggcccctacaagggccacgcccccaccggcgacaaggtcgagttctacggcgtcgccgtcctcaaggtggatgagcagctgcgggcggaggacgtggaggtgtactacgacccaggcgagctactggggggccttctcaaggggcccctgctggtgccgtccgcggaggaggaggacgcgcgtcagctcggggagaggctcggcgaggcggctaccgtgtcggcgtcgggcgcggccccgcaggcgcaggcctgcccctttctcgcctccgcgaagcgggaggtgtga

SEQ ID NO: 39579 - DNA, 667 bp, Oryza sativa
  unsure (1)..(667): unsure at all n locations
  Clone ID: PAT_MRT4530_43104C.1
ccggccgggccgcgaccagggccgcgccttcatggccatgagccgccagcgcaagctctacaccaacatccccagctctcgttggggcgacgacgggagttacatgtgttcgttgtggacggaggtggtgttcaagcaccccaagacgttcgagacgctggcgatggatccggagaagaagagggagataatcgacgacctcgacatgttcaagaacggcaaggagcagcaccggcgagtcgggaaggcgtggaagcggggttacctgctgcacgggccgccggggacggggaagtcgacgatggtggccgccatggccaactacctcggctacgacgtctacgacatggagctcacgtcggtgcacaccaacaccgacctccgcaagctgctcatccagaccaccagcaagtccatcatcgtcatcgaggacgtcgactgctccagcaacctcaccggccggcgcaaggccaccggcgacggggaagacggcgacgacgacgccaagacgaccaccaagaaagtgatcgatcgcggcggcggcggcggcggcgtcggcggcgacagcaaggtgacgctgtccgggctgctaaacttcatcgancggctgtggtcggcgttcgnggaggagcggctgatcgtgctgacgacgaaccacgtcgaggac

SEQ ID NO: 39580 - DNA, 622 bp, Oryza sativa
  unsure (1)..(622): unsure at all n locations
  Clone ID: PAT_MRT4530_43105C.1
ctggtggntagtgaaccgtgacctacggcgcgccaggtaaactagtgagagagcgacttgcgagatggagagagggcgcgtctcccgcggcggcggcggcgacgagcggggagccgggagcggcggcggggacgatgaaggtggtggtggccgtggacgcgagcgaggagagggtgggggcgctgtcttgggcgctggacaacttcatcgggcgccgtgccggctccgtttcggtggtatgatgcctcgctgcagttgtggtaggattttttttatgatttgttgtatggtttgtgttattttttttgtactaggttttttntttttgttttttattgatatgtatatgtttttattttttttttgttttttgttatttttatttttgtttatttggttgttgtggtttttttttttgtttcttgttatttttgttttttttttttttgttgttgtttttttgttttgtttgtattttttatttttttttttgttgttttttttttttttttcttttttggatttgttttttttttgtgttgtttgtttttttgtttttatttttttttgttattgtttttttttgtttgtgttttttttttttttttttttttttcttttt

SEQ ID NO: 39581 - DNA, 4000 bp, Oryza sativa
  Clone ID: PAT_MRT4530_43106C.1
gtcgctatccttttgcaggcactaacccacgttcccacgattccctccgcaacagcgcgtccacgttctttctcctgatagataaggaggccgcgagtccgatccgttttcttagcttctttcccggtgttagtttcttcttctccgcgcctgaattgctctcgcttcctcgcttctgatctcttgcgcgcacgagagaatggaaggagcagtgcctccgaaaccacaccttcgcctgagatctgcaccgggtaggcgggtgatcaggtttttggggagtgcctcccgcacgactgctcgactgctcatcgccatgtctggagttgccgccgccactgctggcggtggtggtacgccgccgacaggagctggatccggagctggtgcgccaggaggtgccgtgaacgacaacaacaacggaggcaattctgcctcaccatccagcggagggccattctcggggtatactcttctcctcctgctactgttgttagcgctattcctgttcccattgttagcgctatcgctatactatgtgcgctatgttcttgttcctgttctacataatgcctctagcatgttatcgtgttactggtatgttcctgttcctgacattcatgatgcgcatagtatgctactggttatgttaagatcaccctacactgcttatgccatgatcattgctttaactttttggattaaaatatgccgattaatgactatatttccaacaatccaaaaacctgataggtcattttcggtagttggctttgctgctgcactgaaaccacatgcttttgatggttcaaactataagagatggaaagcacgtgcactattgtggttgacagcgatgcagtgcttctatgtttcacggggcaaacgaagtgaaccacctctttctcctgaggaagaggctaagttcgaggcttcggattgcctgttccgtggagcattgatcagtgtactcgctgacaacatagtggacgtgtacatgcacatgccttctgggaaggacatgtgggatgcacttgaggccaagttcggagtttctgacgccggcagtgagctgtatgtcatggagcagttctatgactacaagatggtcgatgaccgttctgtagtagaacaagctcatgagattcagatgctggctaaagaacttgagaacaacaactgtgagttgccggacaagtttgtggcgggtggcattattgccaaactaccaccttcttggtcggactttgccacttctctaaagcacaagagacaagagttcagtgttcctgatctcattggctctttgggtgttgaggagaaggcgagggcaaaggacgtgcggggcaaaaaggttgagggaggttctagtgccaatatggtacagaagaagaaccctcatgcatcccacaacaacaagaaagtcaagcctgatgtcaaacccaaggctgcaaccaattttaagaagaaaggcaagggaaaggcaaagggagactgctttgtgtgtggcaagtatgggcattgggccaaggactgtcctgagcgcaaagacaggaagtctgccaacatggtcattagcgagggcggaggaacatcggggtacggtaaaatattacctacagttctctctgtttttcattcacctgattggtgggtggatactggtgctaatattcatgtcgggagaggttcctccttgttgatgggaaacgggtcgcttgcggctgttcatggtgttggtacggtcgatctgaagtttacttcgggaaagaccgtgcagctgaagaacgtgcagcatgtcccttcaataaagaagaatctagttagcggctctctattgtgtagagaaggttttagacttgtgtttgagtccaataaatgtgtcgtttctaaatatgggacttttgttggaaaaggttccaagtgccatacttgtgttcaatcgaaacaacctcgcaaggctcacaaggcgtctgaggcgaggaatttggcacctctagaacttgttcattccgatttgtgcgaaatgaacggcgtgttgactaaagggggaaagaaatatttcatgacactgatagatgattgcactagattttgctatgtgtatctattgaaaacaaaggatgaggcattgcattactttaaaatctataaagctgaggtagaaaaccaacttgaaaggaaaatcaaacggttgaggtctgatagaggtggggagtatttttccaatgagtttgcatccttttgcgaagagtttggaattattcatgagatgatgcctccctattcaccccaatcaaatggggtggccgaaagaaagaaccgtactctaactgagatggtgaatgccatgttagacactgcggggctttccaaggaatggtggggtgaggcagttttgactgcgtgtcatgtcctgaataaaattccaatgaagcataaggaagtaaatgtacctatagccaaaaagcggaaacttggaccaaaaactgttgattgtgtgttttttggttatgctatccacagtgtgggttatagattcttaatagtaaactctggagtacccgacatgcatgctggtacaattcttgagtctagagatgctacattctttgagaatgaatttcctatgaaatatacacctagcacttctagtaaagaaactgtcatgccccatgagcactttgcaccgatagaacacaatgatcaaacgcctgaggaaaatcctgaggaggacaacattgtagatactcgcaagcgtaagagacaaagggttgcaaaatcctttggagatgactacattgtatacctcgtggatgacaccccaagaaccatagaagaggcatattcatctcctgacgctgactactggaaggaagcagtacgcagtgaaatggactcgattatgtctaatggtacttgggaagtcgttgagcgtccatatgggtgcaagcccgtaggatgcaaatgggttttcaagaaaaaacttaggcctgatggtacaatcgaaaagtacaaggcaagacttgtggccaagggttatacccaaaaggaaggcgaggacttcttcgacacatactcaccagttgctcgcttgaccacgattcgagtactacttgctctggcagcctctcatggtcttctcgtccatcagatggacgttaagacagctttcctaaacggagagctggaggaggagatctatatggatcaaccagacaggtatgtactagaaggtcaggagggaatggtgtgtaaactattgaaatccttgtatggcctcaagcaagcaccaaagcaatggcatgagaagtttgacaccacgcttacatctgcaggctttgttgtgaacgaagctgacaaatgtctatactatcgctatggtgggggagaaggggtgatcttgtgcttatatgtcgatgacatactgatctttgggaccagccttaatgtgattgaggaggtcaaagactatctgtccaagagttttgaaaagaaggatttgggagaggctgatgttattcttaacatcaaactacaaaaaggagatgagggtgggattacacttgtgcaatcccactatgtggacaaggttttaagtcgctttggatatagtgactgcaagccagctcctactccttatgatcccagcgtgctattaaggaaaaaccgaagaatagtaagggatcaactgagatactctcaaatcattggttcattgatgtacttggctagcgcaacgaggcctgacatctcatttgctgtaagcaagctgagccggtttgtctcaaatccgggagatgatcattggcaggctctggaaagagtaatgcgctatttaaagggcactacgagctatggaattcactataccgggtatccaaaagtactagaagggtatagtgactcaaactggatatctgatgctgatgagataaaagccacaagtggatatgtgttcacacttggaggtggcgctgtttcctggaagtcttgcaagtag

SEQ ID NO: 39582 - DNA, 729 bp, Oryza sativa
  unsure (1)..(729): unsure at all n locations
  Clone ID: PAT_MRT4530_43107C.1
cgattcaatccgccctggggacggcggattcggcgccggcgatccggccggtcgccgccgcgtccgatttggtgcggatttcgtcggagaaatcgcgtcttgaccttcctgtgcctcttttttttttgttgctcgtgggggatttcaggagaagaggggggcggcgtcgcatggcgactacgacgagcaagatcgccgggtgaaaggcgccgaggtgttcgtcggcgggttgccgcggtcggtgacggagcgggcgctccgagaggtattttctccttgtggagagattgttgatttgcggataatgaaagatcagaatggcatttcaaagggatatggctttgtgcgatttgcggagagggagtgtgcttatattgctaaaaggcaaataaatggttttgagcttcaaggaaagagacttgctgttgatctttcgttggatcaagatacactcttctttgggaatctttgcaaagactggggcatcgaagaatttgaagaattgattcgcaaggcattagaagatgttgtttcggttgaccttgcaatggctcgaaaccatgactcttcagttgggaaaagacgtctaaatcgaggctttgcatttgtgcgattntcttctcatgcagctgcagcacgcgtacttcgtattggttccagaacagattttctgcttggtggattgcatccttcaataaattgggctgagaaggagtctcatgtagatga

SEQ ID NO: 39583 - DNA, 654 bp, Oryza sativa
  Clone ID: PAT_MRT4530_43108C.1
cggaatcgcaattcccaccaggcagataaccaaaggcttcctcctcctctccctcgcggcggcggcgcggcgtctatcctcctccaccggcggcaaggcatctgagctcaacagcaagcaaatggcaggtggcagaattgcacatgcgaccctcaaggggccgagcgtggtgaaggagatctgcattgggctcacccttgggctggtcgctggtggtctgtggaagatgcatcactggaacgagcagaggaagactagatccttctacgacatgctcgagaagggccagatcagtgttgtcgtcgaggagtagtcttttgtgttgaaagtcttttgcctttgttttttgcaagttatttctgaaactctctggagagcatgacaaagctagtgccgtggagattgtcatgaaaaataagcatagcaatttgagaacatttgatctcgttgaatttgcttcttttcttgtattatcttaaaatctgtctttaatatatgccagtaacagcttaagggattggatggcttccccctgacattaatctgatttagtttcttttgcttattttcctgtcaccatttgagattgtgattatgcccatccttttcagtgtggatgcgatggtggaaattggatacctaatgagtcatttg

SEQ ID NO: 39584 - DNA, 4429 bp, Oryza sativa
  Clone ID: PAT_MRT4530_43109C.1
tccgcacgactgctccgctccagttcgtcttcctctgcatcgtcttcgccaacatgtcgaacaccggtgacaacagcaacactggacacaaggagaaggaggctcccgccaacaccaacggaggcaatactgcctcaaattctagcaaagggccattctcagggtacaactcaactttcatcgtgttcatgttcttttctcaaatactactgttaggtgcaatgttttcattgcattcccatgtgacaaatgtttatgcttattctatattaagcatgatatgtagtcagtggcagacgtaggtttaaaatacagatttggcggcagagctagccctaattagttgcactagtttattccctgcagatgtcatacttattgtcttaatattttagattaaaatatatcgaattgtgaccatatttctaacaattcaaaaacctgataggtccttttcggtagttggctttgccgcatcactgaaaccgcacgctttcgatggttcaaactataagagatggaaagcatgtgcagtattatggttgacagcgatgcaatatttctttgtttcacggggcaaaccgagtgaaccgcctctctctcctgaggaggaggccaagttcgaggctgcagattgcctgttccgtggagcattgatcagtggtgctcgccgacaacatagtggacgtgtacatgcacatgcctttagggaaggaaatgtgggatgcacttgaggcgaagttcagggtttccgatcctagcagtgagctgtatatcatggagcagttctatgactaagagatggtcgatgatcgatctgtagtggaacaggctcatgagatacagatgctggcaaaggaacttgagaacaaccgctgtgagttgccatacaagtttgtggcgggaggcatcatcgccaaattgccaccttcttggtccgactttgctatttctctaaaacacaagaggcaagagttcactgtcactgatctcatatgctctttgggtgttgaggagaaggcgagggcaaaggacaaccgcggcaaaagggtggaggggagttctagtgtcaattaagcatcccataacaacaagaaagtcaagcctgatgtcaaactaaaggctacgaatacttttaagaagaaaggcatgggaaagcctaagggtgactgctttgtgtgtggcaagcctgggcattaggccaaggactgtcctaagcgcaaagacagaaagtttgcaaacatggtcattagcgagggtggacgaacatcggggtatggtaaatttttacctacaattgtttctgtctgtcactcacctgattggtgggttgacactggtgctaatatccatgtgtgtgctaacatttccctgttttcttcttatcaggccaggagaggttcctccttattgatgggaaatgggtcgcttgcggctgttcttggtgttggtacggtcgatctgaagtttacttcgggaaagaccgtgcagctgaaaaacatgcagcatgtcctttcaataaagaagaatctagttagcagctctctactatgtagagatggttttagactggtgtctgaatctaataaatgtgtcgtatctaaatatgaaacgtttattggaaaaggttttgacagcggaggcttgttccgcttctctttggataacatgtgtaataagattgtgaactatgtaagcaatgatgacgagtcaaatgtgtggcattcgcgactctgtcatgtgaactttggttgtatgacgcacttagacaacatgagtttaattccaaaatttactttagtgaaaggtgccaagtttcatacctgtgttcaatcgaaacaacctcgcaagcctcatagggaatttgaggcgaggaatttggcacctctagaacttattcattctgatctgtgcgaaatgaatggcgtgtagactaaagggggaaagaaatatttcatgacactgatagatgattgcactagattctgctatgtgtacctattaaaaacaaaggatgaagcattacattactttaagatatatatggctgaggtagaaaaccagctggaaaggaaaatcaaacggttgaggtctgataggggtggagagtttttccaatgagcttacctctttctgcgaagagtttggaattattcatgagaggatgcctccatattcaccctagtcaaacggagtagccaaaagaaagaactgcactctaactgagttggtgaatgccatgttagacaccgcgggactttccaaggaatcgtggggtgaggcaatcctgattgcatgtcatgtcctgaatagaattcctaccaagcataaagaagtaacaccattcgaggaatgggaaaggaggaaattaaatctctcatacctgctcacttggggttgtttggccaaggtaaatatatctataggtgcaaacttggaccaaagaccgtagattatgtgttcctcggttatgctatccatagtgtgggatataggttcttaatagtaaattctggagtacctgacatgcgtgttggtacaattactgagtctagagatgctacatttagcacttctagtgaagaacctatcttaacccctgagcattttgcaccgatagaacacattgatcaaacgcctgagggaaatcctgaggaggataataatgtagctactcgcaagagtatgagacaaagtactgcaaagtcggtttgtgatgactacattgtatacatagtggataacactccaagaaccatagaagaggcatattcatctcctaacgctaattattggaaggaagcggtacacagtgagatggactcgattatgtctaatggtacttgggaagttatcgagcgtccatttgggtgcaagccataggatgcaaatgagttttaaagaaaaatcttaggcttgatggtacaattgaaaagtacaaggcaagacttgtggccaagggttatacccaaaaggaaggcgaggattttttgacatttactcatcggttgcttgcttgaccacgattcgagtattattcgctacggcagcctctcatggtctacttgtccatcagatggacgttaagatagctttcctcaatggagagttggaggaggagatccatatggatcaaccaaacgggtatacattggaaggtcaggagggaataatgtgcaagctgttgaagtccttgtatacattggaagctgttgaagtcctcaaacaagcgcctaagcaatggcatgagaagtttgataaaacacttacatctgctggctttgttgtgaacgaagctgacaaatgtgtattctatcgctatggtgggggagagagagtgatcttgtgtttatatgtcaatgacatgtcgatctttgggaccagcctcaatttgattgaggaggtaaaggactttctatccaaaagctttgaaatgaaggatttgggagtggctgatgttattcttaacattaagctactgagaggagatgagggtgggattacacttgtgcaatctcactatgtggacaaagtcttgagtcgctttggttatagtgactgcaaggcagctcctactccttatgatcccagtgtgctattaaggaaaaaccgaagaatagcaagggatcaattgagatactctaagatcattggttcattgatgtacttagctagtgcaacgaggcctgacatctcatttgctgtgaacaagttgggccggtttgtttcaaatccgggagatgatcattggcatgctcttgaaagagtaatgcgctatctaaaagggataatgagctatgaaattcactacgtcgggtacccaaaagtgctggagggctatagtgagtcaaactggatatttgatgctgatgagataaaggccacaagtgggtatgtgttcacacttggagggggcgctgtttcctggaagtcttgcaagcagaccatcttaacgaggtcaacaatggaagcagaactcacagctttagatactgccacagttaaggccgaatggcttcgtgagctcctgatggacttgccggtggttgaaaaaccagtaccagcaatcctgatgaattgtgataatcaaacagtgattattaaagtgaacagttcgaaggacaacatgaagtcatccaggcatgttaaaagaagactgaagtgcctccgaagctccgtccgcttgagaacctgcacgggtaggcgggcgatcaagtttttgggtagcgcttcaagcgcgactgctctcgttcttcgcggctactgctgctacatcggcgccttcaccaagatgtcaacggagattggagacaagaagatgaacgacatcaacggaggcaatactgcctcaaaatccagcgcgcatagggatggggggtgccaggcccaccccggcacccccggtggcttcgccactggaggtggatga

SEQ ID NO: 39585 - DNA, 566 bp, Oryza sativa
  unsure (1)..(566): unsure at all n locations
  Clone ID: PAT_MRT4530_4310C.1
acctgttaacctcatacttacttacaaaacaatatcagaagtttcctctcactgacagaagaatcacacccaagaacataatcaccatggtaattaaaccctctaactaatacttctcctcaagtcaataatcaccagctacagtaaatcagcgatgcaaatcatttcttcattacaggactaagactaggcaattttttaggcaactgcagaatccaactcaagtttaggcaaattttttttgagccattctatgacacctggggcccacatgtcggttcctctttccggcgtcccggcgcgccggcggccaccgccgacaccagcgcgtcgtagccgtccgccgacgcgtcggcgaactcggccatggcgccggtcaccgcggccatgccggcgcagagcacgcgcccggccatgccctccatgccagtggccacgcccgagcacaccgacccgacgccggcgacgaaagaagtccagcccgtccatcacccgcgcctccgacgccgngtngaccgcgtgcccccactccatgcacaccgcgaacgccagcggcagcgcggcgg

SEQ ID NO: 39586 - DNA, 4612 bp, Oryza sativa
  Clone ID: PAT_MRT4530_43110C.1
tcaattctgattgatcgcatcgttactgcggcaacggatgcgaatcctctctctccttgcgctattaggacgagacagcgacacacgaataggctctccacgaattctctccattgctggttcatcctctgtgcctatgttgcttctgttcttccccggttctaatcgcttgcacgcacaagtgattgggacgagcagggcctccggaaccacacccttgcctgagatctgcacgggtaggcgggtgatcaggtttttggggagtgcttcccgcacgactgctcgtcctcactatgtctgcgcctggagccggcgccgctgctactggaggagatggcgcacctggagccggaggtggcgcgccaggatccggaggtggtgcggcgaacaacaacaccaacggaggcaattctgcctcacaatccagcggagggccattctcggggtatatccctgtccttcttctgttcctgctgttagcgctctactgttttgttcctgttcctgatgttcatgatacctttagcatactattgcgttactgctatgttcctgttcctgatattcatagctatgttcccattcatgatgcgcatgatagtatgctactggttatgttatatgtttccactagatcaccctacactgtttatgccatgattattgtcttaacattttggattaaaatatgccgatttatgaccatatttccaacaatccaaaaacctgataggtcattttcggtagttggctttgctgctgcactgaaaccacatgcttttgatggttctaactataagagatggaaagcacgtgcactattgtggttgacagcgatgcagtgcttctatgtttcacggggcaaacgaagtgaaccacctctttcttctgaggaagaggctaagttcgaggcttcggattgcctgttccaaggagcattgatcagtgtactcgctgacaacatagtggacgtgtatatgcacatgccttctgggaaggacatgtgggatgcacttgaggccaagttcggagtttctgacgccggcagtgagctgtatgtcatggagcagttctatgactacaagatggtcgatgaccgttctgtagtagaacaagctcatgagattcagatgttggctaaggaacttgagaacaacaactgtgagttgccggacaagtttgtggcgggtggcattattgccaaattgccaccttcttggtcggactttgccacttctctaaagcacaagagacaagagttcagtgtttctgatctcattggctctttgggtgttgaggagaaggcgagggcaaaggacgtccggggcaaaaaggtaaagggaggttctagtgccaatatggtacagaagaagaaccctcatgcatcccacaacaacaagaaagtcaagctttatgtcaaacctaaggctgcaaccaactttaagaagaaaggcaagggaaaggcaaagggagactgctttgtgtgtggcaagtctgggcattgggccaaggactgtcctgagcgcaaagacaggaagtctgccaacatggttattagcgagggcggaggaacatcggggtgcggtaaaatattacctacagttctctctgtttttcactcacctaattggtgggtggacactggtgctaatattcatgtatgtgctgacatttctctgttttcttcttatcaggtcgggagaggttcctccttgttgatgggaaacgggtcgcttgcggctgttcatggtgttggtacggtcgatctgaagtttacttcgggaaagaccgtgcagctgaagaacgtgtagcatgtcccttcaataaagaagaatctagttagcggctctctattgtgtagagaaggttttagacttgtgtttgagtccaataaatgtgttgtatctaaatatgggacttttgttggaaaaggttatgacagcggaagcttgttccgtttttctttgaatgacatgtgtaataatcataatgctgtgaaccatattagcgagaatgatgagcctaatgtgtggcattcgcgactctgtcatgtgaatttcggttgtatgacgcgcttagctaacatgagtttaattccaaaattcactttggtcaaaggttccaagtgccatacttgtgttcaatcgaaacaacaagaatttggcaagcctcacaaggcatctgaggcgaggaatttggcacctctagaatttgttcattccgatttgtgcgaaatgaacggcgtgttgactaaagggggaaagacatatttcatgacactgatcgatgattgcactagattttgctatgtgtatctattgaaaacaaaggatgatgcattgcactactttaaaatctataaagctgaggtagaaaaccaacttgaaaggaaaatcaaacggttgaggtctaatagaggtggggagtatttttccaatgagtttgcatccttttacgaagagtttggaattattcatgagaggacgcctccctattcaccccaatcatatggagtggctgaaagaaagaaccgtactctaactgagatggtgaatgccatgttagacactgcggggctttccaaggaatggtggggtgaggcagttttgactgcgtgtcatgtcctgaataaaattccaatgaagcataaggaagtaacaccattcgaggaataggaaaggaagaaattaaatctctcatacctacgaacatagggctgtttgaccaaggtaaatgtacctatagccaaaaagcggaaacttggaccaaatactgttgattgtgtgttcattggttatgctattcacagtgtgggttatagattcttaatagtaaactctggagtacccgacatgcatgttggtacaatgcttgagtccagagatgctacattctttgagaatgaatttcccatgaaacatacacctagcacttctagttaagaaactgtcatgccccatgagcactttgcaccgatagaacacaatgatcaaacgcctgaggaaaatcctgaggaggacaacattgtagatactcgcaagagtaagagacaaagggttgcaaaatcctttggagatgactacattgtatacctcgtggatgacaccccaagaaccatagaagaggcatattcatctcctgacgctgactactggaaggaagcagtacgcagtgaaatggactcgattatgtctaatggtacttgggaagtcgttgagcgtccatatgggtgcaagcccgtaggatgcaaatgggttttcaagaaaaagcttaggcctgatggtacaattgaaaagtacaaggcaaggcttgtggccaagggttatacccaaaaggaaggcgaggacttctttgacacatactcaccagttgctcgtttgaccacgattcgagtactacttgctctggcagcttctcatggtcttctcgtccatcagatggacgttaagacagctttcctaaacggagagctggaggaagagatctgtatggatcaaccagacggttatgtactagaaggtcaggatggaatggtgtgtaaactgttgaaatctttgtacggcctcaagcaagcacctaagcaatggcatgagaagtttgacaccacgcttacatctgctggctttgttgtgaacgaagctgacaaatgtgtgtactatcgctatggtgggggaggagtgatcttgtgcttatatgtcgatgacatattgatctttgggaccagccttaatgtgattgaggaggtcaaggactatctgtccaaagttttgaaatgaaggatttgggagaggctgatgttatccttaacatcaaactacaaagaggagatgagggtgggattacacttgtacaatcccactatgtggacaaggttttgactcctactccttatgatcccagcgtgctattaaggaaaaaccgaagaatagcaagggatcaactgagatactctcaaatcattggttcattgatgtacttggctagtgcaacgaggcctgacatctcatttgctgtaagcaagctgagccggtctgtctcaaatccaggagatgatcattggcaggctctagaaagagtaatgcgctatctaaagggcactatgagctatggaattcactataccgggtatccaaaagtactagaagggtatagtgactcaaactgaatatctgatgttgatgagataaaagccacaagtggatatgtgttcacacttggaggtagcgctgtttcctggaagtcttgcaagcagaccatcttaacgaggtcaacaatagaagcagaacttacatcactagatactgcgatagttgaggccgagtggcttcgtgaactcctgatggatttgccgatggttgaaaaaccagtgccagctatcctaatgaactgtgataatcaaacagtgattattaaagtgaacagttcaaaggacaacatgaagtcatctaggcatatcaagagaagactgaaatctgtcagaaagcagaaaaactccggagtgatagcattggactatgtccaaacggctagaaatctggcagatcagtttaccaaggggctaccacgtaatgtgatagacagtgcatcgagggaaatgggcttgatacccacc

SEQ ID NO: 39587 - DNA, 735 bp, Oryza sativa
  unsure (1)..(735): unsure at all n locations
  Clone ID: PAT_MRT4530_43111C.1
ccggccgggatcggcaggggaatcaagatgcgcagtgagcagtctcttgcatacgaagccgtcgtcgaacaagagacctttcgccaatggcagaggttgaatggcagaccgaagcccggagtgtcagagctgatgaacgacaagctggaataccacatcggtcttgattacgccgaggagttgtcagtgcagactcaatgggcccaagataaaaaggggctggaccatggtgcatttatcacactcggcgaccaagagctcattgaccgacactctgagagtcggggaatttcaccaacgagacttcggggcttgccggatgacatcaagtcagcaccaaacccactgtcagctctacagcctcgagccaactggaccaacatgcccctctatgccgactccttcacagagaccgtctccgctattgttcaccacaatggtgttggtatactcaagacacatcgatctacttggtgggacagaccatggtactttcaacacctccgacagcttcttcatattcgactgagagcaaagggggaggctgaagagcctctggcgacagtacagacgcccaatggccgtgtcagatactgggctacttctgcagagaatacgagcaagtatccgaggcgaatgaggaactcctgnaaacatgngttgngcaagatgaattttggagagatgtgtcggaaaagagcaagcgngagaggacctcctctggagtgtatgatg

SEQ ID NO: 39588 - DNA, 4263 bp, Oryza sativa
  Clone ID: PAT_MRT4530_43112C.1
atggccagtgacaagcttcgaagggcggcaaggtttttggggagcgcaaggcgcgactactcactgttcgtcaacgtctacttcgtcttcaccaatatgtcgaacactggacacaacagcaacactggagacaaggagaaggagactcccgtcaacaccaacggaggcaatactgcctcaaactccagcggaagaccattcttggggtataaccttattacattatttcaattagaagttttactgttaatgttcatcgcaatgtcaacattgtgtcattatgtgattgttgatgcttattcaatgttaagcatgctcatgttgattacattcaccactatcactggatcaaatcctattgtaaatatcatgtttattatcttgttattttggattaaaatatgccgaattatgaccaaatttctaacaatccaaaaacctgataggtcattttcggtagttggctttgctgctacactgaaaccacatgcctttgatggttcaaactataagagatggaaagcacgtgcactattgtggttgacagcgatgcagtgcttctatgtttcacggggcaaacgaagtgaaccacctctttctcctgaggaagaggctaagttcgaggcttcggattgcctgttccgtggagcattgatcagtgtactcgctgacaacatagtggacgtgtacatgcacatgccttctgggaaggaaatgtgggatgcacttgaggccaagttcggagtttctgacgccggcagtgagctgtatgttatggagcagttctatgactacaagatggtcgatgaccgttctgtagttgaacaagctcatgagattcagatgctggctaaggaacttgagaacaacaactgtgagttgccggacaagtttgtggcaggtggcattattgccaaactaccaccttcttggtcggactttgccacttctctaaagcacaagagacaagagttcagtgttcctgatctcattggctctttgggtgttgaggagaaggcgagggcaaaggacgtccggggcaaaaaggttgagggaggttctagtgccaatatggtacagaagaagaaccctcatgcatcccacaacaacaagaaagtcaagcctgatgtcaaacccaaggctgcaaccaattttaagaagaaaagcaagggaaaggcaaagggagactgctttgtgtgtggcaagtctgggcattgggccaaggactgtcctgagcgcaaagacaggaagtctgccaacatgatcattagcgagggcggaggaacatcggggtacggtaaaatattacctacagttctctctgtttttcattcacctgattggtgggtggacactggtgctaatattcatgtcgggagaggttcctccttgttgatgggaaacgggtcgcttgcggctgttcatggtgttggtacggtcgatctgaagtttacttcgggaaagaccgtgcagctgaagaacgtgcagcatgtcccttcaataaagaagaatctagttagcggctctctattgtgtagagaaggttttagacttgtgtttgagtccaataaatgtgtcgtatctaaatatgggacttttgttggaaaaggttatgacagcggaggcttgttccgcttttctttgaatgacatgtgtaataatcataatgctgtgaaccatattagcgagaatgatgagtctaatgtgtggcattcacgactctgtcatgtgaatttcggttgtatgacgcgcttagctaacatgagtttaattccaaaattcactttggtaaaaggttccaagtgccatacttgtgttcaatcgaaacaacctcgcaagcctcacaaggcatctgaggcgaggaatttggcacctctagaacttgttcattccgatttgtgcgaaatgaacggcgtgttgactaaagggggaaagaaatatttcatgacactgatagatgattgcactagattttgctatgtgtatctattgaaaacaaaggatgaggcattgcatttctttaaaatctataaagccgaggtagaaaaccaacttgaaaggaaaatcaaacggttgaggtctgatagaggtggggagtatttttccaatgagtttgcatccttttgcgaagagtttggaattattcatgagatgacgcctccctattcaccccaatcaaatggggtggccgaaagaaagaaccgtactctaactgagatggtgaatgccatgttagacactgcggggctttccaaggaatgcataaggaaaacaccattcgaggaatgggaaaggaagaaattaaatctctcatacctacgaacatggggctgtttggccaaggtaaatgtacctatagccaaaaagcggaaacttggaccaaaaactgttgattgtgtgtttcttggttatgctatccacagtgtgggttatagattcttaatagtaaactctggagtacccgacatgcatgttggtacaattcttgagtccagagatgctatattctttgagaatgaatttcctatgaaatatacacctagcacttctagtaaagaaactgtcatgccccatgagcactttgcaccgatagaacacaatgatcaaacgcctgaggaaaatcctgaggaggacaacattgtagatactcgcaagagtaagagacaaagggttgcaaaatcctttggagatgactacattgtatacctcgtggatgacaccccaagaaccatagaagaggcatattcatctcctgacgctgactactggaaggaagcagtacgcagtgaaatggactcgattatgtctaatggtacttgggaagtcgttgagcgtccatatgggtgcaagcccgtaggatgcaaatgggttttcaagaaaaagcttaggcctgatggtacaatcgaaaagtacaaggcaaggcttgtggccaagggttatacccaaaaggaaggcgaggacttcttcgacacatactcaccagttgctcgcttgaccacgattcgagtactacttgctctggcagcctctcatggtcttctcgtccatcagatggacattaagacagctttcctaaacggagagctggaggaggagatctatatggatcaaccagacgggtatgtactagaaggtcaggagggaatggtgtgtaaactattgaaatccttgtatggcctcaagcaagcacctaagcaatggcatgagaagtttgacaccacgcttacatctgcaggctttgttgtgaacgaagctgacaaatatgtatactatcgctatggtgggggagaaggggtgatcttgtgcttatatgtcgatgacatactgatctttgggaccagccttaatgtgattgaggaggtcaaagactatctgtccaagagttttgaaatgaaagatttgggagaggctgatgttattcttaacatcaaactacaaagaggagatgagggtgggattacacttgtgcaatcccactatgtggacaaggttttgagtcgctttggatatagtgactgcaagccagctcctactccttatgatcccagcgtgctattaaggaaaaaccgaagaatagcaagggatcagctgagatactctcaaatcattggttcattgatgtacttggctagcgcaacgaggcctgacatctcatttgctgtaagcaagctgagccggtttgtctcaaatccgggagatgatcattggcaggctctggaaagagtaatgcgctatctaaagggtactatgagctatggaattcactataccgggtatccaaaagtactagaagggtatagtgactcaaactggatatctgatgctgatgagataaaagccacaagtggatatgtgttcacacttggaggtggcgctgtttcctggaagtcttgcaagcagaccatcttaacgaggtcaacaatggaagcagaacttacagcactagatactgcgacagttgaggccgagtggcttcgtgaactcctgatggatttgccggtggttgaaaaaccagtgccagctatcctaatgaactgcgataatcaaacagtgattattaaagtgaacagttcaaaggacaacatgaagtcatctagacacatcaagagaagactgaaatctgtcagaaagcagaaaaactccggagtgatagcattggactatgtccaaacggctagaaatctggcagatcagtttaccaaggggctaccacgtaatgtgatagacagtgcatcgagggaaatgggcttgatacccacctaa

SEQ ID NO: 39589 - DNA, 402 bp, Oryza sativa
  Clone ID: PAT_MRT4530_43113C.1
atggtggcggagggcggcagggctcagatcgtgtgggtgggccctaacgctaacgcaacccgacggccaccacccaaaatatttcttctcgacggcagcgagtttctcctccgcttgttattccctccttccaaatctagcacaatggttgagcttgtgctcggggcccactcatcgagtactcaagttgccaccgcctcactcctcggcggtggcctacttgtgttccttcgtcgtggctcgagcgaaacttctagagccacacaccccactctgattaatctcgtcgacgcctcactcctcatagcagccaactcactctcctccgtcgtggcttgggcagagcaacctctagagcctacgtcctcctctgactaccctcaccatcgccaccgccactag

SEQ ID NO: 39590 - DNA, 4059 bp, Oryza sativa
  Clone ID: PAT_MRT4530_43114C.1
atgtcgaacactggagacaaggagaaggagactcccgtcaacaccaacggaggcaatactgcctcaaactccagcggaggaccattcttggggtataaccttattacattatttcaattagaagttttactgttaatgttcatcgcaatgtcaacattgtgtcattatgtgattgttgatgcttattcaacgttaagcatgctcatgttgattacattcaccactatcactggatcaaatcctattgtaaatatcatgtttattatcttgttattttggattaaaatatgccgaattatgaccaaatttccaacaatccaaaaacctgataggtcattttcggtagttggctttgctgctgcactgaaaccacatgcttttgatggttcaaactataagagatggaaagcacgtgcactattgtggttgacagcgatgcagtgcttctatgtttcacggggcaaacgaagtgaaccacctctttctcctgaggaagaggctaagttcgaggcttcggattgcctgttccgtggagcattgatcagtgtactcgctgacaacatagtggacgtgtacatgcacatgccttctggaaaggacatgtgggatgcacttgaggccaagttcggagtttctgacgccggcagtgagctgtatgttatggagcagttctatgactacaagatggtcgatgaccgttctgtagttgaacaagctcatgagattcagatgttggcaaaggaacttgagaacaacaactgtgagttgcctgacaagtttgtggcaggtggcattattgccaaactaccaccttcttggtcggactttgccacttctctaaagcacaagagacaagagttcagtgttcctgatctcattggctctttgggtgttgaggagaaggcgagggcaaaggacgtccggggcaaaaaggttgagggaggttctagtgccaatatggtacagaagaagaaccctcatgcatcccacaacaacaagaaagtcaagcctgatgtcaaacccaaggctgcaaccaattttaagaagaaaagtaagggaaaggcaaagggagactgctttgtgtgtggcaagtctgggcattgggccaaggactgtcctgagcgcaaagacaggaagtctgccaacatgatcattagcgagggcggaggaacatcggggtacggtaaaatattacctacagttctctctgtttttcattcacctgattggtgggtggacactggtgctaatattcatgtcgggagaggttcctccttgttgatgggaaacgggtcgcttgcggctgttcatggtgttggtacggtcgatctgaagtttacttcgggaaagaccgtgcagctgaagaacgtgcagcatgtcccttcaataaagaagaatctagttagcggctctctattgtgtagagaaggttttagacttgtgtttgagtccaataaatgtgtcgtatctaaatatgggacttttgttggaaaaggttatgacagcggaggcttgttccgcttttctttgaatgacatgtgtaataatcataatgctgtgaaccatattagcgagaatgatgagtctaatgtgtggcattcgcgactctgtcatgtaaatttcggttgtatgacgcgcttagctaacatgagtttaattccaaaattcactttggtaaaaggttccaagtgccatacttgtgttcaatcgaaacaacctcgcaagcctcacaaggcatctgaggcgaggaatttggcacctctagaacttgttcattccgatttgtgcgaaatgaacggcgtgttgactaaaggggtaaagaaatatttcatgacactgatagatgattgcactagattttgctatgtgtatctattgaaaacaaaggatgaggcattgcattgctttaaaatctataaagctgaggtagaaaaccaacttgaaaggaaaatcaaacggttgaggtctgatagaggtggggagtatttttccaatgagtttgcatccttttgcgaagagtttggaattattcatgagatgacgcctccctattcaccccaatcaaatggggtggccgaaagaaagaaccgtactctaactgagatggtgaatgccatgttagacactgcggggctttccaaggaatggtggggtgaggcagttttgactgcgtgtcatgtcctgaataaaattccaatgaagcataaggaagtaacaccattcgaggaatgggaaaggaagaaattaaatctctcatacctacgaacatggggctgtttggccaagtccagagatgctacattctttgagaatgaatttcctatgaaatatacacctagcacttctagtaaagaaactgtcatgccccatgagcactttgcaccgatagaacacaatgatcaaacgcctgaggaaaatcctgaggaggacaacattgtagatactcgcaagagtaagagacaaagggttgaaaaatcctttggagatgactacattgtatacctcgtggatgacaccccaagaaccatagaagaggcatattcatctcctgacgctgactactggaaggaagcagtatgcagtgaaatggactcgattatgtctaatggtacttgggaagtcgttgagcgtccatatgggtgcaagcccgtaggatgcaaatgggttttcaagaaaaagcttaggcctgatagtacaatcgaaaagtacaaggcaaggcttgtggccaagggttatacccaaaaggaaggcgaggacttcttcgacacatactcaccagttgctcgcttgaccacgattcgagtactacttgctctggcagtctctcatggtcttctcgtccatcagatggacgttaagacagctttcctaaacggagagctggaggaggagatctatatggatcaaccagacgggtatgtactagaaggtcaggagggaatggtgtgtaaactattgaaatccttgtatggcctcaagcaagcacctaagcaatggcatgagaagtttgacaccacgcttacatctgcaggctttgttgtgaacgaagctgacaaatgtgtatactatcgctatggtgggggagaaggggtgatcttgtgcttatatgtcgatgacatactgatctttgggaccagccttaatgtgattgaggaggtcaaagactatctgtccaagaattttgaaatgaaggatttgggagaggctgatgttattcttaacatcaaactacaaagaggagatgagggtgggattacacttgtgcaatcccactatgtggacaaggttttgagtcgctttggatataatgactgcaagccagctcctactccttatgatcccagcgtgctattaaggaaaaaccgaagaatagtaagggatcagctgagatactctcaaatcattggttcattgatgtacttggctagcgcaacgaggcctgacatctcatttgctgtaagcaagctgagccggtttgtctcaaatccgggagatgatcattggcaggctctggaaagagtaatgcgctatctaaagggcactatgagctatggaattcactataccgggtatccaaaagtactagaagggtatagtgactcaaactggatatctgatgctgatgagataaaagccacaagtggatatgtgttcacacttggaggtggcgctgtttcctggaagtcttgcaagcagaccatcttaacgaggtcaacaatggaagcagaacttacagcactagatactgcgacagttgaggccgagtggcttcgtgaactcctgatggatttgccggtggttgaaaaaccagtgccagctatcctaatgaactgcgataatcaaacagtgattattaaagtgaacagttcaaaggacaacatgaagtcatctagacacatcaagagaagactgaaatctgtcagaaagcagaaaaactccggagtgatagcattggactatgtccaaacggctagaaatatggcagatcagtttaccaaggggctaccacgtaatgtgatagacagtgcatcgagggaaatgggcttgatacccacctaa

SEQ ID NO: 39591 - DNA, 1185 bp, Oryza sativa
  Clone ID: PAT_MRT4530_43115C.1
atggcgagcagcagctcgccgtgtaagctcgtctcttgcggcgacaaccgccacttcatgttccgggttgacggggcggcgatacgccggcccgtcgggcgcatagtcaaggagacctgcgaaatcggcaatggctacacatgcgaagcatctcttttcgtgccgtcattactgggtgagagaaaggtgatgatgattctggccgtgacggtaaacagcgaccgagctcagtcgttggcgagagcgcacaaggtgttcattgacatggcactcttggacgataccaagtcgcctgttcttccgccgttcgccagatcggtgatgtcgccgtccgccgctgcaggtagcagtcctaagctgccgccgcccgtcgccgggagcaacctagctgctagctgcaaactggtagcctcgagggatcacctcttggccaactgtgtaaaaggcggcatcctggcggcgttgtgctgggttgtctttgttccctcgtcgccgcggtcgccgtactcgttgttagcccactgccttgccaccatgtcaaacggtcgagacctcaccgacgtctgcttcgacgtcgacggcaagagtttccacgcgcaccgcctcataatggcgcgtcagtcggaggtgtttagggcagagctacttggctccatggccgagagcaagatggagtgcatcaccatctccgacatgagcgcctccaccttcaagcacatgctccactacatctactgcaacgacctgcccacctgtgtaaaagacacagacgatcagtcctcctggatcttcgaattgcagcacctgctcgtcaccgccgatcgatacggagtggatacgttgaaggatttgtgcgaggacacgctctgcgctgacatcaccacggacacggtgacatcaacactggagctggcggagacgagatcatatccgaagctaagaacgtcctgtcttgtattcctatcgaatacacaaaatttcgccgaggtggcaacgactaaggagtactataatctgatacagagctacccgagtgtgctgtccgagataaggaacaggtttaagagaccacggccgtctctgatgctagctccgtcaaccgtcaccgaaaatcaaaacaagagaccacggctgtctcctaagctaactccatcagccgacaccaaagatgaaaacaacccttag

SEQ ID NO: 39592 - DNA, 771 bp, Oryza sativa
  Clone ID: PAT_MRT4530_43116C.1
ggtgtagtctccgtggaaattgtgtccttccagaaagaatctcaggtgtgtaccatgttggaaatatagtcattaatcggcatattttaatccaaaaagttaaagcaatgatcatggcataagcagtgtagggtgatcttaacataaccagtagcatattatgcgcatcatgaatgtcaggaacaggaacataacagtaacgcgataacatgctagaggcatcatgtagaacaggaacaagaacatagcgcgcacatagcgcacatagtatagcgatagcgctaacaacagtagcatgaggagaagattataccctgagaatggccctccgctggatggtgaggcagaattgcctccgttgttgttgtcgttcacggcacctcctggcgcaccagctccggatcgagctcctgtcagcggcgtaccacctccgccagcagtggcggcggcaactccagacatggcgatgagcagtcgtgcgggaggcactccacaaaaacctgatcacccgcctacccggtgcagaactcaggcgaaggtgtggtttcggaggcactgctccttccaatctctcgtgcgcgcaagagatcagaagcgaggaagcgagagcaactcaggcgtggagaaggagaaactaacaccgggaaagaagcgattaaaccggatcggactcgcggcctccttatctatcaggaggagaaagaacgtggacgcgctgttgcggagggaatcgtgggaacgtgggttagtggctgcaaaaggatagtgacg

SEQ ID NO: 39593 - DNA, 4314 bp, Oryza sativa
  Clone ID: PAT_MRT4530_43117C.1
atgtctggagttgccgccgctactgctggcggaggtggtacgccgccgacaggagctggatctggagctggtgcgccaggaggtgccgtgaacgacaacaacaacggagtcaattctgcctcaccatccagcggagggccattctcggggtatactcttctcctcctgctactgttgttagcgctattcctgttcccattgttagcgctatcgctatactatgtgcgctatgttcttgttcctgttctacatgatgcctctagcatgttatcgcgttactggtatgttcctgttcctgacattcatgatgcgcatagtatgctactggttatgttaagatcaccctacactgcttatgccatgatcattgctttaactttttggattaaaatatgccgattaatgactatatttccaacaatccaaaaacctgataggtcattttcggtagttggctttgctgctgcactgaaaccacatgcttttgatggttcaaactataagagatggaaagcacgtgcactattgtggttgacagcgatgcagtgcttctatgtttcacggggcaaacgaagtgaaccacctctttctcctgaggaagaggctaagttcgaggcttcggattgcctgttccgtggagcattgatcagtgtactcgctgacaacatagtggacgtgtacatgcacatgccttctgggaaggacatgtgggatgcacttgaggccaagttcggagtttctgacgccggcagtgagctgtatgtcatggagcagttctatgactacaagatggtcgatgaccgttctgtagtagaacaagctcatgagattcagatgctggctaaagaacttgagaacaacaactgtgagttgccggacaagtttgtggcgggtggcattattgccaaactaccaccttcttggtcggactttgccacttctctaaagcacaagagacaagagttcagtgttcctgatctcattggctctttgggtgttgaggagaaggcgagggcaaaggacgtgcggggcaaaaaggttgagggaggttctagtgccaatatggtacagaagaagaaccctcatgcatcccacaacaacaagaaagtcaagcctgatgtcaaacccaaggctgcaaccaattttaagaagaaaggcaagggaaaggcaaagggagattgctttgtgtgtggcaagtctgggcattgggccaaggactgtcctgagcgcaaagacaggaagtctaccaacatggtcattagcgagggcagaggaacatcggggtacggtaaaatattacctacagttctctctgtttttcattcacctgattggtgggtggatactggtgctaatattcatgtatgtgctgacatttctctgttttcttcttatcaggtcgggagaggttcctccttgttgatgggaaacgggtcgcttgcggctgttcatggtgttggtacggtcgatctgaagtttacttcgggaaagaccgtgcagctgaagaacgtgcagcatgtcccttcaataaagaagaatctagttagctgctctctattgtgtagagaaggttttagacttgtgtttgagtccaataaatgtgtcgtttctaaatatgggacttttgttggaaaaggttatgacagcggaggcttgttccgcttttctttgaatgacatgtataataatcataatgctgtgaaccatattagcgagaatgatgagtctaatgtgtggcattcgcgactctgtcatgtgaatttcgggtgtatgacgcgcttagctaacatgagtttaattccaaaattcactttggtcaaaggttccaagtgccatacttatgttcaatcgaaacaacctcgcaagcctcacaaggcgtctgaggcgaggaatttggcacctctagaacttgttcattccgatttgtgcgaaatgaacggcgtgttgactaaagggggaaagaaatatttcatgacactgatagatgattgcactagattttgctatgtgtatctattgaaaacaaaggatgagacattgcattactttaaaatctataaagctgaggtagaaaaccaacttcaaaggaaaatcaaactgttgaggtctgatagaggtggggagtatttttccaatgagtttgcatccttttgccaagagtttggaattattcatgagatgacgcctccctattcacccctatcaaatggggtggccgaaagaaagaaccgtactctaactgagatggtgaatgccatgttagacactgcggggctttccaaggaattgtggggtgaggcagttttgactgcgtgtcatatcctgaataaaattccaatgaagcataaggaagtaacaccattcgaggaatgggaaaggaagaagttaaatctctcatacctacgaacatggggctgtttggccaaggtaaatgtacctatagccaaaaggcggaaacttggaccaaaaactgttgattgtgtgtttcttggttatgctatccacagtgtgggttatagattcttaatagtaaactctggagtacccgacatgcatgctggtacaatttttgagtccagagatgctacattctttgagaatgaatttcctatgaaatatacacctagcacttctagtaaagaaactgtcatgccccatgagcactttgcaccgatagaacacaatgatcaaacgcctgaggaaaatcctgaggaggacaacattgtagatgctcgcaagagtaagagacaaagggttgcaaaatcctttggagatgactacattgtatacctcgtagatgacaccccaagaaccatagaagaggcatattcatctcctgacgctgactactggaaggaagcagtacgcagtgaaatggactcgattatgtctaatggtacttgggaagtcgttgagcgtccatatgggtgcaagcccgtaggatgcaaatgggttttcaagaaaaagcttaggcctgatggtacaatcgaaaagtacaaggcaaggcttgtggccaagggttatacccaaaaggaaggcgaggacttcttcgacacatactcaccagttgctcgcttgaccacgattcgagtactacttgctctggcagcctctcatggtcttctcgtccatcagatggacgttaagacagctttcctaaacggagagctggaggagaagatctatatggatcaaccggacgggtatgtactagaaggtcaggagggaatggtgtgtaaactattgaaatccttgtatggcctcaagcaagcacctaagcaatggcatgaaaagtttgacaccacgcttacatctgcaggctttgttgtgatcgaagctgacaaatgtgtatactatcgctatggtgggggagaaggggtgatcttgtgcttatatgtcgatgacatactgatctttgggaccagccttaatgtgattgaggaggtcaaagactatctgtccaagagttttgaaatgaaggatttgggagaggctgatgttattcttaacatcaaactacaacgaggagatgagggtgggattacacttgtgcaatcccactatgtggacaaggttttaactcctactccttatgatcccagcgtgctattaaggaaaaaccgaagaatagtaagggatcaactgagatactctcaaatcattggttcattgatgtacttggctagcgcaacgagacctgacatctcatttgctgtaagcaagctgagccggtttgtctaaaatccgggagatgatcattggcaggctctggaaagagtaatgcgctatctaaagggcactatgagctatggaattcactataccgggtatccaaaagtactagaagggtatagtgactcaaactggatatctaatgctgatgagataaaagccacaagtggataagtgttcacacttggaggtggcgctgtttcctggaagtcttgcaagcagaccatcttaacgaggtcaacaatggaagcagaacttacagcactagatactgcgacagttgaggccgagtggcttcgtgaactcctgatggatttgccggtggttgaaaaaccagtgccagctatcctaatgaactgcgataattaaacagtgattattaaagtgaacaattcaaaggacaacatgaagtcatctagacacatcatgagaagactgaaatctgtcagaaagcagaaaaactccggagtgatagcattggactatgtccaaacggctagaaatctggcagatcagtttaccaaggggctaccacgtaatgtgatagacagtgcatcgagagaaatgggcttgatacccacc

SEQ ID NO: 39594 - DNA, 4350 bp, Oryza sativa
  Clone ID: PAT_MRT4530_43118C.1
cgacaacaccaacggaggcagttctgcctcacaatccagcggagggacctttacagggtcattttcggtagttgactttgctgcaacactgaaaccgcatgcttttgatggttcaaattataagaggtggaaagcacgtgcactattgtggttgacagcgatgcaatgtttctatgtttcacggggtaaacgaagtgaaccacctctctctcctgaggaagaggttaagttcgaggcttcggattgcctgttccgtggagcattgatcagtgtactcgctgacaatatagtggatgtgtatatgcacatgccttcagggaaggacatgtgggatgcacttgaggccaagttcggagttttcgacaccggcagcgagctgtatgtcatggagcagttctatgactataagatggtcgatgaccgttctgtagtggaacaagctcatgagattcagatgctggctaaggaacttgagaacaacaactgtgagttgccggacaagtttgtggcgggtggcattattgccaaattgccaccttcttggtcggactttgccacttctctaaagcacaagagacaagagttcagtgttattgatctcattggctctttgggtgttgaggagaaggcgagggcaaaggacatctggggcaaaaaggtttagggaggttctagtgccaatatggtacagaagaagaaccctcacgcatcccacaacaacaagaaagtcaagcatgatgtcaaacccaaggctacaaccaattttaagaagaaaggcaagggaaaggcaaagggagactgctttgtgtgtggcaagcctgggcattgggccaaggattgtcctgagcacaaagacaggaagtctgccaacatggtcattagcgagggcggaggaacatcggggtacggtaaaattttacctacagttctctctgtttttcattcacctgattggtgggttgatacgggtgctaatattcatgtatgtgctgatattttcctgttttcttcttatcaggtcgggagaggttcctccttgttgatgggaaacgggtcgcttgcggctgttcatggtgttagtatggtcgatctgaagtttacttcgggaaagactgtgcagctgaagaacgtgcagcatgtcccttcaataaagaagaatctagttagtggctctctactgtgtagagaaggttttaaacttgtgtttgaatccaataaatgtgtcgtatctaaatatggaacttttattggaaaaggttatgacagcggaggcttgttccgcttttctttggatgacatgtgtaataataataatgttgtgaaccatattaacgagaatgatgagtccaatgtgtggcattcacgactttgtcatgtgaatttcggttgtatgacgcgcttggctaacatgagtttaaatccaaaattcactttggtcaaaggttccaagtgccatacttgtgttcaatcgaaacaacctcgcaagcctcacaaggcatctgaggcgaggaatttgcacctctagaacttgttcattccgatctgtgcgaaatgaatggcgtgttgactaaagggggaaagaaatatttcatgacactaatagatgattgcactagattttgttatgtgtatctattgaaaacaaaggatgaagcattgcattactttaagacctataaagctgaggtagaaaagcaacttaaaaggaaaatcaaacggttgaggtctgatagggatggagagtatttttctaatgagtttacatccttttgcgaagagtttggaattattcatgaaaggatgcctccctattcaccccaatcaaatggggtagccgaaagaaagaaccgtactctaactgagatggtgaatgccatgttagacactacgggactttccaaggaatggtggggtgagacagttttgactgcttgtcatgtcctaaataaaattccaatgaagcataaggaagtaacaccattcgaggaatgagaaaggaagaaattaaatctctcatacctacgaacatggggctgtttggccaaggtaaatgtacctatagccaaaaagcgtaaacttggaccgaatactgttgattgtgtgttccttggttatgctattcacaacgtgggttatagattcttaatagtaaactctggagtacccgacatgcgagttggtacaattattgagtccagagatgccacattctttgagaatgaatttcccatgaaaatacacctagcacttctagtcaagaaactgtcataccccatgagcactttgcaccgatagaacacaatgatcaaacgcctgagggaaatcttgaggaggataacattgtagatactcgtaagagtaagagacaaagggttgcaaaatcctttggagatgactacattatataactcatggatgacactccaaaaaccatagaagaggcatacttatctcctgacgctgactactggaaggaagcaatacgcagtgagatggactcaattatgtctaatggtacttaggaagtcgttgagcgtccatatgggtgcaaacttgtaggatgcaaatgggttttcaagaaaaagcttaggcttgatggtacaattgaaaagtacaaggcaaggcttgtggctaagggttatacccaaaaagaaggcgatgattttttcgacacctactcacccgttgcccgtttgaccacgattcgagtactacttgtcctggcagcctcttatggtcttctcgtccatcagatgggcgttaagacagcttttctaaatggagagcttgaggaggagatctatatggatcaaccagacgggtatgtactagaaggtcaggagggaatggtgtgtaaattgttgaaatccttgtatggccttaagcaagcacctaagcaatggcatgagaagtttgacaccacacttacatctgctggctttgttgtgaacgaagctgacaaatgtgtgtactatcgctatggtgagggagaaggagtgatattgtgtttatatgtcgatgacatattaatctttgggaccagcctcaatgtgattgaggaggtcaaggactttctgtccaagagctttgaaataaaggatttgggagaggctgatgttattcttaacattaagctactgagatgagatgagggtgggattacacttgtgcaatcccactatgtagataaggttttgagtcgctttggctacagtgactgtaagccagctcctactccttatgatcccagcgtgctattaaggaaaaaccgaagaatagcaagggatcaactgagatactcacaaatcattggttcattgatgtacttggctagtgcaacgaggcctgacatctcatttgctgtaagcaagctgagccggtttgtctcaaatccgggagatgatcattggcaggctctggaaagagtaatgcgctatctaaagggcactatgagctatggaattcactataccgggtacccaaaagtactggaagggtatagtgactcaaactggatatctggtgctgatgagataaagaccacaagtggatatgtgttcacacttggaggtggcgctgtttcctggaagtcttgcaagcagaccatcttaacgaggtcaacaatggaagcagagcttacaacaccagatactgcgacagttgaggccgagtggcttcgtgaactcctgatggatttgccggtagttgaaaaaccagtgccagctatcctaatgaaattgatcgtgtcgttactgcggcaacgggtggattcctctcctggattttctctcccctcctcttcctcaacggtggcgaatggaaatgacgacggcaaccgcagtggatggcgatggtggcgtcggcgaatggcaacgacgacggcaagtcggcaaccgcagcccaaggaggcataggcggagacggcagaggccgccaaaatcaacgccgcgccgcccgaatccggtggggacggaggcaacggaggtcggacggagccggatccagacgacgataatggcaacctcagggacgacgacagtggatggcgacggtgcagacgacggcgacagcggctggcgacctcgacgacgatggtggcactccggcgtgggttcaagatgctcgccatcgtgctctctgctgccggtccgcacttctgcgccgcatcgagctcggctccccaagaaccccaccacagcctcttcctcgccgggcgcccgcggcctagcgctcgcggccaaggggctccgccgcaccatcctggagatgcaggcgacgcatggaagccggtgctcgcggcagtgcacgacgcctgcgtcgaggggggttttggccagccggatggcttag

SEQ ID NO: 39595 - DNA, 2148 bp, Oryza sativa
  Clone ID: PAT_MRT4530_43119C.1
atgtttgtggggaacgcgaaacgcacctacacggactccaaggcaccttggggacaaatgaacaatagacagcaacgcgatcgaacagcgaaaggagaagaatttttctggcaatgcacacacaagacgcacctcgctgccgccggtcgcgccgtacgtgctgcacgcacgcagcacaattgcacatatatatggagctttgctttgctcagggattcccttgcacagttgcatctcgaactctcgacgcgacgaacatatatgcccaggcacgcacaatctcagcagtcagcaacgtgcatgcatgcatggatatatacagcacggcatgccatgcattgtgccaaaacactggaaacgagcaaacgatcgggtacgttcgcgacaaactcgcaagaaaataatgctgaagcgatgcatttcgcgtgcgcgccatgcgtcggcgtccacacgcccatgcgtggcccggctgcgctcgaccgcgcgcctcgttctcctcgcctctctcctcgtggtggccggtgggggcgttgccgttgccgtgcacaagggcggccgcgcgcccggtcgcgcgatcgattgccaacaaccgccgcgcgatgtgctgcgctagcaaactttacaacccagagacatcacgcacgcacatcctcgcctttcctcgttggccgcaaagatgcagcaaaagcctcgaccgctgtcgatttacacgatgagacgaaactggctcgtgtcgtgtcgtgctcccgctcccactccccgttccgcacatggctatcaccattctcatcgtctgttccggtgcacgcaagcctctgggcccgaggaagccgtagcggccctgtcaacatcgcggtcgtcgttgttctccgcttcctcattgtcgtcaagaaactcgcgcaagtggaggttctcgaaggatctcctccatcggagcaactccgaaagcggcaagaacccgtggccgcctttgcccaccccgcagcctcggtcgccagcgcctacggcgctagcccggtggggaggtggcgcgaatccgaggcgccgcctcctaatttttcccgcgccccaccccgcgctgtggcggctgttcctcctcctccttcccccgatccccaactccttccaactcacatggcggcggcggcggcggctgcgtccgtggcgagtcaagcgcaggccgtgctccgcggcaggctctgcgaccaggccgtcgtccactccgccctcaggtcctcgccggacaccaactacagtaagctgaagtacctcgtcgccagctccgtctccgaagcctgcaacaactccgtcctactcctcggcccccgcggctgcggaaaagccgcggtggtcgacatggttctagatgatctgaagaaggatcatcctgatgcaatatcagtggaaattgcgaggcaactttgtttggaacatcagttatcattttccaaaatggcttcttcagatgacaacacggaattcatgattgacatgttacgggagtgtggactagctcacaagacaataatttttgtcctagaagagtttgacctctttgctcaggggaagcagaggttactctatagcttacttgatgcaatgcaatctctcacctcacaagctgttgttattggtgtgagttgccgattggatgcagaccaactcctagagaaaagggttagatcccggttctctcataggaagcttctgtttgttccttcttcagtggatagtttacagaggttaatggagcacttgctagcacttcctgaagattctcccttaccaacaaagtatgtcagggagtacaatgcacggattactgtatcctttgctcaatgtgacatgtcactttatgtgcttacaaaacctgcagaatggatgctgaatgtgttcttttctatgctaaaaagaagccatggtggcaaactggcaatggcactgtttcttaggctaaatggaactgcttttgagcatcttttggatcgcgagttgattagctttgcagacaacaaagggagaaatcaggcgcttgaatatcgtcctgtcaaacttctgatatcttcacgtgagcttgctgagtccctcaagttgaacacgacctgccctgctgttttgcagaagcttcttgaccgtgaaagatacatg

SEQ ID NO: 39596 - DNA, 687 bp, Oryza sativa
  Clone ID: PAT_MRT4530_4311C.1
ctaaccacttagacgtttttcgatctcggcttctccttcgccgccaccgtgcctagggcaaccccacgccgacaccgccgtcgtctctcgctgtcgcttggcggtcctcgccgcctccgccgcagacgccgccgccgcatcacttgggtgagagccgccgttcgacgcgaccgccgccgccgacgacgccgtcgccactgccacgaacgtcgcccacgcctcgagctcgccacgcctccgcaccacgccgccgcgacgccacgccgtcgccactgccactccgccgccaccgcctcgagctcgccacgccgccgtgacgccacgccgcggccgacgcgcgccgccgccgcgcccccacgccgccgggccccgacgccgccgccgcgcctgcacgccgccgggccccgacgccgctgcgcccccacgccgccgggccccctcgccgccgccgccgcgcgccgccgccacgctcgcacgccgccgggccggcccacggtgccccgacaccaccgccgcgccaccacgccactgccgcgcgcgcccaacattgccgaacgtgattgaaacgtgaccgaacgcgaacgaacgtgaacgatacgtggacgacctttgaacgaacgattttcctggtaatgttgtagagaagacgtcgtcgttgtccctaaagccgaagtggtagctagccat

SEQ ID NO: 39597 - DNA, 504 bp, Oryza sativa
  Clone ID: PAT_MRT4530_43120C.1
tgttccattttacgtgatttgtttgtatgagatagtggagtaaaccaggtagccataattagaaggagcaaataataacactgaatttaatactaacatctaaacggtgcgagcaagattataaatagtaataagaaaaaaaatggtactaaataatattagcaaatatatctacgacacgatgaggtggtttacgacgtggagcagccgccgcccctccaccctactggtggatcactggcgcttcctttaggaagagctgcttcaatctgagcaacgtgatgtcagccggcatggggatgctctccgtgcagtacgtgctgtcgtagagcatgtggcttagcctggcggtcgatctcccctatatttggcgctatctgcttctacaccggcaacctaaacaaccgctgcatgcgcactgaccactgcgtcagaagctacccggacatcggccacctagtgatgaatctagaatgtaaattaaggtgggaatgtgtaaaagct

SEQ ID NO: 39598 - DNA, 3881 bp, Oryza sativa
  Clone ID: PAT_MRT4530_43121C.1
atggcgcacctggagctggagccggagccggtgccgggaacgtcaacaccaatggaggcaattctgcctcacaatccagtagagggccattctcggggtatatcattctcctgttgttagcgttgttaatcctgttagtcgcaatgttaatcctgttagtcgcaacttgctatgttcctgttcctgatgttcatgatgcctatagcatactagttatgttacatgttcctgttcctgatgttcatgcctttagcatactactggttatgttatatgttgtcactagatcatcctacactgttcatgccatgattattgtcttaacgttttggattaaaatatgccaatatatgaccatatttccaacaatccaaaaacctgataagtcattttcggtagttggctttgatgctgcactgaaaccacatgcttttgatggttctaactataagagatgtaaagcacgtgcactattgtggttgacagcgatgcaatgcttctatgtttcacggggcaaacgaagtgaaccacctctttctcctgaggaagaggctaagttcgaggcttcggattgcctgttctgtggagcattgatcagtgtactcgctgacaacatagtggacgtgtacatgcacatgccttccgagaaggacatgtgggatgcacttgaggccaagttcggagtttctgacgccggcagtgagctgtatgtcatggagcagttctatgactacaagatagtcgatgaccgttctgtacacaagagacaagagttcagtgtttctgatctcattggctctttgggtgttgaggagaaggcgagggcaaaggacgtccggggcaaaaaggttgagggaggttctagtgctaatatggtacagaggaagaaccctcatgcatcccacaacaacaagaaagtcaagcctgatgtcaaacccaaggctgcaaccaactgtaagaagaaaggcaagggaaaggcaaagggagactgctttgtgtgtggcaagtctgggcattgggccaaggactgtcctgagtgcaaagacaggaagtctgccaacatggtcattagcgagggcggaggaacatcggggtacggtaaaatattacctacagttctctctgtttttcacccacctgattggtgggtggatactggtgctaatattcatgtcgagagaggttcctccttgttgatgggaaacgggtcgcttgcggctgttcatggtgttggtacggtcaatctgaagtttacttcgggaaagaccgtgcagctgaagaacgtgcagcatgtcccttcaataaagaagaatcttgttagcggctctctattgtgtagagaaggttttagacttatgtttgagtccaataaatgtgtcgtatctaaatatgagacttttgttggaaaaggttatgacagcggaggcttgttccgcttttttttgaatgacatgtgtaataatcataatgttgtgaaccatattagcgagaatgatgagtctaatgtgtggcattcgcgactctgtcatgtgaatttcggttgtatgacgcgcttagctaacattagtttaattccaaaattcactttggtcaaaggttccaagtgccatacttgtgttcaatcgaaacaacctcgcaagactcacaaggcatctgaggcgaggaatttggcacctctagaatttgttcattccgatttgtgcgaaatgaacggcgtgttgactaaaggtggaaagaaatatttcatgacactgatagatgattgcactagattttgttatgtgtatgtattgaaaacaaaggatgaaacattgcattactttaagatctataaagctgaggtagaaaaccaacttgaaaggaaaatcaaacggttgaggtttgatagaggtggggagtatttttccaataagtttgcatccttttgcgaagagtttggaattattcatgagaggacgcctccctattcaccccaatcaaatggggtggccgaaagaaagaaccgtactctaactaagatggtgaatgccatgttaggcactgcggggctttccaaggaatggtggggtgaggcagttttgactgtgtgtcatgtcctgaacaaaattccaatgaagcataaggaagtaacaccattcgaggaatgggaaaggaagaaatcaaatctctcatacctacgaacatggggctgtttggctaaggtaaatgtacctatagccaaaaagcgaaaacttggaccaaatactgttgattgtgtgttccttggttatgctattcacagtgtgggttatagattcttaatagtaaactctggagtacctgacatgcatgttggtacaattattgagtccagagatgctacattcttcgagaatgaatttcccatgaaacatacacctagcacctctagtcaagaaactgtcatgtcccatgagtactttgcaccgatagaacacgatgatcaaacgcctgaggaaaatcctaatgaggacaacattatagatactcgcaagagtaagagacaaagggttgcaaaatcctttggagatgactacattgtatacctcgtggatgacaccctaagaaccatagaagaggcatattcatctcctgacgctgactactggaaggaagcagtacacagtgaaatggactcgattatgtctaatggtacttgggaagtcgttgagcgtccatatgggtgcaagcccgtaggatgcaaatgggttttcaagaaaaagcttaggcctatgatggacgttaagacagctttcctaaacgaagagctggaggaggagatctatatggatcaaccagacgggtatgtactagaaggtcaggagggaatggtgtgtaaactgttgaaatccttgtatggcctcaagcaagcacctaagcaatggcatgagaagtttgacactacgcttacatctgcaggctttgttgtgaatgaagctgacaaatgtgtgtactatcgctatggtgggggagaaggagtaatcttgtgcttatatgtcgatgacatattgatctttggaaccagcttcaatgtgattgaggaggtcaaggactatctgttcaagagttttgaaatgaaggatttgggagaggctgatgttattcttaacatcaaactacaaagaggagatgagggtgggattacacttgtgcaatcccactatgtggacaaggttttgagtcgctttggatatagtgactgcaagccagctcctactccttatgatcccaacgtgctattgagaaaaagccgaagaatagcaagggatcaactgagatactctcaaatcattggttcattgatgtacttggctagtgcaacgaggcctgacatctcatttgctgtaagcaagctgagccggtttgtctcaaatccgggagatgatcattggcaggctctggaaagagtaatgcgctatctaaagggcactatgagctatggaattcactataccgggtatctaaaagtactagaagggtatagtgactcaaactggatatctgatgctgatgagataaaagccacaagtggatatgtgttcacacttggaggtggcgttgtttcctggaagtcttgcaagcagaccatcttaacgaggtcaacaatagaagcagaacttatagcactagatactgcgatagttgaggccgagtggcttcgtgaactcctgatagatttgccggtggttgaaaaaccagtgccagctatcctaatgaactgtgataatcaaacagtgattattaaagtgaacaattcaaaggacaatatgaagtcatctaggcatatcaagagaagactgaaatctgtcagaaagcaaaaaaaactccggagtgatagcattggactatgtccaaacggctaa

SEQ ID NO: 39599 - DNA, 732 bp, Oryza sativa
  Clone ID: PAT_MRT4530_43122C.1
gatccccgggctgcaggttttttttttttttacaatgaaaaatagtctagaatgctctagagaaaaccaaaatacaagactggacacaagatgatgaaaaaattttaatgcgagacagatgaagccgcacaactgttgcaaaaaggaaaatgaaccgaaacaaaggccaagggattctcaaccttctcccggctgctgggtttctctttggctcttgttttcgaagtaacaaaccgcattactaacagagactgtaatagtaatagatatttcaagtgtaaagcctaacaaaaaggttaacagcgacgatacattgatgtgaacgtacccaactttactttggggtagattccttcctagccatgaaaagcagtggatgtattataactacagaaggaaagaagaattccttccctggtgtaaaagcaggagagaactactgtaccgtgcaccaaaaataagcagcaggttgcagggatggggaaagctgcttggggattgtacggcaaatggattacatgacacatcaaaccatccctcttgttttggacatccatgattaaatgctgagcctgttgcagaattatcataggcgagaatcaccaaatctatgtagcagatgcagatacatcatacaaagaataaattagaacttcaactaatctatactgcttcacgtattgatggttctctttcttttagaagcattaggcgctttatctcccaacttag

SEQ ID NO: 39600 - DNA, 4137 bp, Oryza sativa
  Clone ID: PAT_MRT4530_43123C.1
tcacgtcgctattcttttgcgtccacgatcccacgttcccacgactgcctctgcaatggcgcgtccacgatcccacattgcaaccacgaacccacgttcccacgacttcgcctgagatctgcaccggtaggtgggtgatcaggtttttggggagtgcttcccgcacgactgctcgtcctcgtccaccatgtctgcgcctggagctgcagacggagatggcgcgcctggagctggagccggagccgcaattctgcctcacaatccagcggagggccattcttggggtatatccttctcctgttccctttgttagcgctatcgctttattattatgtgcgctatgttcctgttcctgacattcatgatgcctctagtatgttattgcgttactgtaatgttcctgtttctgacattcatgatgcgcatagtatgctacttcatgatgcctctagcatgttattgcgttactgtaatattcctgttcctgacattcatgatacgcatagtatgctactggttatgttaagatcaccctacaccgcttatgccatgattattgttttaacattttggattaaaatatgccgattcatgactatatttccaacaatccaaaaacctgataggtcattttcggtagttggctttgctgctgcactgaaaccacatgcttttgatggttctaactataagagatggaaagcatgtgcactattgtggttgacagcgatgcagtacttctatgtttcacggggcaaacgaagtgaaccacctctttctcctgaggaagaggctaagttcgaggctttggattgcctgttccgtggagcattgatcagtgtactcgctgacaatatagtggacgtgtacatgcacatgccttccgggaaggacatgtgggatgcacttgaggccaagttcggagtttctgacgccggcagtgagctgtatgtcatggagcagttctatgactacaagatggtcgatgaccgttctgtagtagaccaacctcatgagattcagatgctggctaagaaacttgagaacaacaactgtgagttgccggacaagtttgtggcgggtggcattattgccaaactgccaacttcttggtcggactttgccacttctctaaagcacaagagacaagagttcagtgtttctgatctcattggctctttgggtgttgagaagaaggcgagggcaaaggacgttcggggcaaaaaggttgagggaggttctagtgccaatatggtacagaagaagaaccctcatgcatcccacaacaacaagaaagtcaaacctgatgtcaaacccaaggctgcaaccaactttaagaagaaaggcaagggaaaggcaaagggagactgctttgtgtgtggcaagtcagggcattgggccaaggactgtcctgagcgcaaagacaggaagtctgccaacatggtcattagcgagggcggaggaacatcggggtacggtaaaatattacctacagttctctctgttcttcacttacctgattggtgggtggacactggtgctaatattcatgtcgggagaggttcctccttgttgatgggaaacgggtcgcttgcggctgttcatggtgttggttccaagtgccatacttgcatccaatcgaaacaacctcgcaagcctcacaagtcatctgaggcgaggaatttggcacctctagaacttgttcattccgatttgtgcgaaatgaacgacgtgttgactaaagggggaaagaaatatttcatgacactgatagatgattgcactagattttgctatgtgtatctattgaaaacaaaagataaggcattgcattactttaaaatctataaagctgaggcagaaaaccaacttgaaaggaaaatcaaacggttgaggtctgatagaagtggggagtatttttccaatgagtttgcatcattttgcgaagagtttggaattattcatgagaggacacctccctattcaccccaatcaaatggggtggccgaaagaaagaaccgtactctaactgagatggtgaatgccatgttagacacttcagggctttccaaggaatggtggggtgaggcagttttgaccacctatcatgtcctgaataaaattccaatgaagcataaggaagtaacaccattcgaggaatgggaaaggaagaaattaaatctctcatacctacgaacatggggctgtttggccaaggtaaatgtacctatagccaaaaagcggaaacttggaccaaatactgttgattgtgtgttccttggttatgctattcacagtgtgggttatagattcttaatagtaaactttggtgtacccgacatgcatgttggtacaattcttgagtccagagatgctacattctttgagaatgaatttcccatgaaacatacacctagcacttctagtaaagaaactgtcatgccccatgagcactttgcaccggtagaacacaatgatcaaacgcctgaggaaaatcctgaggaggacaacattgtagatactcgcaagagtaagagacaaagggttgcaaaatcctttggagatgactacattgtatacctcgtggatgacacctcaagaaccatagaagaggcatattcatctcctgacgctgactactggaaggaagcagtacgcagtgaaatggactcgattatgtctaatggtacttgggaagtcgttgagctttcatatgggtgcaagcccgtaggatgcaaatgggttttcaagaaaaagcttatacctgatggtacaattgaaaagtacaaggcaagacttgcggccaagggttatacccaaaaggaaggcgaggacttcttcgacacatactcaccagttgctcgcttgaccacgattcgagtactacttgctctggcagcctctcatggtcttctcgtctatcagatggacgttaagacagctttcctaaacggagagctagaggaggagatctatatggatcaactagacgggtatgtactagaaggtcaggagggaatggtgtgtaaattgttgaaatccttgtatggcctcaagcaagcacctaagcaatggcatgagaagtttgacaccacgcttacatctgcaggctttgttgtgaatgaaactgacaaatgtgtgtactatcgctatggtgggggagaaggagtgatcttgtgcctatatgtcgatgacatattgatctttgggaccagccttaatgtgattgaggaggtcaaggactatctgtccaagagttttgaaataaaggatttgggagaggctgatgttattcttaacatcaaactacaaataggagatgagggtgggattacacttgtgcaatcccactatgtggacaaggttttgagtcgctttggatatagtgactgcaagccagctcctactccttatgatcccagcgtgctattaaggaaaaaccgaagaatagcaagggatcaactgagatactctcaaatcattggttcattgatgtacttggctagtgcaacgaggcctgacatctcatttgctgtaagcaagctgagccggtttgtctcaaatccgggacatgatcattggcaggctctggaaagagtaatgcgctatctaaagggcactatgagctatggaattcactataccgggtatccaaaagtactagaagggtatagtgactcaaactggatatctgatgctgatgagataaaagccacaagtggatatgtgttcacacttggaggtggcgctgtttcctggaagtcttgcaagcagaccatcttaacgaggtcaacaatggaagcagaacttacagcactagatactgcgacagttgaggccgagtggcttcatgaacttctgatggatttgccggtggttgaaaaatcagtgccagctatcctaatgaactgtgataatcaaacagtgattattaaagtgaacagttcaaaggacaacacgaagtcatctaggcacatcaagagaagactgaaatctgttagaaagcagaaaaactccggagtgatagcattggactatgtccaaacggctagaaatctggcagatcagtttaccaagggactaccacgtaatgtgatagacaatgcatcgagggaaatgggcttgatacccacctaa

SEQ ID NO: 39601 - DNA, 363 bp, Oryza sativa
  Clone ID: PAT_MRT4530_43124C.1
atggccattgggatgcatgagaggaagcaactaaggccaggggtagttctttcagtgattggaagctcttcctcttctccgatacctgctatgaataaagggaggggtttcaagagggtggttaaggtgggagggggggttaagaaagaggggaagggggttttccctaggcttagaggggcagtagtggcgacggtcagagcagtggtgggtagtggccagcgagcaatggaggacagcggtggcactgtcggagccatggggctagaggtggtggcaggcagggttggcatcgaaagacgacagcaaatgagactggttatgataggagccaccggcgatgaggaaggaccgacagggtag

SEQ ID NO: 39602 - DNA, 302 bp, Oryza sativa
  Clone ID: PAT_MRT4530_43125C.1
cattattgtttgtttttttgggaaggggaaaaccccaagagcacaacaggggggggggaaaaggtaggcccaagacaaggtaaaccccaaaggaaaaaaggggggtttaaaccaaaaggggcccccaggggggatatggaaaaaacggcgaaagcaaacggggccaagggggggcccaaaacttgacgaatttgaaaagggtggaaattctaaagggggaccccggaaccaccatttggagggggtgtttttcttttggggggaggcccgggccacactgggacccgggggggccctattct

SEQ ID NO: 39603 - DNA, 1656 bp, Oryza sativa
  Clone ID: PAT_MRT4530_43126C.1
gcacgagggggcaaaccaaatccgccgcgctgagccgagcgtgtatttagcaggcgatctctctcctcctccttctcccactctccccagctcagccgctccgcccaccgccaccaccgtcgctgcccgctgctcgctgcatctcccaaccgacaacccgcagctcacctgtacgtgctctcgcgtcgatccaaacaagctccaaaaacatcgaaaaccccacgcacatttctttactcgcccggagaagctaccgcgcgcttgctacctctcgcgtctccgtctctgcgttgcattgcattgcattgcattgctcgttctgtcatcggatccgagtctgggatggcggcaatggcgggagggagtaagccgctgaggctcaaggacctcctggagctggactgcgagtcctgcagcgccgctggcttccgctgctaccctcgccgcctctgcgtcgccggcggcgcggctgaggcggcggcgccgccaatgcggcaccgcctcgtcgccgaccggtcgtcgtccgcaatgcggcggcccaagctgtccagcctctcgaagagcctgtcccggcggctcaggggaggcttctggaggcggcgcgaggaagaagacgaggaagccgccgccgccgccgcggcgccgccggcgacggcgagctccaccgcccccgccgtggccagctgctgcagctccagctccgactccgagacgtccgagtccagcaattccacaggcgggaggaagtcgcgctcccactccgactactcagaaatctcgtcagccagctccgacgacagcctccacgccgccggcgagccctccaccaccggagccgaccacgaggtgatgaagaggggatccaaggaggaggatgaggaggaggaggctgacgacaaggagcagctcagtccggtgggcgtcatggacttccccttcgacgaagacgacgacgacgccgccgccgtcgacgaggacgagagggtcgccgccggcgcgtgctcgttctctttcagcgacagcctcgcccagctccagaggagaaagatgcaactgcagcccaagatccgacggctcgggagcatggcggagctcagcggcgtggatctcgaggcacgcttcgccgcctcggagtccgaccgccttgccggcatcgtcccagtacagcaccagtgcattaccgacgacgtagcggcggcgccgccacgacacgacgatcatcggaacgacggcgtctcccaaaaagatcccgacgacgacgaggacagcctcctagacctactggcggacaccgtgtcggtcggcgtggtggatgacgtcaccgagaggctcctcctcgacttcttcgtcgaggcgaagtgcagctccagaaatattgagttgcatgcaccgaccagtctgttacgagagaggagacggcgagagaacggcgaaacgatgagacttgccaaggcctggcttgagggcacgggaacaccgtggacgttgaacgacgtgctgtaccacggcgaggatgtcatggcggagatggagcggagccggcggtggatgcacgccggcgaggaggagcgcgaggccggcgtggtggtggcggccatggcgatggacgagctgttgcacgagctggtgagtgacctgattgcgttgccgaagtag

SEQ ID NO: 39604 - DNA, 1947 bp, Oryza sativa
  Clone ID: PAT_MRT4530_43127C.1
atgaagaaggatgtggctgagctaaaggcactcaagggggaggttaaggagattaaagggttgctgttggagctatgcaaacagaaatcggtggaagagcaaggggaagctggagctaacgcagcggcagccacagcgaaggggaaatctgctcctgctactactgctgatgctgctggtccaagttctacagcggcgatgaataccacatcttctgaggtaagatttgcaattgaagctatatctggtaatccaatgggaatggtgagccagggagtggggactggcccgggaatgaccaacagcaatcagttttttgacctgccgcgtccacaaccaacagtaccaccatttggctctcaaggtttggggacacattttgggccacaacagaatttctctataccccaatttggtggtatgcagggcaggccaactgttggggcaccctcgaatttctgtggaagtcagggaattgactcaactttgcacactggatttaataggggggttaatccaggaaacactggggttcacatctttgatcaacagaggaacatacttggtggacatatgggagacgggaatcattatgcagaagcaattataaaaggaccacggttggagattcctctatttagcggtgaagatccaattgactggttgaaacagtgtgagaagttctatgagatttctgggacccctgctgaacaatgggttaatttagcaatagcacatttacaaggaaaagctatgaagtggtacaggggaatagggataccttggcagttgatcacttggcctcaatggtgtgcaatggttagcactaggttttcagctgctgatacccatgaagctgtggagttgttccagaatgtgaagcagtataaccaaacggtggagcaatacattgacaagtttgaggaatacgttgatctggggctgctggaatcctattggtatacaaagaactatgagagagcagcaaatgctaggaagaatctactgaactttaacaggaataggttccagaatcaggctgggcctattcagggaagaaatgttgtcaacagaggccaacctagagaacaggtggagaagaaggaggagaggaaatgttggttttgcaaagagccctggtttcctaaacatcagtgtaaagtgaaaaaggctttaaatgccttgctcatggaaggggaagaaggaaaagatgagggggaagaaggtgagttaacagggaatcaggaggactgcaagttggaaaaggaggaagcaccacctgatgatgaaaatcaagaagagcttatgtttgtgtcgcacaatgctgtatatggaaccacgaggccagatactttttctgtaattattcagattaatggaagaagggctgttggcctggtagatagtggcagcactagcacatttatggatcaagactatgctgtcagaaaccattgtcctctagtgtcgactgatgcaaagaaagtggtagtcgctggagggggagaattgaaatctgaagtacaggttcctgaattggtttaccagatacaaggggagacatttagcaacaagttcaatataataccactaaagggatatgatgtaattttgggggcagactggatatataagtacagtccaattactcttgatttgaagaagagggagttgggcataacaaagggagagaagactgtgataactagagtcaaagaagaggaaacatcacatgaaattcctgaagacataaaagaaatcttgcaagaattccctgctgtgttgaaggatcccaagggcttacctccaaggaggaattgtgatcatgtgattacacttaagagtggagctgaaccacccaatttaagaccatacagagtacctcattatcagaaggaggcaatggagaagatcatagctgaactaattgaatcaaaggagattcag

SEQ ID NO: 39605 - DNA, 276 bp, Oryza sativa
  Clone ID: PAT_MRT4530_43128C.1
gaccactccagcaatcaactttttattgctacaggcaccatctctacagttgccctcggggggcttaatttgttgcaatgcccggaaacacttcggaaattaaaggtaaaatttttttttgaaatggcccccggatggaaagggggccatcgattgggttatcaatggcccattggttattccaaaccattggacaacacaagggattcaatttattcctacaagaagagagtcgggacccatgccggtttaataaaatgggcaaattgaggttta

SEQ ID NO: 39606 - DNA, 279 bp, Oryza sativa
  Clone ID: PAT_MRT4530_43129C.1
attaaattcattaggtcaggcaacataaatgccgattcaacgggagcttacaagaggagcatcggtaagaggatcaaagcttagaacttacaagtgcattacaacaaacttgacaagcattctctcgggtatcatctgcatttccctagagatcatcctggaagcgggggcacaacctgatgaaatgctgaaactgaggctacacgtacatagagggacgagatagccagaatggaagttgagtcctcagtaccagtggatatgatactaatgttggcc

SEQ ID NO: 39607 - DNA, 762 bp, Oryza sativa
  Clone ID: PAT_MRT4530_4312C.1
ccgagttctactcttgcgtatattaggagtgctgtttttccgatcgatcaagtgaagaaagtaaaataagtggatcattccgaagagtaagtgatcctaagatctgtgcgcagacgaaacgggaaacaaaccattcgatcgacgatgcgagaggaagcgcgcacgatggtggcgacgagaagcaccaccagccgccgttgcttgacgtggtggtggctcgcctgctgctgcttcgtttcttgggtggcctcgtcgtcgtggacggcggcggcctgtgtcgccgtgtcgagcctgcccgggttcgacggcccattgccattctccctcgaaaccgggtacgtggaagtgaacgagagcactggcgtgcagctcttctactactttgtccggtcagagaagaatcctgatctagacccacttttgctctggctaacaggtgggcctggctgctctagcatctctggcctagcccatgagatagggccatttcaattcgctgcaaaacgatactatagtggaggattgcccataattatctaccgaccagagacatggactaaggtaagcaatataatctttgtggattctcctgtaggggcagggttctcatatgcagccacagaggagggttccaagtctagtgataccaatgctgtgaaacaacttctaattttccttagaaagagaaggctaatccctacatgcaaatcgaagaagacaagcaagaacaaggtagatggcaactcgattgcaaatgagtga

SEQ ID NO: 39608 - DNA, 594 bp, Oryza sativa
  Clone ID: PAT_MRT4530_43130C.1
atgcacctatattacatctgggccggaagtgtagcacgcgaagacaagatgaaaaaggacaatcatgatgtaggcacgcaaacgcacatcaggcagcaagcacaagatccaacaacaacccgcgaaccaaaccaagctaccgtctacccaccaccaaagcgccccacaaaccaaacccaacaccgtcgagagatccgacgagcagagcgccaccgcaagatccccctaacccccccccccccaccccacacacacacacacacaccatccacgagcaaccaatccacgacaattccacggtattccgatcctaaaacccccacagcgaaggcgcccggagcccccgcccggggcccgatcaacgccgcccgccggcgaatcgccagcggcaaccaacgcccggaacggatgacggcgtcggcctcccccaccccaaaccttcccgaagggagcgatcgggagggggggaggaggccagcccaagtataccttggttgtctcccccgcgcgcgcccaccggaatcgggagggggtgtgtgtgcgcgacggggggagggctcactttccggcggaggcggcggcggcggcggcggc

SEQ ID NO: 39609 - DNA, 447 bp, Oryza sativa
  Clone ID: PAT_MRT4530_43131C.1
atgctgttcttgaaagagctgcccatctggcaggcgttcgggttctccttgctcacaggggccctcgccggcagcaccctgtacgccgtgtgcgtcctcctcctctgctgcgtcgatcgccgacgtcgacatgccggtgcgccgccgcccgatccgaagatctggctgccggaccacgcgcaccatcgccggcggcgggatgagtcgtcggagatggagtgcagcatatgcctgggggagctggaggagggggagaggtgctgcacgctggcggcgtgcaggcacgagttccacaaggaatgcatctaccgctggctcgccaaccgcaacacctgccctctctgccgccacatccccctcccccctgcttcatcaccaccacctgcgccgccgcctcaccatgcttctcctcctccttccaatgtaccgcctgctgctcatgtttag

SEQ ID NO: 39610 - DNA, 522 bp, Oryza sativa
  Clone ID: PAT_MRT4530_43132C.1
atgaacttcgcgagtgcagttctcccaatgatggcccacctcgccgcctccgtgttagcccgtgcgccgccgtcgccgccgcgagtccagccgtgcgccgccaccgctccggtcgtcgtcgtccctcgggaaggccgccgtcgggatcgccaagtcgtcaccgtcctcgtcccgtcctttgtttctgtcgaagaccgccggagcatcgccgtcatcgtcgacccgaacgtctctgccgcttcgacctcgccgccgtcgccgtccgttgtcgtccgccgtcgtccgagccctcgagcaccagactgtgaagtggcggagataagcccacgggggtcgctggggagtccatgccttgtttataatgggggtgattatgatccaggaacggtgcactgctttgaattatgttatgcgaagggtattgtcacaatctctattcagccgggaatggttgttcagaatggttgggcctatgcaacggaggaggagttctacagtgatgctgatggtgtggaggattag

SEQ ID NO: 39611 - DNA, 212 bp, Oryza sativa
  Clone ID: PAT_MRT4530_43133C.1
gccgcggcagtggctgcttgaagatggacgaggcggggaggaccgacgctcagaggacgaggtggacggcatacccggtggcatgccggtgctcggggacgggacaaacgatgaccaacaccagatcgagcaaccactttggcacccggcagtcagtggagtggtggatgcggcaacttggtgctcagatctggcgggtgtttgcatcgtag

SEQ ID NO: 39612 - DNA, 300 bp, Oryza sativa
  Clone ID: PAT_MRT4530_43134C.1
aagaaacatatgacaagaagacagagctcttgaagccgatcaaggccacccagtcagggatggacatactgtcatgaagcaccaactatagtgttcaacatatatattccatgaacctataacccaattaggcctacaccgttcacaacatcaccaacatgtacccatcttactgcaagatcaagcacgctgtcgttggatcctccatcgaatacgtcgtctgcgccctcaaagtttaactcatcgtgttgatttgatcacatcctctgctgttgaatcaatgcccttcttttactcaaa

SEQ ID NO: 39613 - DNA, 432 bp, Oryza sativa
  unsure (1)..(432): unsure at all n locations
  Clone ID: PAT_MRT4530_43135C.1
tcnctatccctcccagaaggggaaaacccccanaaacgccaaaccctatagccacgaaaccctaggagagccgcggcgggggcggccatccccaccggggacgacgagccggggtgggtccaccccgacatcgacagggccgaccgtgccacgcgggaggcacccgggtactcccacggccacgccggcggccgcttccgccccacggccaagggcaaacctaagccgaggccgaagcccgatcccaaggcggaggattcaaatttnaannnaaattattcgcctcccatgtccaaccccgaggagcccaaccctgaggctgcctcgccgatggaggactcgatggatgtgcatggggcggggccgagcgccaaccccagcgccggaggggtgggagcttccgaggaggaggacgaggaggacgaccacctg

SEQ ID NO: 39614 - DNA, 429 bp, Oryza sativa
  Clone ID: PAT_MRT4530_43136C.1
gttcttctagttccagcttccaagtcaagggcaaggcgagcagccagccatcccgcgaaggcgactcgatccggcgacatggtttgcctcgcgtgcttgcttcccctcttcttgatccccgtcgtcaacgccgtccccttgctcttccacctaatccttgtaacgccccaatccctttcccctctgtctctctatctctctctgtcctctctgtgtgtctctgtctgtctctctctttttgttcaatcagatcttctcacgaatggttatctcatggtgtgctgctctactagcgagcgtgtaatctaaccatcttcggttagcctgatctggtcgcttgattgactagaacaaacaggaaggaactatctataactgcacattctggtttaaccacagttatcgaatactgcaggtatgtggcaacta

SEQ ID NO: 39615 - DNA, 318 bp, Oryza sativa
  Clone ID: PAT_MRT4530_43137C.1
atgaggtggaagagcaaggggagggcgttgacgacggggatcaagaagaggggaagcaagcacgcgaggcaaacctatcagagcaaaagttgctggattagaacacggggaatacgcaccatgtcgccggatcgagtcgccttcgcgggatggctggctgctcgccttgcccttgacttggaagctggaactaggagaactcttcttctgaatcgcgaatggggaattggagatttggaggaaggaaggaaggaagcaagtgcaaatctctccgaggggacgggggcaatgctttgggccggaaggggattgagttga

SEQ ID NO: 39616 - DNA, 1709 bp, Oryza sativa
  Clone ID: PAT_MRT4530_43138C.1
cctcgcggccccccccccttttccgttcctttttgcttgttttgtttcgctttgctctccggtggcaccccgttgcttcgcatcacctctgccgccggggctcccggaatttcaaccatcccgtggcttggcgtacgtctaaccggctctcggcttcatgtactagttgcatgcacctctgcaggaacgccgtcgagactgatcagatatgcgctaaccccgttttgtcctcaacttggcacccctaaggcctcgcgatggggggtggtcctcggcctgctcgcttggttttggggttgctgccacccctgcaccgcccactgtccgcggtttcattcggttggcgctctgctggcccctgttggcttagcaactcttgacccgcttgctcctggtgtgcgactgtctcgctatttcctcccttgccggcgcttgctgtgtctggcgcgcatcgcacgtgcgcatggaatcatactagttaaatgcacatctttagaactacatggagaccgatcagatatgctctaaatctgtaatttagtgaacttggcaacaaaaaggccactcgtttgtgaagttgcaggatcaaatcgcaatgttttgaagatgctgccacttctgcaaggccaactgtcagctgaatcaatcttttgtagctctgctgaagagtgtttgcaaagaaactgttgaaccacattctcattttgtgcaactgtcaagctgcaagtactatatactagtgatccaccagttttcaataatttaaaaccattagtgagaaggcgtaactgaagatgaagcaggtcatcagttctttctgcatcaagtacacgacgatctaaggttttccatccccagaactcaaatttttggatgtgctttatggatccatcatgagtacattctgcatcaactaggactttgtcatagccagatgtctgggcttcatcatcagctgatggacgaatagcatcacatttgcgtaatccaactaatcctgaatgtttgccatagtatatcagttcaggttctgaagttgatgttagatgaggtgaacccgccattcttgcctttttagacttttgtcggtctttccacgatctctttgaagtccattccgacaatgtacttccattgtccttatgacaagttgatccttctccattacccaagctagagttcacaggtaatatagaaaatgaagtcccatcggcaacaaagagacgacaacgatctccgagagaatacttctgcaacatcgtacgacaggccgcaagacggtgctttgcaacatcaacgccagtcagagaacctctgcctccaagcatatctgcaagcatgcaaagctttgcacctggggcagcacagaggtccagaacatgttctcctggttgaacatcaagtgctaagacagcagctccagaagctgcatcaattccatagatctttccttgctgataggccatggagctagcaatctgaacttgaggcggaattgcgtagaaatctggcagccatgaaaccttgttgagatggcacgtcagctcgctctgaatctctggaatatggggctccatgcctggttttagccttatgtatcgtgggatggtgtcgaccatggaatacatcattgggtccaagccattctcctggaggaactcgagaaacgcgggcggcagcgattcaggggcggacctagcgtcggccat

SEQ ID NO: 39617 - DNA, 339 bp, Oryza sativa
  Clone ID: PAT_MRT4530_43139C.1
atggaggaggggcgcgagcgcatggggcatggaggcggaggcaagagcggcgcaaccagcggcgaaggcggcgagtgcgcccggcatggaggtggaggcgagagcggcgcgaccggcagcgaaggcggtgagcgcgccacgcatggaggcggaggcgagagcggcgcgaccggcggcgaaggcggcgagcgcgccacgcatggaggcggaggcgagagcggcgcaactggcggcgcgaccgacagcgaggacggtgaccgcggaggcaacgacggcacagtcgaagatgaaggtgtggcggcgaagacagccatgtgcggagctgggaggcgtccgtag

SEQ ID NO: 39618 - DNA, 6248 bp, Oryza sativa
  Clone ID: PAT_MRT4530_4313C.1
gacactagtctgccctgtacggcctcttcttatccaccagaccctttggaactccgtcactatctctctctctttctctctctctctctctctctctctgcacaaagacttcttccatttcttgttcttgtagacttgtacacacgcataccaaaggaggagaaagggatagagtagagtagaggagggaggcctgaacttctctcgtcagcttctgaactttgggaaacttgtcagacagcagggttgattcaggtcatcttcttgcttggaatgtgctcatcaccaaatgtcgattcttgtacagtattaggttctgatccaagcatgacgggttcttgaaagttgaaactacacaaaggctttggagacatgggatgtgctgcttccaggttagaagatgaggaggctgtcaagatgtgccgggacaggagggacttcatcaagcaggcgctggagcagcggaaccgcttcgcgtcgtctcactttgcctacattgagtccttgaggcgcgtctcgatggcgctccagtggttcgttgctggggatgatcaccatgagctcatatttgaccccttcatttctcccttgaagcaacagaagccagagctgcttggcctcccttatggttcatatgagaagaggacaattcatgtctcaaagtacctgaggtcaggaccaaacccatcggtatcaggtgaagagtacacgagacccgtggaagaaacgggtattaagtcacattaccgcagagattgataatgtgacggggatgagtagggaccagtgtgcgaattatgtagttcagaagatacttgaaacatgcaacgtgcaacagagacagctcctgctcagccgtgtgaagggccatctgcaagcattaaggaagtacacctatggcaagcatattgtgagccgagttgagcaactttggtcggtgaaggagacaccgagtcagattcttgaaaaattagcatatttcttcactggaggtgtatgcctggagccctcaagatgaacacacctccagtgcttccagaagggctaacaaaactcttgtctccttcagattgtacataagtgactctcattaggtggtagcctaggtgctagatacagtttagtggtgtgcatcagtgtatctatgttaggggtttgcttatttatagaatcaataatggtactgtaatagttgggtagctgtttgcaaaagaagatttagtggcttgtatgcgataaattatcgactgcttggtaatgtaatcgcttgcttagtggcttgaatcgcagatgtaaatcaaatatatatgtctaaaaaaatacaatacaatgggatcaagagttagggttattgggaatcctgctgatagttttgatccccaaaaggtattatcccagcctgcgtatccatctgatcagaggcttcaacttccaagaactggaatttataactctcctgcagccagaagaggaggggccgctccaaattatcaaggcatgacaccatatgttggagcaccaatgacttacccaacaagcccagtgtttcagggacagactttcactggagtattttctcctggtaggagaaatgattctgtgagattccaaactccctctcaacctcaaacgatctttctgcaaagatgctaaacccagtcgcattattgcggtctgcatcatcccggtcatcgtcttcccgcttccttcttgctcccacaagctcaatagaggacctctatgacaatgagacaaacagctgttactctgaagaatcctgcagtacaatgtctggaagtcatcactccactctagatagactgtatacatgggagaagaaattatacaaagaagtaaaggcaggcgaacgattaagaattgactatgagaaaaggctgaaccatttgaggaaccaggatgtgaaaggcgacgagccttcctccgtcgataagacccgtgcagcattgagaagtttacatactcggatgaaggtgtcaatacacacagttcagtcaatatcagcgaggattgaagttctaagagacgaggagatgcaacctcagcttatggagttgatccgagggttgtcacggatgtggcgcaccatggccgaacgccacaaggctcagaagcgcaccatcgacgacgccaagctcctcttcctccagcgccaccccacggccgccgctgccaccgccaccgccatcgccctgagcgccccggacgccgcgacgccgcccccggccgccgtggcgctcgagtgcgagatccgggcgtggcgcggcgcactcgagacgtggctgtcggcgcagcgcgcctacgcgcgcgccctcgccgcgtgggcgcgccgctgcctcggcatcggcggcgcccggcgccgggggcaccggccgccggccgcgcttgccgctggcggtccgcgggtgtgctatggaatgggggcacccgggtccacccggcggtggaagggctgggttatggaaggactggactttttcgtcgccggcgtcgggtcggtgtgctcgggcgtggccactggcatggagggcatggccgggcgcgtgctctgcgccggcatggccgcggtgaccggcgccatggccgagttcgccgacgcgtcggcggacggctacgacgcgctggtgtcggcggtggccgccggcgcgccgggacgccggaaagaggaaccgacatgtgggccccagatttgggatgttggtttgcatgttttccgatattttgaacgtgtgatggctacagagagcgctgtccggttaattggaggaacggggtctggtaactggagcaaggacttcggtgcatttgactcatcactgggtagtctttcaggagaaggtctggggtttgtggacaataacagtggcgtttatgggggctggagggagtctgtcccaaatcgcagtggaagtgcgccgcctagcatggaagggtctcttgctgctcttggtcatatgataggtcagcagagtgggaacttggaagccactttaggggggaagctgggaaacgtagcggacagttccaaatctgaggagcagctacgtgctgatccggcatactgtgactattatggctccaaggtcaatttgaacccaaggcttccgccaccacttatgtctagggagagcagacgcttcatgaaccgggttggcaaagttaaagaatggagaggcagaaagccgcttctttgtatgacagttctactcatccatcaaatagcaatactggtgatggtatatctgaccattctgacattaactcatcaacgaatttttcaattgatgctgtcaagacatctgggttgaattcatggacacctgttcctgtgactaacacagtgagaagtacacatagcaacagtatttcatctacatctgttcccagttcatcaagtcctgataacaaccccagtatgcaaacttctcagcaagagaagcctagcatagacatcaagcatgggaatgatgtgcctggcagcggttctattctgactgaactagatactgtgaactccaatatgaagaatctgaggataagtttggatagccatgataccatacatgttaagcagcagtggccggacaatgtcttgcagcagtttggcccctcacctttagtccagggtgatcctattcaaatgattcctcaaggaacacatcttccccatgttccttttgttgagaacttgtcgcatactcaattaaaattaccaactggtgacatgcagcaatttttaccaccgcctggtatgacaacacctttttatgcaaaatttgcatccggctagtgtattgccaacaccatttggaactgctggatatgctttgagtggttcagctttaccacctgttatgactagctatgctccccaggtttctgttgctacacctgttgacagccctattactccaagctttagtggtagaccatctggttttccttcaccagggaatcttagtgcaggagcagaatttgttcagccatataaaatgtatggacaacaacttggggttaccatgcagccatccgttcctgacccaaacttctttcagttctttcagcatccttctttactttcatatgctggtataaatcaatacaatacaatgggaccaagggttagtgttgttgggaatcctgctgatagttttgatccccaaaaggtattatcccagcctgcgtatccatctgatcagaggcttcaacttccaagaactggaatttataactctcctgcagccagaagaggaggggccgctccaaattatcaaggcatgacaccatatgttggagcaccaatgacttacccaacaagcccagtgtttcagggacagactttcactggagtattttctcctggtaggagaaatgattctgtgagattccaaactccctcaagaaatatgaccgcttattctggtgttcaagggcagcgagaaagggagaaattcgatgacccaaaggcatgttccttcctggaagaactcaagtctaacagggctcgcagggttgaactatctgatattgcaggccatatagtagaatacagcgctgaccaacatggcagccgattcatccaacagaagttagagaactgcactgctgaagagaaggcatctgtgttttcagaagttctccctcatgcttcatcattaatgactgatgtgtttgggaattatgtgatccaaaagtccttcgaacatggaactcctgaacaaaggagggatcttgccactaagcttgttggtcatgttttacctttgagccttcaaatgtatggatgccgagtaattcaaaaggctcttgaagttatggaacttgaccaaaaaatagaactagttcgtgagcttgatggaaacattatgcgatgtgtccgtgatcaaaatgggaaccatgttatacagaagtgcattgaatgtgttcctacagaacatattggctttgtagtatctgcttttcgggggcaggtggccagcctttcaatgcacccatatggttgccgtgttattcagagagttttggagcactgcggtggtgattcacaaggccagtgcataatagatgagatactggagtcggcttgcgtcctcgcacaagatcagtatggcaactatgttacacagcatgttttggaaagaggaaggggacatgaaaggacccaaattatcagtaaattggctgggcaggttgttaccatgagtcaaaacaaattcgcatcaaatgtgatagagaagtgctttcaacatggggatatgacagagcgagatcttctgatccgggagattgtgaagcagactgagggcaatgataacttgctggcgatgatgaaggaccagtatgcaaactatgtagttcagaagatacttgaaacatgcaacgagcaacagagagagctcctgctcagccgtgtgaagggccatctgcaagcattaaggaagtacacctatggcaagcatattgagacaccgagtcagattcttgaaaaattagcatatttcttcactggaggtgtatgcctggagccctcaagatgaattaccggtgtcatagaatggctcaaaaaaaatttgcctaaacttgagttggattctgcagttgcctaaaaaattgcctagtcttagtcctgtaatgaagaatgatttgcatcgctgatttactgtagctggtgattattgccttgaggagaagtattagttaaagggtttaattcccatggggattatgttcttgggggtgattcttctgtcagtgaaaggaaacttttgatattgttttgtaagtaagtatgaggttaaaaaaaaaaaagggtgctggttaatgtttttccttgaaaaggggagtgagtactgttttagttgattttgttaggggctggtctgttttaggttgaatgaaatgtaaataagtcatgagctaattggccggtagcttaggtgctagatccagtttagtggtgtgcatcagtgtatctatgttaggggtttgcttatttatagaatcaataatggtactgtaatagttgggtagctgtttgcaaaagaagatttagtggcttgtatgcgataaattatcgactgcttggtaatgtaatcgcttgcttagtggcttgaatcgcagctgtgcgccaatttgatgtgtccaatcatgtgatattgtgatgcatatatttgctagatttataggcagaagctgttcatccgctatgaagaaaaggtatataattcaag

SEQ ID NO: 39619 - DNA, 321 bp, Oryza sativa
  Clone ID: PAT_MRT4530_43140C.1
caccatccaccatctgaaactcgtgcttttcatcttctagaaccccaactacctgacctagtaattcccccgcaactacttgccccacacctcgctgctcttcaccgaccctgaaaccttcaccaataacctcatgctgaaagtgatccaatccaagtgtgctatactcggcgcgctggacttacttttcccgaagcttctcttccacaacagtttcatcttcttcgagagcgtatggttcaatagcggtgtatcaatattttaactagatctgactctactacctcattaaccctaacctgttccacacacatatcattc

SEQ ID NO: 39620 - DNA, 1632 bp, Oryza sativa
  Clone ID: PAT_MRT4530_43141C.1
cggccccgaggccgcctcccccctcccccccttccccaagccgccgccgccgccgccgccatggccatgaagggacccggcctctgcgcccctctctgacctctcctttctctctccctcctcttcggcggccgcctcccccctcccccccttccccaagccgccgccgccgccatggccatgaagggacccggcctcttctccgacattggcaagagggccaaggatctgctcaccaaggactacacctatgaccagaagctgaccgtctccaccgtcagctcctccggagtgggcctcacttccacagctgtgaagaaaggggggctttatactcttgatgtcagctcagtttacaagtacaagagtactctcgtcgatgtcaaagtggacacagaatctaatatctctactactttgactgtgtttgatgtccttccatccacaaagcttgtgacaagtgtcaagctgcctgactacaattctggaaaggtggagatgcaatacttccatgagaatgcaagttttgccactgctgttggcatgaagccatctcctgtggttgaattttctggaacagctggtgctcaaggacttgcctttggtgcagaagctgggtttgacactgctacaggaaaatttaccaagtacagtgctgcgataggtgtaaccaagccagattatcatgctgcaatcgttctggcggacaaaggtgacaccgttaaagtgtcaggtgtatatcaccttgatgataagcagaaatcctctgttgttgctgaattaacccgcaggctctcaacaaatgagaacactctcactgttggtggcctgtacaaggttgaccccgagacagctgtgaaggcaaggctcaacaacactggaaagcttgctgctcttctccagcatgaggttaaacccaagtcggttttgacaatctctggtgaattcgacaccaaggccttggacagaccccccaagtttggtctagcgcttgcactcaggccctgataacatcgtctgtggttgatggctgttaaatttcgaattctttggttgttttgcaaagcaatggccaataatttgttccgcagacctgttacttcaatcttttaaagttttgctgctctgtgggcaggagccaatgggtgttttacatgattttactcacagtggcaactggcaaggcagaccgacacggcagctcatcgaattcatccccacgcgggtgacgtcgccctccctctccaatcaacaacaatccttccctccctcccacctccgctctcccgcaacgcagcgcctctgcggctctgcctccgcactccgcagccgccaccgacgggatcccgccgccgcctcctcctccccccctgcaatgccccgctcgtgacccatgccctcgcacgcgatcccctccccgcttctgcgagcgcggcccccggcaccctcggcggcggcggccgcggcgaccgggaggagggccccgtcgcgtgtggtggcggcattgggcggaggcggcccggccgggagagggatggagcagcagcagcagctcgccggggacggctcccgcagcccaggttcgtcgtcgtcgtcggtctactcctctcctacttccagctcggtggttag

SEQ ID NO: 39621 - DNA, 4260 bp, Oryza sativa
  Clone ID: PAT_MRT4530_43142C.1
atgtctggagttgctaccgccgctattggcggaggtggtgcgccgccaccgacaggagctgcgccgccgccgacgccgacaggagctggatccggagctggtgcgccaggaggaggtgctgtgaacgactacaacaacggaggcaattctgcctcaccatccagcggagggccattctcggggtataatcttctccttctactgctgttagcgctactcctgttcccattgttagcgctatactgtgtgcgctatgttcttgttcctgttctacatgatgcctctagcatgttatcgcattactggtatgttcctgtttctgacattcatgatgtgcatagtatgctactggttatgttaagatcaccctacactgcttatgccatgatcatagtttcaatttcttggattaaaatatgccgaataatgactatattttcaacaatccaaaaacctgataggtcattttcggtagttggctttgctgctgcactgaaaccacatgcttttgatggttcaaactataagaaatggaaagcacgtgcactattgtggttgacagcgatgcagtgcttctatgtttcacggggtaaacgaagtgaaccacctctttctcctgaggaagaggctaagttcgaggcttcggattgcctgttccgtggagcattgatcagtgtactcgctgacaacatagtggacgtgtacatgcacatgccttctgggaaggacatgtgggatgcacttgaggccaagttcggagtttctgacgccggcagtgagctgtatgtcatggagcagttctatgactacaagatggtcgatgaccgttctgtagtagaacaagctcatgagattcagatgctggctaaggaacttgagaacaacaactgtgagttgccggacaagtttgtggcgggtggcattattgccaaactaccaccttcttggtcggactttgccacttctctaaagcacaagagacaagagttcagtgttcctgatctcattggctctttgggtgttgaggagaaggcgagggcaaaggacgtccggggcaaaaaggttgagggaggttctagtgccaatatggtacagaagaagaaccctcatgcatcccacaacaacaagaaagtcaagcctgatgtcaaacccaaggctgcaaccaattttaagaagaaaggcaagggaaaggcaaagggagactgctttgtgtgtggcaagtctgggcattgggccaaggactgtcctgagcgcaaagacaggaagtctgccaacatgatcattagcgagggcggaggaacatcggggtacggtaaaatattacctacagttctctctgtttttcattcacctgattggtgggtggatactggtgctaatattcatgtcgggagaggttcctccttgttgatgggaaacgggtcgcttgcggctgttcatggtgttggtacggtcgatctgaagtttacttcgggaaagaccgtgcagctgaagaacgtgcagcatgtcccttcaataaagaagaatctagttagcggctctctattgtgtagagaaggttttagacttgtgtttgagtccaataaatgtgtcatatctaaatatgggacttttgttggaaaaggttatgacagcggaggcttgttccgcttttctttgaatgacatgtgtaataatcataacgctgtgaaccatattagcgagaatgatgagtctaatgtgtggcattcgcgactctgtcatgtgaatttcggttgtatgatgcgcttagctaacatgagtttaattccaaaattcactttggtcaaaggttccaagtgccatacttgtgttcaatcgaaacaacctcgcaagcctcacaaggcatctgaggcgaggaatttggcacctctagaacttgttcattccgatttgtgcgaaatgaacggcgtgttgactaaagggggaaagaaatatttcatgacactgatagatgattgcactagattttgctatgtgtatctattgaaaacaaaggatgaggcattgcattactttaaaatctataaagctgaggtagaaaaccaacttgaaaggaaaatcaaacggttgaggtctgatagaggtggggagtatttttccaatgagtttgcatccttttgcaaagagtttggaattattcatgagatgacgcctccctattcaccccaatcaaatggggtggccgaaagaaagaaccgtactctaactgagatggtgaatgccatgttagacactgcgaggctttccaaggaatggtggggtgaggcagttttgactgcgtgtcatgtcctgaataaaattccaatgaagcacaaggaagtaaatgtacctatagtcaaaaagcggaaacttggaccaaaaactgttgattgtgtgtttcttggttatgctatccacagtgtgggttatagattcttaatagtaaactctggagtacccgacatgcatgctggtacaatttttgagtccagagatgctactttctttgagaatgaatttcctatgaaatatacatctagcacttctagtaaagaaactgtcatgccccatgagcactttgcaccgatagaacacaatgatcaaacgcctgaggaaaatcctgaggaggacaacattgtagatactcgcaagagtaagagacaaagggttgcaaaatcctttggagatgactacattgtatacctcgtggatgacaccccaagaaccatagaagaggcatattcatctcctgacgctgactactggaaggaagcagtacgcagtgaaatggactcgattatgtctaatggtacttgggaagtcgttgagcgtccatatggatgtaagcccgtaggatgcaaatgggttttcaagaaaaagcttaggcctgatggtacaatcgaaaagtataaggcaaggcttgtggccaagggttatacccaaaaggaaggcgaggatttcttcgacacatattcaccagttgctcgcttgactacgattcgagtactacttgctctggcagcctctcatggtcttcttgtccatcagatggacgttaagacagctttcctaaacggagagctggaggaggagatctatatggatcaaccagacgggtatgtactagaaggtcaggagggaatggtgtgtaaactattgaaatccttgtatggcctcaagcaagcacctaagcaatggcatgagaagtttgacaccacgcttacatctgcaggctttgttgtgaacgaagctgacaaatgtgtatactatcgctatggtgggggagaaggggtgatcttatgcttgtatgtcgatgacatactgatctttgggaccagccttaatgtgattgaggaggtcaaagactatctgtccaagagttttgaaatgaaggatttgggagaggctgatgttattcttaacatcaaactacaaagaggagatgagggtgggatcacacttgtgcaatcccactatgtggacaaggttttgagtcgctttggatatagtgactgtaagccagctcctactccttatgatcccagcgtgctattaaggaaaaaccgaagaatagcaagggatcaactgagatactctcaaatcattggttcattgatgtacttggctagcgcaacgaggcctgacatctcatttgctgtaagcaagctgagccggtttgtctcaaatccgggagatgatcattggcaggctctggaaagagtaatgcgctatctaaagggcactatgagctatggaattcactataccgggtatccaaaagtactagaaggatatagtgactcaaactggatatctgatgctgatgagataaaagccacaagtggatatgcgttcacacttggaggtggcgctgtttcctggaagtcttgcaagcagaccatcttaacgaggtcaacaatggaagcagaacttacagcactagatactgcgacagttgaggctgagtggcttcgtgaactcctgatggatttgccggtggttgaaaaaccagtgccagctatcctaatgaactgcgataatcaaacagtgattattaaagtgaacagttcaaaggacaacatgaagtcatctagacacatcaagagaagactgaaatctgtcagaaagcagaaaaactccggagtgatagcattgtactatgtccaaacggctagaaatctggcagatcagtttaccaaggggctaccacgtaatgtgatagacagtgcatcgagggaaatgggcttgatacccacctaa

SEQ ID NO: 39622 - DNA, 3906 bp, Oryza sativa
  Clone ID: PAT_MRT4530_43143C.1
tcacagaacaaaaatgatcatctcaaaatccccaaatcggtaatctccaaatacatcataaattaatccggtgatgccgctgccgcctcccgcctcccctccggcagagaggacagcgccgcttgcacgccgcctaccgctgcccacccatccgcccgccacccgccttcttgcttcctgcagccgccttcctgccgccatcccctccgtctgcctctgcccgccacagccttcacggcgcgccgccgcgcgccactgcccgccaccgccatccccttcgcctgccgtcgcgcgccgctgcccgccgctgcccgccattgcgcgcacaagagatcggaaggagcagggcctccggaaccacaccttcgcctgatatctgcaccgggtaggcgggtgatcaggtttttggggagatcggaaggagcatggcctccggaacctcaccttcgcctgagatcttcgcctgatatctgcaccgggtaggcgggtgatcaggtttttggggagatcgaaaggagcatggcctccggaaccacaccttcgcctgagatctgcaccgggtaggcgggtgatcaggtttttggggagtgcttcccgcacgactgctcgtccaccatgtctgcgcctggagccggagctgccgccgccgccgctgctgctggagctggagatggcgtgcctggagctggagccggagccgttgcgaacgtcaacaccaacagaggcaattctgcctcacaatccagcggagggccattctcggggtatatccttctcctgctgttaactcattcgtttatagcgctgttagtcctgttagtcgcaagtcaattgcagcttttggggagtgcttcccgtacgattgctcgtccaccatgtatgcgcctggagccggagctgccgccggtgccactgctgctggagctagagatggcgcgcctggagctggagccggagctgttgcgaacgtcaacaccaacggaggcaattctgcctcacaatccaacggagggccattctcgggttggctttgctgctgcactgaaaccacatgcttttgatggttctaactataagagatggaaagcacgtgcactattgtggttgacagcgatgcaatgcttctatgtttcacggggcaaacaaagtgaaccacctctttctcctgaggaagaggctaagttcgaggcttcggattgcctgttccgtggagcattgatcagtgtactcgctgacaacatagtggacgtgtacatgcacatgccttctgggaaggacatgtgggatgcacttgaggccaaattcggagtttccgacgccggcagtgagctgtatgtcatggagcagttctatgactacaagattgtcgatgaccgttctgtagtagaacaagctcatgagattcagatgctggctaaggaacttgagaacaacaactgtgagttgccagacaagtttgtggcgggtggcattattgccaaattgccaccttcttggtcggacttggccacttctctaaagcacaagagacaagagttcagtgtttctgatctcattggctctttgggtgttgaggagaaggcgaggacaaaggacgtccggggcaaaaaggttgagggaggttctagtgccaatatggtacagaagaagaaccctcatgcatcccacaacaacaagaaagtcaagcctgatgtcaaacccaaggctgcaaccaactttaagaacaaaggcaagggaaaggcaaagggagactgctttgtgtgtggcaagtctgggcattgggccaaggactgtcctgagcgcaaagacaggaagtctgccaacatggtcattagcgagggcggaggaacatcggggtacggtcgggagaggttcctccttgttgatgggaaacgggtcgcttgcggctgttcatggtgttggttttgctatgtgtatctattgaaaacaaaggatgaagcattgcatttctttaagacctataaagctgaggtagaaaaccaacttgaaaggaaaatcaaacggttgaggtctgatagaggtggggagtatttttccaatgaatttgcatccttttgcgaagagtttggaattattcatgagaggacgcctccctattcaccccaatcaaatggggtggccgaaagaaagaaccgtactctaactgagatggtgaatgccatgttagacactgcagggctttctaaggaatggtggggtgaggcagttttgactgcgtgtcatgtcctgaataaaattccaatgaagcataaggaagtaacaccattcgaggaatgggaaaggaagaaattaaatctctcatacctacgaacatggggctgtttggccaaggtaaatgtacctatagccaaaaagcggaaacttggaccaaatactgttgattgtgtgttccttggttatgctattcacagtgtgggttataaattcttaatagtaaactctagagtacccgacatgcatgttggtacaattattgagtccagagatgctacattctttgagaatgaatttcccatgaaacatacacctagcacctctagtcaagaaactatcatgccccatgagcactttgcaccgatagaacacaatgatcaaacgcctgaggaaaatcctgaggaggacaacattgtagatactcgtaagagtaagagacaaagggttgcaaaatcctttggagatgactacattgtatacctcgtggataacaccccaagaaccatagaagaggcatattcatctcctgacgctgactactggaaggaagcagtacgcagtgaaatggactcgattatgtctaatggtacttgggaagtcgttgagcgtccatatgggtgcaagcccgtaggatgcaaatgggttttcaagaaaagcttaggcctgatgatggacgttaagacagctttcctaaacggagagctggaggaggagatctatatggatcaactagacgggtatgtactagaaggtcaggagggaatggaggtcaaggactatctgtccaagagttttgaaatgaaggatttgggagaggctgatgttatccttaacatcaaactacaaagaggagatgagggtgggattactcttgtgcaatcccactatgtggacaaggttttgagtcgctttggatatagtgattgcaagccagctcctactccttatgatcccagcgtgctattaagaaaaaaccgaagaatagcaagggatcaactgagatactctcaaatcattggttcattgatgtacttggctagtgcaacgaggcctgacatctcatttgctgtaagcaagctaagccggtttgtctcaaatccgggagatgatcattggcaggctctggaaagagtaatgcgctatctaaagggcactatgagctatggaattcactataccgggtatccaaaagtactagaaaggtatagtgactcaaattggatatctgatgctgatgagataaaagccacaagtggatatgtgttcacacttggaggtggcgctgtttcctggaagtcttgcaagcagaccatcttaacgaggtcaacaatggaagcagaacttacagcactagatactgcgacagttgaggccaagtggcttcgtgaactcctgatggatttgccggtggttgaaaaaccagtgccagctatcctaatgaactgtgataatcaaatagtgattattaaagtgaacagtttaaaggacaacatgaaatcatctaggcatatcaagagaagactgaaatatgtcagaaagcagaaaaactccggagtgatagcattggactatgtccaaacggctagaaatctagcagatcagtttaccaaggggctaccacgtattatgatagacagtgcatcgagggaaatgggcttgatacccacctaa

SEQ ID NO: 39623 - DNA, 873 bp, Oryza sativa
  Clone ID: PAT_MRT4530_43144C.1
atggtgttggaggacaactccagctcgaagtcattgtactacgtgtcggaggccctcgcagggccaaagacgcagtttacggaactcgagaagatagcttatgcccttgtaatggcttaccgcaaactgaggcattactttttggctcacgatatcaccgtgcctacgtcgtacccgactggtgcagccgcgataatcacttcgcccaccggccgcacaacgtcatttgcggcgcgcttggagttctcggccactaataacacgactgaacacaaagctatcctacaggtgctccgcaaggcaagggctatgaaggctgaagcacacttccggggcatcgtggtcaccggagtgccacgagcaacaagagccgatgtagacaccctagccaagatggctgcggccaattcactcatgcccccgcatgttctctacgagaggaatgcggaggccgcggcggcggtggtggcgtgggaagagtcggtggcggcacgggatgcagaagccgctgtggcgtgggatgcagcggcggcggcggctgcgacgtgggatgcggaggcggtggtggcagcggcagcgtgggatgcggaggcggtggcggcgtcgtgggatacagagccggcggtggtgtgggacacagagctgggtgggacgagggacaacccggtcccctcctggcagcggtgccctcccggcggtgttgaggaggcgaggcgaggcggcggaggagacgaggcaaggcgaggcgaacgcggtggcgacatgggtgggggatggagaatggaatggaatggattcgtgggcacggtggaggggggacgacgtcgccgctgcctcctcgtctcgcgcagccgtctcgcctcgcgccgctag

SEQ ID NO: 39624 - DNA, 6726 bp, Oryza sativa
  Clone ID: PAT_MRT4530_43145C.1
ctacttctcgcgcgtgtcactgccggccgacgagatcctcctcccgtgcaaagccggccggtgagatcctcccccatgtgcgccgcttcgctgacatgccaggagcgtcgcttctgcttccacgatgaagacgacaacacgccatgaccgccgcttccgctcgtcgagctcgacgacgtcctgcgtccatggatgctggtgcagcttccgcagtccgcccagcctctcggcgacctccttcatcgccggcctgtcgccgccgcacatctgcaggcactccagagccagcagcgtgatctcctccagcaactcaccgctcgcctcgctcttcacctgctcatccagtatcaaatcggctctgttctccctcatggcggccaagaacctcgccgacaagctccgcccctcatccggcccgtcgaggcagagcggcttcttgccggtgagcagctcgagcaggacaacgccgaagctgtacacgtcgctcttctccgtgagctggcatgtctgcatgtattctgggtcgaggtaaccgcacgtcccctgcaccatggtcatcatttgggcttcgtcagtgggagccaagatggaggcgccgaagtcggacaccttggccatgatgctctcgtcgaggaggatgttggaggacttgacatcgccatggaggatcggcggcgacgcgaaggagtgcaggtacgcgagtgactccgccgactcgtgggcgatccggagacgggaagcgaaggagatggcgccggcagatccgccatggatgagctggtacaaggtgccattggggacgtactcgtagaccaacatggggacgtcgacctcgaggcagcagccgagtagcttgacgatgttcttgtggttgacctgggagaggatcagcatctccttcccgaattccttcttgttcctctcgtccattagcttgcaccgcttgatggcgacaacgaggtcgtcggaggctgcagccacccagcccttgtacacggtgccgtggccgccgcggccgaggacgttgctctcgtcgaagccgttggtcgcctgctcgagctgctcctcggtgtatatggtgaacgcgttgctcttcctcgcgttcagctcctcgtacagaagcaggccgccatgtcgcttgaagtagctgcgcttgatgtcggcaagcgctcttcgctggtgtactaggtatgagctcaggaagctcatcacgatgatagcgatgccaccggtgacgccgatagctatgatcgctgagaccgggagccggtaagatcgtttaaatttcaggtccggcaaagatcgtttcaggtccggctcgcagatgagtactccactcttgttgctcttgtgctctccttctggacacgagcagttgtgtccgccgggaaaattactgcaaatcatcccgtccggacacccgtcatttccaggagcacatacgtcaatatctgtgcatccgccggggaggtaggggttgcccttgtacccactcgtgcagttgcacacgtagccatcagccgtgccgacgcacgcgctgtggtcgctgacgcacgcgtaggtatctttcattcttgcttccttgcacttctcgctgcccgccgcgaagttgagcacgacggggaccgtgccgttcttgtttctgaaaaacttatcggttgtcgcgtagtccctctcgaagctgaagcttttagcctccatcaacacggcgtggctgcaccaggtgtaattgtccggcgaccagctgttattaaataataatggcccgctgaattcaagccggtaggatttgagtcccacggggatggccatctcgcagcatcccgcgccagagcagtagccgttcctgatgttgctcccgttgccgaagcatgtggacatgcagacgttcaggatcgggtcgactgacgcctcctctccggatagcaagacgagcacgttgcagccgacggtgacgaattggttgtcctcgtaggagaagcggtacggcagctccgtcacgtcgaggcccatccacgagctgttcttcaacggggcgccggttgggtcgttctcgtccttgcactgccaggagatgctgttggcaatccggatcttgccgtggagcaggttgatgtcgagcacggccaccaccacttgctgccgatcggtgccgaggcgaagctgcggggtgtcgtggacgcactcgaggctgaaatcgtcggacagcgagcagtttggcccgatgccgaacgggtactcgatgtcgacgttgccgcacttcttcggacacagcggcgacggcggcggccgccgtgatgcggccgcgatcagaggctgcagggcgagcaaagctaggccaaggaagagcagcattggatgatgcttcgtcatccgtgcctggaggtggctgtcgtagcagatgccacgttcccacgattccctccgcaacagcgcgtccacgttctttctcctgatagataaggaggccgcgagtccgatccgatttcttcgcttctttcccggtgttagtttctctttctccgcgcctgagttgctctcgcttccccgcttctgatctcttgcgcgcacgagagattggaaggagcagtgcctccgaaaccacacctttgcctgagatctgcaccgggtaggcgggtgatcaggtttttggggagtgcctcccgcacgactgctcatcaccatgtctggagttgccaccgccactgctggcggaggtggtacgccgccgacaggagctcgatccggagctggtgcgccaggaggtgccgtgaacgacaacaacaacggaggcaattcgccactgctggcggaggtggtacgccgccgacaggagctggatccggagctggtgcgccaggaggtgccgtgaacgacaacaacaacggaggcaattctgcctcaccatccagcggagggccattctcagggtataatcttctcctcctgctactgttgttagcgctatcgctatactatgtgcgctatgttcttgttcctgttctacatggtgcctctagcatgttatcgcgttactgttatgttcctgttcctgacattcaggatgcgcatagtatgctactggttatgttaagatcaccctacactgcttatgccatgatcattgctttaaccttttggattaaaatatgccgattaatgactatatttccaacaatccaaaaacctgataggtcattttcggtagttggctttgctgctgcactgaaaccacatgcttttgatggttcaaactataagagatggaaagcacgtgcactattgtggttgacagcgatgcagtgcttctatgtttcacggggcaaacgaagtgaaccacctctttctcctgaggaagaggctaagttcgaggcttcggattgcctgttccgtggagcattgatcagtgtactcgctgacaacatagtggacgtgtacatgcacatgccttctgggaaggacatgtgggatgcacttgaggccaagttcggagtttctgacgccggcagtgagctgtatgttatggagcagttctatgactacaagatggtcgatgaccgttctgtagtagaacaagctcatgagattcagatgctggctaaggaacttgagaacaacaactgtgagttgccggacaagtttgtggcaggtggcattattgccaaactaccaccttcttggtcggactttgccacttctctaaagcacaagagacaagagttcagtgttcctgatctcattggctctttgggtgttgagaagaaggcgagggcaaaggacgtccagggcaaaaaggttgagggaggttctagtgccaatatggtacagaagaagaaccctcatgcatcccacaacaacaagaaagtcaagcctgatgtcaaacccaagactgcaaccaattttaagaagaaaggcaagggaaaggcaaagggagactgctttgtgtgtggcaagtctgggcattgggccaaggactgtcctgagcgcaaagacaggaagtctgccaacatgatcattagcgagggaggaggaacatcggggtacggtaaaatattacctacagttctctctgtttttcattcacctgattggtgggtagacactggtgctaatattcatgtatgtgctgacatttctctgttttcttcttatcaggtcgggagaggttcctccttgttgataggaaacgggtcgcttgcggctgttcatggtgttggtacggtcgatctgaagtttacttcgggaaagaccgtgcagctgaagaacgtgcagcatgtcccttcaataaagaagaatctagttagcggctctctattgtgtagagaaggttttagacttgtgtttgagtccaataaatgtgtcgtatctaaatatgggacttttgttggaaaaggttatgacagcggaggcttgttccgcttttctttgaatgacatgtgtaataatcataatgctgtgaaccatattagcgagaatgatgagtctaatgtgtggcattcgcgactctgtcatgtgaatttcggttgtatgacgcgcttagctaacatgagtttaatttcaaaattcactttggtaaaaggttccaagtaccatacttgtgttcaatcgaaacaacctcgcaagccacacaaggcatctgaggcgaggaatttggcacctctagaacatgttcattccgatttgtgcgaaatgaacggcgtgttgactaaagggggaaagaaatatttcatgacactgatagatgattgcactagattttgctatgtgtatctattgaaaacaaaggatgagacattgcattactttaaaatctataaagctgaggtagaaaaccaacttgaaaggaaaatcaaacggttgaggtctgatagaggtggggagtatttttccaatgagtttgcatccttttgcgaagagtttggaattattcatgagatgacgcctccctattcaccccaatcaaatggggtggccgaaagaaagaaccgtactctaactgagatggtgaataccatgttagacactgcggggctttccaaggaatggtggggtgaggcagttttgactgcgtgtcatgtcctgaataaaattccaatgaagcataaggaagtaacaccattcgaggaatgggaaaggaagaaattaaatctctcatacctacgaacatggggctgtttggccaaagtaaatgtacctatagccaaaaagcggaaacttggaccaaaaactgttgattgtgtgtttcttggttatgctatccacagtgtggattatagattcttaatagtaaactctggagtacccgacatgcatgttggtacaattcttgagtccagagatgctacattctttgagaatgaatttcctatgaaatatacacctagcacttctagtaaagaaactgtcatgccccatgagcactttgcaccgatagaacacaatgatcaaacgcctaaggaaaatcctgaggaggacaacattgtagatactcgcaagagtaagagacaaagggttgcaaaatcctttggagatgactacattgtatacctcgtggatgacaccccaagaaccatagaagaggcatattcatctcctgacgctgactactggaaggaagcagtacgcagtgaaatggactcgattatgtctaatggtacttgggaagtcgttgagcgtccatatgggtgcaagcccgtaggatgcaaatgggttttcaagaaaaagcttaggcctgatggtacaatcgaaaagtacaaggcaaggcttgtggccaagggttatacccaaaaggaaggcgaggacttcttcgacacatactcaccagttgctcgcttgaccacgattcgagtactacttgctctggcagcctctcatggtcttctcgtccatcagatggacgttaagacagctttcctaaacggagagctggaggaggagatctatatggatcaaccagacggatatgtactagaaggtcaggagggaatggtgtgtaaactattgaaatccttgtatggcctcaagcaagcgcctaagcaatggcatgagaagtttgacaccacgcttacatctgcaggctttgttgtgaacgaagctgacaaatgtgtatactatcgctatggtgggggagaaggggtgatcttgtgcttatatgtcgatgacatactgatctttgggaccagccttaatgtgattgaggaggtcaaagactatctgtccaagagttttgaaatgaaggatttgggagaggctgatgttattcttaacatcaaactacaaagaggagatgagggtgggattacacttatgcaatcccactatgtggacaaggttttgaatcactttggatatagtgactgcaagccagctcctactccttatgatcccagcgtgctattaaggaaaaaccaaagaatagtaagggatcagctgagatactctcaaatcattggttcattgatgtacttggctagtgcaacgaggcctgacatctcatttgctgtaagcaagctgagccggtttgtctcaaatccgggagatgatcattggcaggctctggaaagagtaatgcgctatctaaagggcactatgagctatggaattcactataccgggtatccaaaagtactagaagggtatagtgactcaaactggatatctgatgctgatgagataaaagccacaagtagatatgtggtcatacttggaggtggcgctgtttcctag

SEQ ID NO: 39625 - DNA, 3654 bp, Oryza sativa
  Clone ID: PAT_MRT4530_43146C.1
atgtcgaacactggagacaaggagaaggagactcccgtcaacaccaacggaggcaatactgcctcaaactccagcggaggaccattcttggggtataaccttattacattatttcaattagaagttttactgttaatgttcatcgcaatgtcaacattgtgtcattatgtgattgttgatgcttattcaacgttaagcatgctcatgttgattacattcaccactatcactggatcaaatcctattgtaaatatcatgtttattatcttgttattttggattaaaatatgccgaattatgaccaaatttccaacaatccaaaaacctgataggtcattttcggtagttggctttgctgctacactgaaaccacatgcctttgatggttcaaactataagagatggaaagcacgtgcactattgtggttgacagcgatgcagtgcttctatgtttcacggggcaaacgaagtgaaccacctctttctcctgaggaagaggctaagttcgaggcttcggattgcctgttccgtggagcattgatcagtgtactcgctgacaacatagtggacgtgtacatgtacatgccttctgggaaggaaatgtgggatgcacttgaggccaagttcggagtttctgacgccggcagtgagctgtatgttatggagcagttctatgactacaagatggtcgatgaccgttctatagttgaacaagctcatgagattcagatgctggctaaggaacttgagaacaacaactgtgagttgccggacaagtttgtggcaggtggcattattgccaaactaccaccttcttggtcggactttgccacttctctaaagcacaagagacaagagttcagtgttcctgatctcattggctctttgggtgttgaggagaaggcgagggcaaaggacgtccggggcaaaaaggttgagggaggttctagtgccaatatggtacagaagaagaaccctcatgcatcccacaacaacaagaaagtcaagcctgatgtcaaacccaaggctgcaaccaattttaagaagaaaagcaagggaaaggcaaagggagactgctttgtgtgtggcaagtctgggcattgggccaaggactgtcctgagcgcaaagacaggaagtctgccaacatgatcattagcgagggcggaggaacatcggggtacggtaaaatattacctacagttctctctgtttttcattcacttgattggtgggtggacactggtgctaatattcatgtcgggagaggttcctccttgttgatgggaaacgggtcgcttgcggctgttcatggtgttggtacggtcgatctgaagtttacttcgggaaagaccgtgcagctgaagaacgtgcagcatgtcccttcaataaagaagaatctagttagcggctctctattgtgtagagaaggttttagacttgtgtttgagtccaataaatgtgtcgtatctaaatatgggacttttgttggaaaagattatgacagcggaggcttgttccgcttttctttgaatgacatgtgtaataatcataatgctgtgaaccatattagcgagaatgatgagtctaatgtgtggcattcgcgactctgtcatgtgaatttcggttgtatgacgcgcttagctaacatgagtttaattccaaaattcactttggtaaaaggttccaagtgccatacttgtgttcaatcgaaacaacctcgcaagcctcacaaggcatctgaggcgaggaatttggcacctctagaacttgttcattccgatttgtgcgaaatgaacggcgtgttgactaaagggggaaagaaatatttcatgacactgatagatgattgcactagattttgctatgtgtatctattgaaaacaaaggatgaggcattgcatttctttaaaatctataaagctgaggtagaaaaccaacttgaaaggaaaatcaaacggttgaggtctgatagaggtggggagtatttttccaatgagtttgcatccttttgcgaagagtttggaattattcatgagatgacgcctccctattcaccccaatcaaatggggtggccgaaagaaagaaccgtactctaactgagatggtgaatgccatgttagacactgcggggctttccaaggaatggtggggtgaggcagttttgactgcgtgtcatgtcctgaataaaattccaatgaagcataaggaaataacaccattcgaggaatgggaaaggaagaaattaaatctctcatacctacgaacatggggctgtttggccaaggtaaatgtacctatagccaaaaagcggaaacttggaccaaaaactgttgattgtgtgtttcttggttatgctatccacagtgtgggttatagattcttaatagtaaactctggagtacccgacatgcatgttggtacaattcttgagtccagagatgctacattctttgagaatgaatttcctatgaaatatacacctagcacttctagtaaagaaactgtcatgccccatgagcactttgcaccgatagaacacaatgatcaaacgcctgaggaaaatcctgaggaggacaacattgtagatactcgcaagagtaagagacaaagggttgcaaaatcctttggagatgactacattgtatacctcgtggatgacaccccaagaaccatagaagaggcatattcatctcctaacgctgactactggaaggaagcagtacgcagtgaaatggactcgattatgtctaatggtacttgggaagtcgttgagcgtccatatgggtgcaagcccgtaggatgcaaatgggttttcaagaaaaagcttaggcttgatggtacaatcgaaaagtacaaggcaaggcttgtggccaagggttatacccaaaaggaaggcgaggacttcttcgacacatactcactagttgctcgcttgaccacgattcgagtactactcgctctggcagcctctcatggtcttctcgtccatcagatggacgttaagacagctttcctaaacggagagctggaggaggagatctatatggatcaaccagacgggtatgtactagaaggtcaggagggaatggtgtgtaaactattgaaatccttgtatggcctcaagcaagcacctaagcaatgtcatgagaagtttgacaccacgcttacatctgcaggctttgttgtgaacgaagctgacaaatgtgtatgctatcgctatggtgggggagaaggggtgatcttgtgcttatatgtcgatgacatactgatctttgggaccagccttaatgtgattgaggaggtcaaagactatctgtccaagagttttgaaatgaaagatttgggagaggctgatgttattcttaacatcaaactacaaagaggagatgagggtgggattacacttgtgcaatcccactatgtggacaaggttttgagtcgctttggatatagtgactgcaagccagctcctactccttatgatcccagcgtgctattaaggaaaaaccgaagaatagcaagggatcagctgagatactctcaaatcattggttcattgatgtacttggctagcgcaacgaggcctgacatctcatttgctgtaagcaagctgagccggtttgtctcaaatccgggagatgatcattggtag

SEQ ID NO: 39626 - DNA, 2268 bp, Oryza sativa
  Clone ID: PAT_MRT4530_43147C.1
atggtgctcctcctgctgctcctgctcgcgctcccggcggcggcgggcgggctggcggcggacgggcaggcgctgctggccttcaaggcggccgtgctgcgggaccccgagggcgcgctcgccgactgggacgcctccaccgccgccgacccctgcgcctggaacggcgtctcctgcggcgccgggtccggggccgggggcgccgaccgccgcgtcgtggcgctgtccctcccgaggaagggcctcgtgggctccctcccggcgtcgccgctcccggcctcgctccgccacctcaacctccgcagcaaccgcctcttcggcgagctccccgcgccgctcctctccgctgcggcggggctgcagagcgtcgtgctgtacgggaacgagctgtacgggccgatcccgccggagctcggcgacctcccctacctccaaatcctcgacctctcctccaactccctcaacggcacgctcccgcccgcgatcctgagatgccgccgcctccgctccctcgcgctcggctggaacaacctcaccggcgcgctgccgcaggggtttgccaggggcctgtcggcgctggagcacctcgatttgtcccacaaccgcttctccggcgccgtcccggaggacatcggcaacctgtccaggctcgaggggacggtcgacctctcgcacaaccagttctccggccagattccggcgagccttggaagattgccggagaaggtctacattgatctcacgtacaacaatctgtccggcccgattccgcagaatggggcgctggagaaccgggggccgacggcgttcgtcggcaacccgggcctctgcgggccgccgctcaagaacccgtgctcgccggacgccatgccgtcgtccaatccgtttgtgcccaaggatgggggctccggcgcccccggtgctgggaagaacaaggggttggggaaggttgccattgtagccattgtgctcagtgatgtggtggggattctgatcattgcactggtgttcttctactgctattggagggctgtttcctccaaggagaaggggaatggtggggctgctggttctaaggggtccaggtgtggcaaggattgtgggtgttttagccgggacgaatccgccacgccgtcggagcacaccgagcagtatgacctcgtgccgttggaccagcaagtgaggttcgatctcgatgagctgctcaaggcatcagcatttgtgcttgggaagagcggcatcgggatcgtgtataaggtggttcttgaggacgggcttacgatggccgtcaggcggctaggagaagggggactgcagaggtttaaggagttccagactgaggttgaggccattggcaaggtccgccatcccagcattgttaccttgagggcttattactggtcttatgatgagaagttgttgatatatgattacatccctaatggcagcctctctgcagcaatccatggtaaacctgggacaatgacattcacaccattgccatgggatggacgtctaaaaatcatgcaaggggttgcaaaggggctatctttcttgcatgaatttagccctaaaaagtatatccatggggacttaaggccaaataatgtcctccttggatcaaacatggagccatacatatcagattttgggctcggacggcttgcaaatattgctggaggatcacctttcacacaatcagatcatgctggtatagagaaagctcagagccagcagtccgatgcctcgttctgtattgaagaaaagaaaccatctgccgatgtgctcgatccttctctcgccagagactctgaacgggaagatgagatgatcgcagcactgaaagttgctctcgcttgcgttcaggccaatccagagcgaaggccctctatgaggcatgtcgcagaaaccctggatcacctcaatgtttcactggaatttattgttgtggatctgggtaggggcatggaggagctgcaagcatgcaaagcatggtcccttggtgtacttgaaccagaacagccgtggggctgtgttccccttcaggaccaggtcgccctaaaaaggtgtcctatcaaatttgggcctttggatttgcatcctacagttatgttctcctcaagctcgatagcgactggcggtggctcgaggggtaggggtgggaggggggacttagagggatggtttgggagacagcctcctggcggtggattgtgggcatagatgagttatgactattgtgcttgcctataaaaaaaaaaaaaaaaa

SEQ ID NO: 39627 - DNA, 189 bp, Oryza sativa
  Clone ID: PAT_MRT4530_43148C.1
caccaccacacatgaagacaaacgaaaaacagcggaagactagggcgacgaccacaggcgcttgacggcaggcacgagatagacaccaaagccttcatcatccaggaactcctcttctaggtttgggaaaaactgagcaagactgaatacaaccaccgtacttaacaagacacacccacgagtgcagaa

SEQ ID NO: 39628 - DNA, 883 bp, Oryza sativa
  Clone ID: PAT_MRT4530_43149C.1
caggaggggcgaggcgaggcgaggcagacagcagctgctgctgtactctctcgttttgtaacggacggtaataaacacggagaattgatttcgtatcaataaacacgtcggttacggaattaaacatcgtgaattgattccgtcagttacggaattaaacgtcgtgaattgattccgtcggttacggaattaaacgccgtgaattgattccgtattaacgagcgcgtcggttacgaaattaaacaccgcggttgatgactccgaacgttactgtcgccctcgcatatatatactccgcagcgaccagaaggacgaacgaagttcttcacgactcttgcacttcgagttcctcctcctctgttcctgagctgcagaatccttccccggttctgttcacctgcgcgcacagatgtacgggatgagcaggtgcctccggaactccgtccgcttgagaacttgcacgggtaggtgggcgatcaagtttttgggtagcgcttcaagcgcgactgctcttgttcttcgcggctactgctactgcatcggcaccttcaccaagatgtcaacggagattggagacaagaagatgaacaacatcaacggaggcaatactgcctcaaaatccagcggtgggacgttctcgggtgtactcgctgacaaaatagtggacgtgtacatgcacatgccttcagggaaggacatgtgggattctcttgaggccaagttcggggtttccgacgccaacagcgagcggtatgtcatggagcagttctatgactacaacatggtcgatgaccgttctgtagtggaacaggctcatgaaattcagatgctggcaaaggaacttgggaacaacaactacgagttgccggacaagttttactga

SEQ ID NO: 39629 - DNA, 536 bp, Oryza sativa
  unsure (1)..(536): unsure at all n locations
  Clone ID: PAT_MRT4530_4314C.1
nctttttcttcttcttcttcctcagaataaatnctctntccactgccgcaaggaaaggcgcctcaccgtcaccggggtgtgccggaaagctcccatntttgtctccatttgttgcttgccctcaattccttccttctttcctccctntgggttcttgtccccggaggctaaatgctcgccttctctagatctgtttctacgagttttcttgcaggcaggtgattggagctcacgtcgcggcggtgatttgcactgtcctcggggtctgaattgctaattactactgagcgtctctctcgcatgaggaataattcgagaatcgacgaaagctccaacatttgggtgaatttggtcgctgccccgttcaatttcgccctcgcggccctggaattcgcgatgtggagctccttctggtgcttcatggccatcctctccgccaatttctgagccaaatctcgtgcgattccgaggcccccccacgaatctgtggggtcgtcggagcgataggtcactggcaccatcaccaccaccaccat

SEQ ID NO: 39630 - DNA, 3814 bp, Oryza sativa
  Clone ID: PAT_MRT4530_43150C.1
ctatttgcatatcttgtcagttgcaggatcaaactgactagcatgtctgcatctcatcaagatttggacctgcacaggagctaagcagatctcccaggctggtgtgttcgattttttcgtcaacatccgtgcgccgccgctgcttgtgttgcttctgtctgcttccccggttctaattgcttgcgcgcacgagagatcggaacgagcagggcctccagaaccacaccttcgcctgagatctgcaccgggtaggcgggtgatcaggtttttggagagtgcttccgcacgactgctctcgacttctgctctgttcatcgtcgtctcgtcgtccaccatgtctgcacctggagccgccgccgccgctggagccactgtcgccatccctgaagatggcgcgccgggagccggagccgctgcgaacgtcaacgtcaacggaggcagttctgcctcacaatccagcggagggacattctcggggtcattttcggtagttggctttgctgctgcactgaaaccacatgcatttgatggttctaactataagaggtgtaaagcacgtgcactattgtggttgacagcgatgcaatgcttctatgtttcacgcggtatacgaagtgaaccacctctctctcctgaggaagaggttaagttcgaggcttcggattgcctgttccgtggggcattgatcagtgtactcgctgacaacatagtggacgtgtacatgcacatgccttctgggaaggacatgtgggatgcacttgaggccaagtttggagtttccgataccggcagtgagctgtatgtcatggagcagttctatgactataagatggtcgatgaccattctgtagtagaacaagctcatgagattcagatgctggctaaggaacttgagaacaacaactgtgagttgccggacaagtttgtagcgggtggcattattgccaagttgccaccttcttcgtcggactttgccacttctctaaagcacaagagacaagagttcagtgtttctgatctcattggctctttgggtgttgaggagaaggcgagggcaaaggacaaccggggcaaaaaggttgagcgaggttctagtgccaatatggtacagaagaagaacccacatgcatcccacaacaacaagaaagtcaagcctgatgtcaaatccaaggctacaatcaattttaagaagaaaggcaagggaaaggcaaagggagactgctttgtgtgtggcaagtctgggtattgggccaaggactgtcctgagtgcaaagacaggaagtctgccaacatggtcgggagaggttcctccttgttgatgggaaacgggtcgcttgcggctgttcatggtgttggtacagtcgatctgaagtttacttcgggaaagaccgtgcagctgaagaacatgcagcatgtcccttcaataaagaagaatcttgttagcggctctctattgtgtagagaaggttttaggcttgcgtttgaatccaataaatgtgtcgtatctaaatatggaacttttgttggaaaaggttatgacagaggaggcttgttccgctcttctttggatgacatgtgtaataatcataatgttgtgaaccatattagcaagaatgatgagtctaatgtgtggcattcgcaactctgtcatgacgcctccctattcaccccaatcaaattgggtggccgaagaaagagccgtactctaactgagatggtgaatgccatgttagacactgcggggctttccatggaatggtggggtgaggcaattttgactgcgtgtcatatcctgaataaaattccaatgaagcataaggaagtgacaccattcgaggaatggaaaaggaagaaattaaacctcccatacctacgaacatggggctgtttggccaaggtaagtgtacctatagccaaaatgcgaaaacttagaccaaatactgttgattgtgtgttccttggttatgttattcatagtgtgggttatagattcttaatagtaaactctggagtacccaacatgcgtgttggtacaattattgagtccagagatgctacattctttgagaatgaatttcccatgaaacatacacctagcacttctagtcaagaaactgtcataccccatgagcactttgcaccgatagaacacaatgatcaaacgcctgaggaaaatcctgaggaggacaacattgtagatactcgtaagagtaagagacaaagggttgcaaaatcctttggagatgactacgttgtatacctcgtggatgacaccccaagaatcatagaagaggcatattcatctcctaacgctgactactggaaggaagcagtacgcagtgagatggactcgattatgtctaatggtacttgggaagtcgttgagtgtccatatgggtgcaaacctgaaggatgcaaatgggttttcaagaaaaagcttaggcctgatggtacaattgaaaagtacaaggcaaggcttgtggccaagggtcatacccaaaaggaaggcggggattttttcgacacatactcaccagttgctcgcttgaccacgattcgattagtacttgctctggcaacctctcatggtcttctggtccataagatggacgttaaaacagctttcctaaacggagagctggagaagaagatctatatggatcaaccagacgggtatgtactagaaggtcaggagggaatggtgtgtaaactgttgaaatccttgtatggccttaagaaagcacctaagcaatggcatgagaagtttgacaccacacttacatctgctggctttggtgtgagcgaagctgacaaatgtgtgtactatcgctatggtgggggagaggcagtgatcttgtgcttatatgtcgatgacatattgatctttggaaatagcctcaatgtgattgaggaggttaaggactttctgtccaagggttttgaaatgaaggatttgggagaggctaatgttatccttaacattaagctactaagaggagctgagggtgggattacacttgtgcaatcccactatgtggacatggttttgagtcgctttggatatagtgactgcaagccagctcttactccttatgatcccagcgtgctattaaggaaaaaccgaagaatagcaagggatcaactgagatactctcaaatcattggtacattgatgtacttggctagtgcaacgaggcctgacatctcatttgctgtaagcaagctgagccggtttgtctcaaattcgggagatgatcattggcaggctctggaaagagtaatgcgctatttaaagggcactatgagctatggaattcactataccgggtactcaaaaatactggaagggtatagtgactcaaactggatatctgatgctgatgagataaaggccacaagtggatatatgttcacacttggaggtggcgctgtttgctagaaatcttgcaagcagaccatcttaacgaggtcaacaatggaagtagaacttacaacactagatactacgacaattcaggccgagtagcttcgtaaactcctgatggatttgccggtggttgaaaaaccagtgccagctatcctaatgaactgtgataatcaaacaatagttattaaagtgaacagtttaaatgacaacatgaagtcatctaggcatatcaaaagaagactgaaatctgtcagaaagcagaaaaactccggagtgatagcattggactatgtccaaacggctaaaaatctggcagatcagtttaccaaggggctaccatgtaatgtgatagacagtgcattgagggaaatgggcttgatacccacc

SEQ ID NO: 39631 - DNA, 1737 bp, Oryza sativa
  Clone ID: PAT_MRT4530_43151C.1
atggccggcggcggctggtcctccctccccgccgatctcctccgggaggtctccggccggctgtactccgacgccgaccacctccacatccaccaggtctgcacccactggcgagccgccaccctccccgtctccgcctgccgcccatgggtcgtcgccggccgcgcgctgcagcgtgggctggtaacaatcggcgactactccctccgcctcccgggcggcggcgcggagaggatggacgccggcctccgccgcgccccgccgggcctccgccactgctgcggcgcgtcgcgcgggtggctcgccctgaccgacgacgcccggtcccccacgcggctcgcgctgtgggagcccctctccggcgccgagatcccgctcccgtgcctgagccccatcaccagggtctccctctccggcgacccgctcgcctcgccgggctgggtcgccatggtctcccagctcaaaggccgagaagggcagaagaccctcgtctgccgccgcggggacgccgcctggactatgctgttcgagcatggcacatccgagatcggcagcgtcgtgttccacggagggaaggtgtactacattgacatcatgagcaacattgttgtctgcgatctcgacgccgacggagctagcggtgcaaagtgcactcaattcttccatgttcgcacatcggtgtccatgctctgcagttgtgacaagtttcatccggagcgtggggtgcatctggtagcctgcgatggcgaggtgttgctcgtggtgttgcgctggggaggccacccatcactggctgaaatctacaagcctgagtggaaggggaaccaccagttggggcttggcgagagggtgatggaccttggtgatcactcgctgtttgtgggccgaggtgacacattttcactttctgctaaggagtttcctgcgatcaagagaaattgtgtctactatgcagataaaaattacaagcagcagcattggatatctgtgttccatttggaacaaccagatgttttggaagaaattccatacccggaagagctgaaggaagacatgaccaactggatgccacattcctgcaaacattgcagatggcaaatttctgtcactgaaattgcttgcttgaatgctcatagcatacactatcctcacatcgatgggcatcccggagctcgtccgcccgtcgccgctatcctcccgtggctcgccgtcgccgttcgccgtcgtccccctccgcgccggccactctcggtgaggcatccccctcctctattcccctccctctccctcctagccgcgccgggtcgagccactgccccggtcgtgtgccgccgcctttgcgccgccaccccagtcgccggcaagggtgggcgtgatggagcggggcgggccctgcgacggcctctgtcgcttccggattcacctaggcacgagaggggactgcccgctgccttgcgaggagtgggggcaaactctattgagtttccagtacttggtcgcatggctcaagatattttaacaattcctgcttcaacagtatctttagagtctgtgtttagcactggatcaagattagtatctgaatttcgaagccagttgactccggaaacaactaaagcacttgtatgccttcaagattggattagagaatcaggatcatcttctgagctaagcactgaatcgatctttgactccaaagtggttctccaagtttcatttgaggctcagtttagtcct

SEQ ID NO: 39632 - DNA, 4368 bp, Oryza sativa
  Clone ID: PAT_MRT4530_43152C.1
agttcagatttggttgagaaacttgagttgcctacacaaccgcatcatcatccatattagatcaaatggttcaacttttgtgataatattcaaaggatgaagaatggaatcgatgagattttcagagataccaagaaagatgctattgtgatgtcttcaactaagtctgaattacaaaacgaacgtatttttgtgcctattgttttggacactaatattttgcaggcatctgagaataaccaaggtaatgagaaagagaagaaatacgaagtggaaaaagatctatctatagctccatgcatgctggaagaatgttccattgaccaagcacctataatttctaaagaggagaaaagagatactgataatggtgttataactactcagggtatgggtggcgctcaaaatcagcgataccaacaaggtaacaataatcgcgtgcccgatgatccttatgctaaggttaagtttaaaataccatctttttcgggttattatgatgctgagaaatactctgattgggagatgatagtagagcaaaagtttagtgcccaccttgtgcctgaccaacatagagttcgacaagccagtagtgagttcaaagattttgctatcatgtggtgggctaggttagctgatgatggaattttacctactacttggaaagaacttaaggtagctatgcgtgatatatttgttcctccatcttatcttagagatttaagcaagaaactgatgcgtttagagcaaagggataaatctgtacaggattactatggtgagctacaaaagggattgatgcgatgtagcatagtgaagggaactgaggattccatttgtcgcttttacatgggattgaggcgcaagattcaggacatagtagataataaggaatttaacactgtcaaccagttgtttcagtttgctatgcttgcagtgaaggaattgcaggggcgtgatcaacaggtcaagaataaggcgagcacatacataccgcgagcaaagccatctttggggcttcccaagcccatctctttctggacgaccccactagcgagcaagcgaccagttgcgtccggagtttctgcagcgccaaaaccaccttccccacgacctgcagtttcaggtaaaggttcttcgcaggtatccaccaagagtgcctcatctatcgcttcgacgggacgcacgtccagaattcggtgccaccactgccatggatttggccatgtgcagaagatttgccctagtcaacgggcatacgttgctacggtagattgctacatctgcacctccgacgttgaagatgttgaggtggaagagaagaaagacggagagcaaaaagacttatccatagctccatgcatgcttgaggaatgtctaattgaccaagcgcctataatttctgaagatgagaaaaaaggtaatgataatggtgctacaactaatcaagggattagccttctcgacgaggtcaacctggtttcggcacggttgataaccagaggagacgtggtgctgcgattgcggggctcagtagcgtgttcgttcagaagccagatcgagttgtgtcgcgactccgcccaaatcgattgtttatcaatacctattggaagatcgggacctaacatcctcatcatacggggtaaacgaagtgaaccacctctctctcctgaggaagaggttaagtttgaggcttcggattgcctgttccgtggagcattgatcagtgtactcgctgacaacatagtggacgtgtatatgcagatgccttcaaggaaggacatgtgggatgcacttgaggccaagttcggagtttccgacgctggtagtgagctgtatgccatggagcagttctatgactacaagatggtcgatgaccgttctatagtagaacaagctcatgagattcagatgctggctaaggaacttgagaacaacaactgtgagttgccggacaagtttgtggcggatggcattattgccaaattgctaccttcttggtcggactttgccacttctctaaagcacaagagacaagagttcagtgtttctgatctcattggctctttgggtgttgaagagaaggcgagggcaaaggacaaccggggcaaaaaggttgagggaggttctagtgccaatatgttacagaagaagaaccctcatgcatcccacaacaacaagaaagtcaaggctgatgtgaaacccaaggctacaaccaattttaagaagaaaggcaagggaaaggcaaagggagactgctttgtgtgtggcaagtctgggcattgggccaaggactgtcctgagcgcaaagacaggaagtctgccaacatggtcattagtgagggcagaggaacatcggggtacggtagggagaggtttctccttgttgatgggaaatgggtcacttgtggctgttcacggtgttggatgaagcattgcgttacttttaagacctataaagctgaggtagaaaaccaacttgaaaggaaaatcaaacggttgaggtctgatagaggtggggagtatttttccaatgagtttacatccttttgcgaagagtttggaattattcatgagatgacgcctccctattcaccccaatcaaatggggtggccgaaagaaagaaccgtactctaactgagatggtgaatgccatgttagacactgcagggctttccaaggaatggtggggtgaggcagttttgactgcgtgtcatgtcctgaataaaattccaatgaagcataaggaagtaacaccattcgaggaatgggaaaggaagaaattaaatctctcatacctacgaacatgggggtgtttggccaaggtaaatgtacctatagccaaaaagcataaacttggaccgaatactgttgattgtgtgttccttggttatgctattcacagtgtgggttatagattcttaatagtaaactatggagtacccgacatgcgtgttggtacaattattgagtccagagatgctacattctttgacaatgaatttgccatgaaaaatacacctagcacttctagtcaagaaactgtcataccccataagcactttgcaccgatagaacacaatgatcaaacgcctgagggaaatcctgaggaggacaacattgtagatactcgtaagagtaagcgacaaagggttgcaaaatcctttggagatgacaacattgtatacctcgtggatggcactccaagaaccatagaagaggcatattcatctcctgacgctgaccactggaaggaagcagtacgcagtgagatggactcgattatgtctaatggtacttgggaagtcgttgagcgtccatatgggtgcaagcctgtaggatgcaaatgggttttcaagaaaaagcttaggcctgatggtacaattgaaaagtacaaggcaaggcttgtggccaaaggttatacccaaaaggaaggcgaggattttttcgacacatactcaccagttgcccgcttgaccacgattcgagtactacttgctctggcagcctctcatggtcttctcgtccatcagatggatgttaagacagctttcctaaacggagagctggaggaggagatctatatggatcaaccagacgggtatgtactagaaggtcaggagagaatggtgtgtaaactgttgaaatccttgtatggccttaagcaagcacctaagcaatggcatgagaagtttgacaccacacttacatctgttggctttgttgtgaacgaagttgacaaatgtgtgtactatcgctatggtgggggagaaggagtgatcttgtgcttatatgtcgatgacatattgatctttgggactagcctcaatgtgattgaggaggtcaagtattttctgtccaagagttttgaaatgaatgatttgggagaggttgatgttatttttaacattaagctactaagaggagatgagggtgggattacacttgtgcaatcccaccaagtggacaagattttgagtcgctttggatatagtgtctacaagccagctcctactccttatgatcccagcgtgctattaaggaaaaaccgaagaatagcaagggatcaactgagatactctcaaatcattggttcattgatgtacttggctagtgcaacgaggcctgacatctcatttgttgtaagcaagctgagccggtttgtctcgaatccgggagatgatcattggcatgctctggaaagagtaatgtgctatcaaaagggcactatgggctatggaattcactataccgggtactcaaaagtactagaagggtatagtgactcaaacttgatatctgatgctgatgagataaaagccacaagtggatatgtgttcacacttggaggtggcgctgtttcctag

SEQ ID NO: 39633 - DNA, 391 bp, Oryza sativa
  unsure (1)..(391): unsure at all n locations
  Clone ID: PAT_MRT4530_43153C.1
gnatgcaaaggagttgaaagcgttctacgatgaagtgatggtgccggcgccaacacctgcaggctaggggaaagtagcgacctgcgtgctgatcatcatgcacacgtcgacagcggtgggcatattgaaaatgatgcactggggcgcagactgctccacaagctactgacatgcggagtgaacgacgccggctacaccgttcttaggccattcctgcggcacgatgtcgtccacgagagaggggaaaggcgtcctacatctgagtgcgtcggtattgacggatgaaggctgctggtgggcaataaggtgaatgtgccaagaggcaggagggacgatgttaaggctaaacgagaaggctgtcatgcatacaagccgataagtttgccgtgtt

SEQ ID NO: 39634 - DNA, 6777 bp, Oryza sativa
  Clone ID: PAT_MRT4530_43154C.1
atgtctggagttgctgccgccgctaccggcggaggtggtgcgccgccgccgacaggagctggtgcgccgccgccgacaggagctggatccggagctggtgcgccaggaggaggtgccgtgaacgactacaacaacggaggcaattctgcctcaccatccagcggagggccattctcggggtataatcttctcctcctgctactgctgttagcgctattcctgttcccattgttagcgctatactgtgtgcgctatgttcttgttcctgttctacatgatgcctctagcatgttatcgcgttactggtatgttcctgtttctgacattcatgatgcgcatagtatgctactggttatgttaagatcaccctacactgcttatgccatgatcattgtttcaatttcttggattaaaatatgccgaataatgactatatttccaacaatccaaaaacctgataggtcattttcggtagttggctttgctgctgcactgaaaccacatgcttttgatggttcaaactataagagatggaaagcacgtgcactattgtggttgacagcgatgcagtgcttctatgtttcacggggcaaacgaagtgaaccacctctttctcctgaggaagaggctaagttcgaggcttcggattgcctgttccgtggagcattgatcagtgtactcgctgacaacatagtggacgtgtacatgcacatgccttctgggaaggacatgtgggatgcacttgaggccaagttcggagtttctgacgccggcagtgagctgtatgtcatggagcagttctatgactacaagatggtcgatgaccgttctgtagtagaacaagctcatgagattcagatgctggctaaggaacttgagaacaacaactgtgagttgccggacaagtttgtggcgggtggcattattgccaaactaccaccttcttggtcggactttgccacttctctaaagcacaagagacaagagttcagtgttcctgatctcattggctctttgggtgttgaggagaaggcgagggcaaaggacgtccggggcaaaaaggttgagggaggttctagtgccaatatggtacagaagaagaaccctcatgcatcccacaacaacaagaaagtcaagcctgatgtcaaacccaaggttgcaaccaattttaagaagaaaggcaagggaaaggcaaagggagactgctttgtgtgtggcaagtctgggcattgggccaaggactgtcctgagcgcaaagacaggaagtctgccaacatgatcattagcgagggcggaggaacatcggggtacggtaaaatattacctacagttctctctatttttcattcacctgattggtgggtggatactggtgctaatattcatgtcgggagaggttcctccttgttgatgggaaacgggtcacttgcggctgttcatggtgttggtacggtcgatctgaagtttacttcgggaaagaccgtgcagctgaagaacgtgcagcatgtcccttcaataaagaagaatctagttagcggctctctattgtgtagagaaggttttagacttgtgtttgagtccaataaatgtgtcgtatctaaatatgggacttttgttggtaaaggttatgacagcggaggcttgttccgtttttctttgaatgacatgtgtaataatcataatgctgtgaaccatattagcaagaatgatgagtctaatgtgtggcattcgcgactctgtcatgtgaatttcggttgtatgacgcgcttagctaacatgagtttaattccaaaattcactttggtcaaaggttccaagtgccatacttgtgttcaatcgaaacaacctcgcaagcctcacaaggcatctgaggcgaggaatttggcacctctagaacttgttcattccgatttgtgcgaaatgaacggcgtgttgactaaagggggaaagaaatatttcatgacactgatagatgattgcactagattttgctatgtgtatctattgaaaacaaaggatgaggcattgcattactttaaaatctataaagctgaggtagaaaaccaacttgaaaggaaaatcaaacggttgaggtctgatagaggtggggagtatttttctaatgagtttgcatccttttgcgaagagtttggaattattcatgagatgacgcctccctattcaccccaatcaaatggggtggccgaaagaaagaaccgtactctaactgagatggtgaatgccatgttagacactgcggggctttccaaggaatggtggggtgaggcagttttgactgcatgtcatgtcttgaataaaattccaatgaagcataaggaagtaacaccattcgaggaatgggaaaggaagaaattaaatctctcatacctacgaacatggtgctgtatggccaagtccagagatgctacattctttgagaatgaatttcctatgaaatatacacctagcacttctagtaaagaaactgtcatgccccatgagcactttgcaccgatagaacacaatgatcaaacgcctgaggaaaatcctgaggaggacaacattgtagatactcgcaagagtaagagacaaagggttgcaaaatcctttggagatgactacattgtatacctcgtggatgacaccccaagaaccatagaagaggcatattcatctcctgacgctgactactggaaggaagcagtacgcagtgaaatggactcgattatgtctaatggtacttgggaagtcgttgagcgtccatatgggtgcaagcccgtaggatgcaaatgggttttcaagaaaaagcttaggcctgatggtacaatcgaaaagtacaaggcaaggcttgtggccaagggttatacccaaaaggaaagcgaggatttcttcgacacatattcaccagttgctcgcttgactacgattcgacaagcacctaagcaatggcatgagaagtttgacaccacgcttacatctgcaggctttgttgtgaacgaagctgacaaatgtgtatactatcgctatggtgggggagaaggggtgatcttgtgcttgtatgtcgatgacatactgatctttgggaccagccttaatgtgattgaggaggtcaaagactatctgtccaagagttttgaaatgaaggatttgggagaggctgatgttattcttaacatcaaactacaaagaggagatgagggtgggattacacttgtgcaatcccactatgtggacaaggttttgagtcgctttggatatagtgactgcaagccagctcctactccttatgatcccagtatgctattaaggaaaaaccgaagaatagcaagggatcaactaagatactctcaaatcattggttcattgatgtacttggctagcgcaacgaggcctgacatctcatttgctgtaagcaagctgagccggtttgtctcaaatccgggagatgatcattggcaggctctggaaagagtaatgcgctatctaaagggcactatgagctatggaattcactataccgggtatccaaaagtactagaagggtatagtgactcaaactggatatctgatgctgatgagataaaagccacaagtggatatgtgttcacacttggagtggaagcagaacttacagcactagatactgcgacagttgaggccgagtggcttcgtgaactcctgatggatttgccggtggttgaaaaaccagtgccagctatcctgatgaactgtgataatcaaacagtgattattaaagtgaacagttcgaaggacaacatgaagtcatctaggcatgtaaagagaagactgaaatctgtcagaaagcagaaaaactccggagtgatagcattggactatgtccagacggctaaaaagctggcagatcagtttactaaggggctaccacgcaaacgaagtgaaccgcctctctctcatgaggaggaggctaagttcgaggcttcggattgcctgttccgtggagcattgttcagtgtactcgctgacaatatagtggatgtgtatatgcacatgccttcagggaaggacatgtgggatgcacttgaggccaagttcggagtttccgacgccggcagtgagctgtatgtcatggagcagttctatgactacaagatggtcgatgaccgttctgtagtagaacaagctcatgagattcagatgctggctaaggaacttgagaacaacaactgtgagttgccggacaagtttgtggcgggtggcattattgccaaattgccaccttcttggtcggactttgccacttctctaaagcacaagagacaagagttcagtgtttctgatctcattggctctttgggtgttgaggagaaggcgagggcaaaggacaatcggggcaaaaagtttgagggaggttctagtgccaatatggtacagaagaagaaccctcatgcatcccacaacaacaagaaagtcaagcctgatgtcaaatccaaggctacaaccaattttaagaagaaaggcaagggaaaggcaaagagagactactttgtgtgtggcaagtctgggcatagggccaaggaatgtcctgagcgcaaagacaggaagtctgccaacatggtcgggagaggttcctccttgttgatgggaaacgggtcgcttgcggctgttcatggtgttggttctaagtgccatacttgtgttcaatcgaaacaacctcgcaagcctcacaaggcatctgaggcgaggaatttggcacctctagaacttgttcattccgatttgtgcgaaatgaacggcgtgttgactaaagggggaaagaaatatttcatgacactgatagatgattgcactagatttctttatgtgtatctattgaaaacaaaggatgaagctttgcattactttaagacctataaagctgaggtagaaaaccaacttgaaaggaaaatcaaacggttgaggtctgatagaggtggggagtatttttccaatgaatttgcatccttttgcaaagagtttggaattattcatgagaggacgcctccctattcaccccaatcaaatggggtggccgaaagaaagaaccgcactctaactgagatggtgaatgccatgttagacactgcagggctttctaaggaatggtggggtgaggcagttttgactgcgtgtcatatcctgaataaaattccaacgaagcataaggaagtgacaccattcgaggaatcggaaaggaagaaattaaatctctcgtacctacgaacatggggctgtttggccaagtctagagatgctacattctttgagaatgaatttcccatgaaacatacacctagcacttctagtcaagaaactgtcatgccccatgagcactttgcaccgatagaacacaatgatcaaatgcctgagggaaatcctgaggagcacaacattgtagatactcataagagtaagcaacaaagggttgcaaaatcctttggagatgactacattgtataccttgtggatgacaccccaagaaccatagaagaggcatattcatctcctgacgctgactactggaaggaagcagtacgcagtgagatggactcgattatgtctaatggtacttgggaagtcattgagtgtccatatgggtgcaagcttgtaggatgcaaatgggttttcaagaaaaagcttaggcctgatggtacaattgaaaagtacaaggcaaggcttgtggtcaagggttatacccaaaaggaagacgaggattttttcgacacatactcaccagttgctcgcttaaccacgattcgagtactacttgctctggcagcctctcatggttttctcgtccatcagatggacgttaagacagctttcctaaacggagagctcctcaatgtgattgaggaggtcaaggactttctgtccaagagttttgaaatgaaggatttgggagaggctgatgttattcttaacattaagctactaagaggagatgaggttgggattacacttgtgcaatcccactatgtggacaaagttttgagtcgctttggatatagtgactgcaagccagctcctactccttatgatcccagcgtgctattaaggaaaaacccaagaatagcaagggatcaactaagatactctcaaatcattggttcattgatgtacttggctagtgcaacgaggcctgacatctcatttgctgtaagcaagctgagcggatttgtctcaaattcgggagatgatcattggcaggctctggaaagagtaatgcgctatctaaagggcactatgagctatggaattcactataccgggtatccaaaagtactcgaaggatatagtgactcaaactggatatctgatgctaatgagataaaagccacaagtagatatgtgttcacacttggaggtggcgctgtttcttggaagtcttgcaagcagaccatcttaacgaggtcaacaatggaagcagaacttacagcactagatactgcgacagttgaggccgagtggcttcttgaactcctgatggatttgccggtggttggaaaaccagtgccagctatcctaatgaactgtgacaatcaaacaatgattattaaagtgaacagttcaaaggacaacatgaagtcatctaggcatatcaagagaagactgaaatctgtcagaaagcagaaaaactccggagtgatagcattggactatgtccaaacggctagaaatctggcagatcagtttaccaaggggctaccacgtaatgtgatagacagtgcatcgatggaaatgggcttgatacccacc

SEQ ID NO: 39635 - DNA, 540 bp, Oryza sativa
  Clone ID: PAT_MRT4530_43155C.1
cccaatcaagcaccaccggtgcctcgccgccataggtattgttgaactcgaacggtgaagtcaggtagcccaatcaacacagcagcttcgacttcactgcgatgctacctcaaagctaaaatgaacaaacaaaattgacactgacgaagcacatcagcccaaactaccaaggagccacttcctacacatagctagcatcaacaaccctataaggagattgcagtgtatcatcgttgctgagcttcatcgcacccgtacagtgaagcagctccgactctacccaacagtaaccaaataaggatgatgaacacccgcaagctttggaagtgttgcaggagtccaccaatggctaggttgcacacggaaggttcttgctgctagaaggatcgacgccaaaacgacgcctccaagaaagggaatgacgcctaaaggcatagtcgccgtcatgccggcccatggcctggcaaggttttcaccagcgattcccaatcaaagcccatacaaccgttgtgctcaacgaccgtcgctggaccaccacgc

SEQ ID NO: 39636 - DNA, 4325 bp, Oryza sativa
  Clone ID: PAT_MRT4530_43156C.1
gtcactatccttttgcagccactaacccacgttcccacgattccctccgcaacagcgcgtccacgttctttctcctgatagataaggaggccgcgagtccgatccgagttcctcgcttctttcccggtgttagtttctccttctccgcgtctgagttgctctcgcttccctgcttctgatctcttgcgcgcacgagagattggaagaagcagtgcctccgaaaccacaccttcgcctgagatctgcaccgggtaggcgggtgagcgggtgatcaggtttttggggagtgcctcctgcacgactgctcatcgccatgtctggagttgctgccgccgctattggcggaggtggagctgcgccgccgccgacgccgacaggagctggatccggagctggtgcgccaggaggaggtgccgtgaacgactacaacaacggaggcaattctgcctcaccatccagcggagggccattctcggggtataatcttctccttctactgctgttagcgctactcctgttcccattgttagcgctatactgtgtgcgctatgttcttgttcctgttctacatgatgcctctagcatgttatcgcattactggtatgttcctgtttctgacattcatgatgcgcatagtatgctactggttatgttaagatcaccctacactgcttatgccatgatcatagtttcaatttcttggattaaaatatgccgaataatgactatatttccaacaatccaaaaacctgataggtcattttcggtagttggctttgctgctgcactgaaaccacatgcttttgatggttcaaactataagagatggaaagcacgtgcactattgtggttgacagcgatgcagtgcttctatgtttcacggggtaaacgaagtgaaccacctctttctcctgaggaagaggctaagttcgaggcttcggattgcctgttccgtggagcattgatcagtgtactcgctgacaacatagtggacgtgtacatgcacatgccttctgggaaggacatgtgggatgcacttgaggccaagttcggagtttttgacgccggcagtgagctgtatgtcatggagcagttctatgactacaagatggtcgatgaccgttctgtagtagaacaagctcatgagattcagatgctggctaaggaacttgagaacaacaactgtgagttgctggacaagtttgtggcgggtggcattattgccaaactaccaccttcttggtcggactttgccacttctctaaagcacaagagacaagagttcagtgttcctgatctcattggctctttgggtgttgaggagaaggcgagggcaaaggacgtccggggcaaaaaggttgagggaggttctagtgccaatatggtcgggagaggttcctccttgttgatgggaaacgggtcgcttgcggctgttcatggtgttggtacggtcgatctgaagtttacttcgggaaagaccgtgcagctgaagaacgtgcagcatgtcccttcaataaagaagaatctagttagcggctctctattgtgtagagaaggttttagacttgtgtttgagtccaataaatgtgttgtatctaaatatgggacttttgttggaaaaggttatgacagcggaggcttgttccgcttttctttgaatgacatgtgtaataatcataatgctgtgaaccatattagcgagaatgatgagtctaatgtgtggcattcgcgactctgtcatgtgaatttcggttgtatgatgcgcttagctaacatgagtttaattccaaaattcactttggtcaaaggttccaagtgccatacttgtgttcaatcgaaacaacctcgcaagcctcacaaggcatctgaggcgaggaatttggcacctctagaacttgttcattccgatttgtgcgaaatgaacggcgtgttgactaaagggggaaagaaatatttcatgacactgatagatgattgcactagattttgctatgtgtatctattgaaaacaaaggatgaggcattgcattactttaaaatctataaagctgaggtagaaaaccaacttgaaaggaaaatcaaacggttgaggtctgatagaggtggggagtatttttccaatgagtttgcatccttttgcgaagagtttggaattattcatgagatgacgcctccctattcaccctaatcaggtggccgaaagaaagaaccgtactctaactgagatggtgaatgccatgttagacactgcggggctttccaaggaatggtggggtgaggcagttctgactgcgtgtcatgtcctgaataaaattccaatgaagcacaaggaagtaacaccattcgaggaatgggaaaggaagaaattaaatctctcatacctacgaacatggggctgtttggccaaggtaaatgtacctatagtcaaaaagcggaaacttggaccaaaaactgttgattgtgtgtttcttggttatgctatccacagtgtgggttatagattcttaatagtaaactctggagtacccgacatgcatgctggtacaatttttgagtccagagatgctactttctttgagaatgaatttcctatgaaatatacacctagcacttctagtaaagaaactgtcatgccccatgagcactttgcaccgatagaacacaatgatcaaacgcctgaggaaaatcctgaggaggacaacattgtagatactcgcaagagtaagagacaaagggttgcaaaatcctttggagatgactacattgtatacctcgtggatgacaccccaagaaccatagaagaggcatattcatctcctgacgctgactactggaaggaagcagtacgcagtgaaatggactcgattatgtctaatggtacttgggaagtcgttgagcgtccatatggatgtaagcccgtaggatgcaaatgggttttcaagaaaaagcttacgcctgatggtacaatcgaaaagtataaggcaaggcttgtggccaagggttatacccaaaaggaaggcgaggatttcttcgacacatattcaccagttgctcgcttgactacgattcgagtactacttgctctggcagcctctcatggtcttctcgtccatcagatggacgttaagacagctttcctaaacggagagctggaggaggagatctatatggatcaaccagacgggtatgtactagaaggtcaggagggaatggtgtgtaaactattgaaatccttgtatggcctcaagcaagcacctaagcaatggcatgagaagtttgacaccacgcgtacatctgcaggctttgtagtgaacgaagctgacaaatgtgtatactatcgctatggtgggggagaaggggtgatcttatgcttgtatgtcgatgacatactgatctttgggaccagccttaatgtgattgaggaggtcaaagactatctgtccaagagttttgaaatgaaggatttgggagaggctgatgttattcttaacatcaaactacaaagaggagatgagggtgggattacacttgtgcaatcccactatgtggacaaggttttgagtcgctttggatatagtgactgtaagccagctcctactccttatgatcccagcgtgctattaaggaaaaaccgaagaatagcaagggatcaactgagatactctcaaatcattggttcattgatgtacttggctagcgcaacgaggcctaacatctcatttgctgtaagcaagctgagccggtttgtctcaaatccgggagatgatcattggcaggctctggaaagagtaatgcgctatctaaagggcactatgagctatggaattcactataccgggtatccaaaagtactagaagggtatagtgactcaaactggatatctgatgctgatgagataaaagccacaagtggatatgcgttcacacttggaggtggcgctgtttcctggaagtcttgcaagcagaccatcttaacgaggtcaacaatggaagcagaacttacagcactagatactgcgacagttgaggctgagtggcttcgtgaactcctgatggatttgccggtggttgaaaaaccagtgccagctatcctaatgaactgcgataatcaaacagtgattattaaagtgaacagttcaaaggacaacatgaagtcatctagacacatcaagagaagactgaaatctgtcagaaagcagaaaaactccggagtgatagcattggactatgtccaaacggctagaaatctggcagatcagtttaccaaggggctaccacgtaatgtgatagacagtgcatcgagggaaatgggcttgatacccacc

SEQ ID NO: 39637 - DNA, 330 bp, Oryza sativa
  Clone ID: PAT_MRT4530_43157C.1
ggtccaatgacctggttccagcacaatgacatttgtgcactggatgcttgacacagtggtgtgtggggcattggcatgtgccaatggtgcaagcacagatgatgcaatgtgacagcaatgcaagtggtgttgaggtgacagcagttttggaggtgaggtgtgacaaaatgaaatgaaattggatgcattcacacagaacagtgggactaagttgaagacttgaagttgataggtcgagtgtgtgggagtggtgcacaaatggatgaaagggtgggcattggcatgatgttgcatggtggcatgttaaatcaaaaaaaaaaaaaaaaaaaa

SEQ ID NO: 39638 - DNA, 8472 bp, Oryza sativa
  Clone ID: PAT_MRT4530_43158C.1
atgtatcggcccgtcacaggtgaggggatacctgtgacggtccgcggccggatggctcaccggtatcccgtcagaggtgtgaggatctggcggagttattggaggctccctgttgaccagttgaggtggggctcggaatgccacaagcgcgtgcgcgcgcgccgggccgggccggggcgcggctggctggctgcgtcacgtcgctatccttttgcagccactaacccacgttcccacgattccctccacaacaacgcgtccacgttcactaatccacgttcccacgattccctccgcaacagcgcgtccacgttctttctcttgatagataaggaggccgcgagtccgatccggtttcaccacttctttcccggtgttagtttctccttctccgcgcctgagttgctctcgcttcctcgcttctgatctcttgcgcgcacgagagattggaaggagcagtgcctccgaaaccacaccttcgcctgagatctgcaccgggtaggcgggtgatcaggttcttggggagtgcctcccgcacgactgctcatcgccatgtctggagttgccgccgccgctgctggaggagatggcggaggtggtgcgccgccgacaggagccggagctggtgcgccaggaggtgccgtgaacgacaacaacaacggaggcaattctgcctcaccatccagcggagagccattctcggggacattttcggtagttggctttgctgctgcactgaaaccacatgcttttgatggttcaaactataagagatggaaagcacgtgcactattgtggttgacagcgatgcagtgcttctatgtttcacggggcaaacgaagtgaaccacctctttctcctgaggaagaggctaagttcgaggcttcggattgcctgttccgtggagcattgatcagtgtactcgctgacaacatagtggacgtgtacatgcacatgccttctgggaaggacatgtgggatgcacttgaggccaagttcggagtttctgacgccggcagtgagttgtatgtcatggagcagttctatgactataaaatggtcgatgaccgttctgtagtagaacaagctcatgagattcagatgctggctaaggaacttgagaacaacaactgtgaattgccggacaagtttgtggcgggtggcattattgccaaactaccaccttcttggtcggactttgccacttctctaaagcacaagagacaagagttcagtgtttctgatctcattggctctttgggtgttgaggagaaggcgagggcaaaagacgtccggggcaaaaaggttgagggaggttctagtgccaatatggtacagaagaagaaccctcatgcatcccacaacaacaagaaagtcaagcttgatgtcaaacccaaggctgcaaccaattttaagaagaaaggcaagggaaaggcaaagggagactgctttgtgtgtggcaagtctgagcattgggccaaggactgtccagagcgcaaagacaggaagtctgccaacatggtcattagcgagggcggaggaacatcggggtatggtaaaatattacctacagttctctctgtttttcattcacctgattggtgggtggacactggtgctaatattcatgtcgggagaggttcctccttgttgatgggaaatgggtcgcttgcggctgttcatggtgttggtacggtcgatctgaagtttacttcgggaaagaccgtgcagctgaagaacgtgcagcatgtcccttcaataaagaagaatctagttagcggctctctattgtgtagagaaggttttagacttgtgtttgagtccaataaatgtgtcgtatctaaatatgggacttttgttggaaaaggttatgacagcggaggcttgttccgcttttctttgaatgacatgtgtaataatcataatgctgtgaaccatattagcgagaatgatgagtctaatgtgtggcattcacgactctgtcatatgaatttcggttgtatgacgcgcttagctaacatgagtttaattccaaaattcactttggtcaaaggttccaagtgccatacttgcgttcaatcgaaacaacctcgcaagcctcacaaggcatctgaggcgaggaatttggcacctctagaacttgttcattccgatttgtgcgaaatgaacggcgtgttgactaaagggggaaagaaatatttcatgacactgatagatgattgcactagattttgctatgtgtatctattgaaaacaaaggatgaggcattgcattactttaaaatctataaagctgaggtagaaaaccaacttgaaaggaaaatcaaacggttgaggtctgatagaggtggggagtatttttccaatgagtttgcatccttttgcaaagagtttggaattattcatgagaggacgcctccctattcaccccaatcaaatggggtggccgaaagaaagaaccgtactctaactgagatggtgaatgccatgttagacactgcggggctttccaaggaatggtggggtgaggcagttttgactgcgtgtcatgtcctgaataaaattccaatgaagtataaggaagtaacaccattcgaggaatgggaaaggaagaaattaaatctctcatacctacgaacatggggctgtttggccaaggtaaatatacctatagccaaaaagcggaaacttggaccaaatactgttgattgtgtgtcccttggttatgctatccacagtgtgggttatagattcttaatagtaaactctggagtacccgacatgcatgttggtacaattcttgagtccagagatgctacattctttgagaatgaatttcctatgaaacatacacctagcacttctagtaaagaaactgtcatgccccatgagcactttgcaccgatagaacacaatgatcaaacgcctgaggaaaatcctgaggaggacaacattgtagatactcgcaagagtaagagacaaagggttgcaaaatcctttggagatgactacattgtatacctcgtggatgacactccaagaaccatagaagaggcatattcatctcctgacgctgactactggaaggaagcagtacgcagtgaaatggactcgattatgtctaatggtacttgggaagtcgttgagcgtccatatgggtgcaagcccgtaggatgcaaatgggttttcaagaaaaagcttaggcctgatggtacaatcgaaaagtacaaggcaaggcttgtggccaagggttatacccaaaaggaaggcgaggacttcttcgacacatactcaccaattgctcgcttgaccacgattcgagtactacttgctctggcagcctctcatggtcttctcgtccatcagatggacgttaagacagctttcttaaacggagagctggaggaggagatctatatggatcaaccagacgggtatgtactagaatgtcaggagggaatggtgtgtaaactgttgaaatccttgtatggcctcaagcaagcacctaagcaatggcatgagaagtttgacaccacgcttacatctgcaggctttgttgtgaacgaagctgacaaatgtgtatactatcgctatggtgggggagaaggggtgatcttgtgcttatatgtcgatgacatattgatctttgggaccagccttaatgtgattgaggaggtcaaagactatctgtccaagagttttgaaatgaaggatttgggagaggctgatgttattcttaacatcaaactacaaagaggagatgagggtgggattacacttgtgcaatcccactatgtggacaaggttttgagtcgctttggatatagtgactgcaagccagctcctactccttatgatcccagcgtgctattaaggaaaacccgaagaatagcaagggatcaactgagatactctcaaatcattggttcattgatgtacttggctagcacaacgaggcctgacatctcatttgttgtaagcaagctgagccggtttgtctcaaatctgggagatgatcattggcaggctctagaaagagtaatgcgctatctaaagggcactatgagctatggaattcattataccgggtatccaaaagtactagaagggtatagtgactcaaactggatatctgatgctgatgagataaaagccacaagtggatatgtgttcacacttggaggtggcgctgtttcagcactagatactgcgacagttgaggccgagtggcttcgtgaactcctgatggatttgccggtggttgaaaaaccagtgccagctatcctaatgaaggcagtccagtaccagtcaaggttctgagtgaaacctaaatagggagttattggaggctccctgttgactggttgaggtgggggtcggaatgctacacgcgcgcgcgtgcgcgccgggctgaggccgagggcgtgggcgtgggcgaaggcgaggcgaggcgtggctggctggcggcggcgtgcgtgcgtcacgtcggttcccacgactgcctctctctcctgatagataaggaggccgcgagtccgatctattctgatcgcttgcttctttcccggtgttagttcctcctcctccgcgcctgtactgttctcgcttcctcgcttctgatctcttgcacgcacgagagattggaagtagcagtgcctccgaaaccacaccttcgcctgagatctacaccgggtaagcgggtgatcaggtttttggggagtacctcccgcacgactgctcgccatgtctggagttgccgccaccgctgctggaggagatggcggaggtggtgcgccgccgccgggagctggagccggaggtggtgcgccaggaggtgccgcgaacgacaacatcaacggaggcaattctgcctcacaatccagcggagggccattctcgggtgtactcgctgacaacatagtagacgtgtacatgcacatgccttctgggaaggacatgtgggatacacttgaggccaagttcggagtttctgacgccggcagtgagctgtatgtcatggagcagttctatgactacaagatggtcgatgaccgttctgtagtagaacaagctcatgagattcagatgctggctaaggaacttgagaacaacaactgtgcgttgccggacaagtttgtggcgggtggcattattgccaaactaccaccttcttggtcgaactttgccacttctctaaagcacaagagacaagagttcagtgtttctgatctcattggctctttgggtgttgaggagaaggcgagggcaaaggacgtccggggcaaaaaggttgagggaggttctagtgccaatatggtacagaataagaaccctcatgcatcccacaacaacaagaaagtcaagcctgatgtcaaacccaaggctgcaaccaactttaagaagaaaggcaagggaaaggcaaagggagactgctttgtgtgtggcaagtctgggcattgggccaaggactgtcctgagcgcaaagacaggaagtctgccaacatagtcattagcgagggcggaggaacatcggggtacggtaaaatattacctacagttctctctgtttttcactcacctgattggtcgcttgcgtcttttcatggtgttggtacggtcgatctgaagtttacttcgggaaagaccgtgcagctgaagaacgtgcagcatgtcccttcaataaagaagaatctagttagcggctctctattgtatagagaaggttttagacttgtgtttgagtccaataaatgtgtcgtatctaaatatgggacttttgttggaaaaggttatgacagcggaggcttgttccgcttttctttgaatgacatgtgtaataatcataatgctgtgaaccatattagcgagaatgatgagtctaatgtgtggcattcgcgactctgtcatgtgaatttcggttgtatgacgcgcttagctaacatgagtttaattccaaaattcactttggtcaaaggttccaagtgctatacttgcgttcaatcgaaacaacctcgcaagcctcacaaggcatctgaggcgaggaatttggcacctctagaacttgttcattccgatttgtgcgaaatgaacggcgtgttgactaaagggggaaagaaatatttcatgacactgatagatgattgcactagattttgctatgtgtatctattgaaaacaaaggatgaggcattgcattactttaaaatctataaagctgaggtagaaaaccaacttgaaaggaaaatcaaacggttgaggtctgatagaggtgggcagtatttttccaatgagtttgcatccttttgcgaagagtttggaattattcatgagaggacgcctccctattcaccccaatcaaatggggtggccgaaagaaagaaccgtactctaactgagatgatgaatgccatgttagacactgcggggctttccaaggaatggtggggtgaggcagttttgactgcgtgtcatgtcctgaataaaattccaatgaagcataaggaagtagcaccattcgaggaatgggaaaggaagaaattaaatctctcatacctacgaacatggggctgtttggccaaggtaaatgtacctataaccaaaaagcggaaacttggaccaaatactgttgattgtgtgttccttggttatgctattcacagtgtgggttatagattcttaatagtaaactctggagtacccgacatgcatgttggtacaattcttgagtccagagatgctacattctttgagaatgaatttcccatgaaacatacacctagcacttctagtaaagaaactgtcatgccccatgagcactttgcaccgacagaacacaatgatcaaacgcctgaggaaaatcctgaggaggacaacattatagatactcgcaagagtaagagacaaagggttgcaaaatcctttggagatgactacattgtatacctcgtggatgacaccccaagaaccatagaagaagcatattcatctcctgacgctgactactggaaggaagcagtatgcagtgaaatggactcgattatgtctaatggtacttgggaagtcgttgagcgtccatatgggtgcaagcccgtaggatgcaaatgggttttcaagaaaaagcttaggcctgatggtacaatcgaaaagtacaaggcaaggcttgtggccaagggttatacccaaaaggaaggcgaggacttcttcgacacatactcaccagttgctcgcttgaccacgattcgagtactacttgctctggcagcctctcatggtcttctcatccatcagatggacgttaagacagctttcctaaacggagagctggaggaggagatctatatggatcaaccagacgggtatgtactagaaggtcaggagggaatggcgtgtaaactgttgaaatccttgtatggcctcaagcaagcacctaagcaatggcatgagaagtttgacaccatgcttacatttgcaggctttgttgtgaacgaagctgacaaatgtgtatactatcgctatggtgggggagaaggggtgatcttgtgcttatatgtcgatgacatattgatctttgggaccagccttaatgtgattgaggaggtcaaggactatctgtccaagagttttgaaatgaaggatttgggagaggctgatgttatttttaacatcaaactacaaagaggagatgagggtgggattacacttgtgcaatcccactatgtggacaaggttttgagtcgctttggatatagtgactgcaagccagctcctactccttatgatcctagcgtgctattaaggaaaaaccgaagaatagcaagggatcaactgagatactctcaaatcattggttcattgatgtacttggctagcgcaacgaggcttgacatctcatttgctgcaagcaagctgagccggtttgtctcaaatccgggagatgatcattggcaggctctggaaagagtaatgcgctatctaaagggcactatgagctatggaattcactataccgggtatccaaaagtactagaagggtatagtgactcaaactggatatctaatgctgatgagataaaagccacaagtggatatgtgttcacacttggaggtggcgctgtttcctggaattcttgcaagcagaccatcttaacgaggtcaacaatggaagcagaacttacagcactagatactgcgacagttgaggccgagtggcttcgtgaactcctgatggatttgccagtggttgaaaaaccagtgccagctatcctaatgaactgtaataatcaaacagtgattattaaaatgaacagttcaaaggacaacatgaagtcatctaggcacatcaagagaagactgaaatccgtcagaaagcagaaaaactccggagtgatagcattggactatgtccaaactgctagaaatctggcagatcagtttaccaaggggctaccacgtaatgtgatagaaagtgcatag

SEQ ID NO: 39639 - DNA, 594 bp, Oryza sativa
  Clone ID: PAT_MRT4530_43159C.1
atggaggagcacggcaaggtccaccgcttcttggtgtgctgttgctccggcaccggcaacagggcacactatcgcatcgcacgctcgcagctgtcgcttggtttgaagcgcaccaaggcctttttttgcggcatcaccacttcaccaggatcagtaggcccacttctgctgctatcccatgagcccgccaatgggacgacgacgacgacgacgacgaccaacgacgatcaccaacaagatggcatgatgccgtcgtcgtcgaagcctcggaataacaccacgacggatgcggatgcggatgcggctgatgatgccgagagagcgtacatcggcaagatttccgccccgctaatagcgatcgtgataggcttcggagttatgttcttgttcttggccaagtcggaaacagtgcgtcgagacaagaccatcttgttcgggtattccgcggcggctttcgtgatctcgatttttggggtctgccatattctagattatggtcgtctctggttccgcaggagaaacgccgccaacaacaacactagggttcatccgtcggtgtcgtcccagttgccaccgcagatggatatgtgctag

SEQ ID NO: 39640 - DNA, 342 bp, Oryza sativa
  Clone ID: PAT_MRT4530_4315C.1
tcatgatacgcaggcttcagcgaacatcatcctgtcgcatttccttggcctggcgagctccctggagttgctgcgctccgtggccatccctccagcagaagctgcaggctgcaggctacggcacgggtggaccatggaatgggctgggccctgctcccgcccgtgcgactgtgtcctccccagcgcagcacgagcggcggttgcgctctcgcccggcccggtgtcggtgcggtgggaggccgttaaagccatcgccagcctgtccctgcctcccagatccacgtcccctttcgccctgcgctgcgggtagtgctgagctgtgcccataaactgccgcgccat

SEQ ID NO: 39641 - DNA, 168 bp, Oryza sativa
  Clone ID: PAT_MRT4530_43160C.1
atggcggatggcgcgggaggaggtgttctgattagggccgcgtcaattgatttgagatctccggtgatcgatctggtcaatctatctgcaggattggattgttcgcttgatcgcttcatcactagttgtgtaaaaaattttgttcctaaattaccctttgaagattaa

SEQ ID NO: 39642 - DNA, 769 bp, Oryza sativa
  Clone ID: PAT_MRT4530_43161C.1
tcaaggcgacattgctgaagagagcgtcgaccaggagacaggaacacgcgagagcaccggtgggttaggctgcccggtgaagcagatgaagaggacttgaggcgggaggacgaggccgcaggcgatggggaggtacatcatccgcacgggatccaccggcttgggcagcatccggttgacgtcgccgaggatcaccgggcacaggcacctcaacgtccggtcaccctccgccgccgccgccgtgctgttcaggaacatccccagcccgccgcagcactcgctcgccggcgtcggggtctccgcctccgcccccgtcaggaacgacgcgcacgtcgtcagccccgccagcgacgtcacgcagtccgtcggcgacgaaccgccgccgccgctgcccggcatgcccgggatcaaggtgcccggcggcgtcgtctgcgacgacctcccgcacggcggcggcagcgagccgccggcgggtggagacagtggcagggcggggactgacgacgacgacggcggcggtgatggcttcggcggcgccgcgcgcggcgacggcctggctccggggaaccccgggaagcgctggcggcttcccgggaagccggggaagcggaggacgcgggcctccgacgagaccaaggcggcggctgccttcctcctcggtctcatcgcttccgacggcgtcgccatcatcacagaagcaaccacgacgagcaagacgacggcggcgcgcttggatgccggtgacgccatcatcttcttcttcgcttga

SEQ ID NO: 39643 - DNA, 396 bp, Oryza sativa
  unsure (1)..(396): unsure at all n locations
  Clone ID: PAT_MRT4530_43162C.1
ggtgtgggtttttttttttttttttttttttnggataaaaatatatagccggagcttccatatttttcattcacatttgcctcacccaacaacatttagtcgtagcaaatcccactcttacattaagtcaaagagagatcaggtgaaacaaaaacaaaagccgagcccggccggtaaaatcaaaagacgatgaacaaactgggaacacacgaaacaaggggggagacattttcgaatcagagatgaacaattaaacaaggcttttttttacgatgaccgcttaattgccaccaaactcctctcaacccgggggcttttaggccataaaacttattagctgcacctgccttaccttttccaaaccctttattccgcccaatgccttaggggacccct

SEQ ID NO: 39644 - DNA, 2252 bp, Oryza sativa
  Clone ID: PAT_MRT4530_43163C.1
tcggcacgaggcggagcggcagagcacactccggcgaggggggccatggcgatgcggctcttcccgtcctcgtctccgctcccgccgccgccgcctctgctcccgagccccagcgcgaaggcaccgccgtccgcgcccttctcactctccctccgcctccgccgcgcgcgggtggcagcctccgcggccgctgcggcggggggccccgagaggggggcgggcgggtacgagggggatgcggaaggcgagggcagcagcggggcgttcgacaggggaatgtcggagatcgcgaggaaggtgcctctcttcgagccggcgaggggcgacgccgcggcggtcgccggcgagcggccgctgcccatcaacctcgagctctggctctaccgcgcaaaggtgcacacgcggaagtacgagttcgccgacgcggagaagctcctaaaccagtgcatcatgtattggccggaagacgggcgtccatatgtggcgcttgggaagctatacagtaagcagtcgaggtttgacaaggctagagcggcttatgaaaggggttgccaagcggcacaaggtgaaaacccgtatatttggcagtgttgggcagtcctagaacgcaaaggtgggaatattcgaagagcacgggagttatttgatgctgctactgtagctgatgcaaagcatattgcagcttggcatgggtgggctattttagaaatcaagcaaggaaacattaaaaaggctcgaaatctacttgcaaaaggtctaaaatattgtggaggaaatgagtacatttaccagactcttgctctgcttgaggctagagcagagcgctttgaacaagcacgaactttattccaacaagctacccaatgcaatcccaaaagctgtgcaagttggctagcatgggctcaggtagaaattcgtgcagaaaacaatgccatggcaagaaaactctttgagaaagcagtccaggcaagtcctaagaacagattttcatggcatgtctgggcactatttgaagcagaacaaggtagcatcgacaaagcaaggaagttacttaagattggtcatgctgtgaaccctagggaccctgtgattcttcagtctcttgcactactggaatacaactactcatctccaaataccgcccgtgttttatttagaaaggcatctcaaattgatcctaggcaccaaccagtttggatagcttgggggtggatggaatggaaagaaggaaacgccagaacagcaaggacactgtatcaaagagctttgtcagttaattcaactaatgaatgtgctgctcgatgtcttcaggcttggggagtcctagaacagcgggccggtaactacaccgctgccagaagattgctgagatcttcactgaacataaattctcagagtgaggtaacatggatgacatgggctgcactagaggacgaacagggtgatccagttcgagctgaagaaatacggaacatctattttcagcagcgtaccgaggttgtggatgatgcctcctgggtcatgggcttcctcgacatcattgatcctgccttagacagcgtgaagaagctcctaaacatagaccagccttcggggcctgcaacacgagacaatccgaaaagcactggagagccaagcaatacagctaccgtccggacttctgccgatgcagagttttctggcggttcaagagcagaaggatcggacgcttcggaccttgctaacgccgatgacaaggagagcgatgacgctgcagagacaccagagagcgatttcgacgtggatggattcatcaggaggcggctagccctggacccggccgagctggacgcggtgcttgagggttctgatcccaggggagttgtttccaggaggaggacgcagaggttgcccaggaagccccttcctcttctccctgttccgtaaatatttccacttcagttcaacaatgcacatttgccatctacgccgtgcgaagcatcgaccactaacagtaacaggtaccgtgactcgcgagatagttgaacatacatatctgtgtatatctctcagaagaagagcgcggcggctgccattagcagccacatgtttgttactagagttgttattggtccaccctggtgtatgtaattctatcattcttcaggagcagtgtatctgtgtacataagcgcaatctatcaatttgtatgtgctagtgaagaattcaaaaaaaaaagatatcaactcgagactagttctctcccccggccg

SEQ ID NO: 39645 - DNA, 1045 bp, Oryza sativa
  Clone ID: PAT_MRT4530_43164C.1
aatccgaagatgtaaacagttgatcagaagattgacacaatatcacttaaattgaagatgacggcatatatgttatttaacttacataatcttagtttttagcccaatgcttgaagtcaacttgatcatttaataagagttgtgactgcataaaactatttgacaacagcagaccatgcaaacagctttaacatgatctattattcatgaatgtcattattagccaacagcaggttgtataaggtccaaaacaaaagggaaagagatccagagaaattgtttcagtacagagagccaggaggattaacctgtagcattatcacagcaacatggcacggaccactccaagctgatcagaaactattgactgcatcactggaagccggtaagcaaaagggggttgattatagagcttgcctgtagggcttaggtcctcccaaccgtagctgccaccagggctcccttgagctgggatcctatcccatctctcctggattggattgttgcctccctgtgcgacggcgcccctgagcttatggagcgccctttcgaacaccggcagctccgcctccccgagcgcctcgacgttggcggcgtcccaccagaaccgccgcctccccgccgccatggcctccgtgatctttccctcgacgccgctctgccgcgcgtcctccgccgccacctccgccgcggcctcgtccgtcgcccgcttcagcgcgttcagcacctcggggttgtcgccgccgtcgtccgcgaagacgtcgccgccggcgtgggcgtgggaggtggaggtggaaggcccggccacgacgtggcggcggaggacggcgtcgacgctcggcgagccgaaggcgaagacgttgccggccttggagaaggagacgatggcgatggacgcgccggagagcgtggatatctcggacgccttcttgaagaggccccggcggcgcttggagaaggtgacctgccgtttctccttgccgtcgatgcagcacatctcgatcttctgcttccccttgctagtcccccctcgcggccgacccat

SEQ ID NO: 39646 - DNA, 327 bp, Oryza sativa
  Clone ID: PAT_MRT4530_43165C.1
atgacggcgagcggcagatccggacgacgaaggcagatccagctacaggatcctacctcgtgcggtgggggcggtggatgtgacggcgatgacgacggtgggcggcggatctggagcgtggcggagatcgcgacggcggtctcgaccggaggatccggcacagatgatggcggtggtggcggcggcggtctcaggcggcggatccgggcgggacggttctaccggcggctggtgacggcgacggcgacgacaggagcggtggcggcggctgcgacgatctcaggcggcggcggggcgattatttttttttgcatgtggtcggcttaa

SEQ ID NO: 39647 - DNA, 332 bp, Oryza sativa
  Clone ID: PAT_MRT4530_43166C.1
cgcgtccggctcttgtgagcaaaaaagctcaacaaacatcgtccaaccttgctcaacatacatttgctccattcactacttctcttccctgtgaggtacagagtgaaaacttcaatgcccctcaccctctaaaatttcaccattctcaagcactctaaacaatatttgccacttctcttactgtcactactctatcatgcatcatacttcatacagttctaatcaaactcctccactattactaaataacctctcaacttcttattcatacttcaaataactttcctctctttatacaatctcaactatttcatacctttcacattattacc

SEQ ID NO: 39648 - DNA, 235 bp, Oryza sativa
  unsure (1)..(235): unsure at all n locations
  Clone ID: PAT_MRT4530_43167C.1
gttttatctgggggggggggggagtgataaaggtgggggtgttgtnttaaaaatgagaggagggctctgcagctgccacaatttaaagacatgacatggtaaatgttgaagactttactattagctgttgagcttgttaggaagcatcataatttgagtgataacaggtttattatctcatatctttattatccatatacttgatttatttgtgatggttagctataaaattttt

SEQ ID NO: 39649 - DNA, 762 bp, Oryza sativa
  Clone ID: PAT_MRT4530_43168C.1
atggagtccgccccggccagccgcgtacgccgcgaggacgtggcccgcgcggtggcggcgctcctccggtggctccagcaccaccccaccccggcgccggagcccatctacctcctcgtcaccctcaagcgcgcccccgcccgccgcttcgagcacaccctccgcctcccgcgctcgccgttcccgtccatctccctcgtctccgaccgcctcccggcggacctgcccgacgacatcgacccgctcccctcgcccgcgctcgggtcgctcccgcccgccgcgcgccgcggcctggtgctcgtcgaccgccgcctcagggtccgcccgggcggcaagggcaaggcggcggccaaggccgcccgggtcgtgcccgtcgacctcgccgaccaggcgtgggcggagtccgcgagggaggcggcgcggcgcgtggagctgcgggtggagggcggcacgtgccgcgccgtgcgggtgggccacgcggcgatggcgcgggaggaggcggtggagaacgtggtggccgccgtggaggcggctgcggcgtgcgtgccgaggaagtggaggaacgtgcgggcgctgcacgtgaaggcgcccgagtcggtcgcgctgccgctgtactccgcggtcggcaccggcggcggcgacgacggcggcaacggcgaggcggaagacgcgaagaggaagggcgtggcggtgaaggagcaggggattgtgaagaggaggaagaagagtagcagcgtcagtgtgggcggtgatcagttgtaa

SEQ ID NO: 39650 - DNA, 159 bp, Oryza sativa
  Clone ID: PAT_MRT4530_43169C.1
ttgttatgttcggacccttggacccaacctatggtacggttataatgacgccgggatcggtgacaccattgtagaccccctcaaggacacattaggcccgttgcttaacattcttattatagcttatggccgtcaagtcccttgtgtttgcccctttct

SEQ ID NO: 39651 - DNA, 242 bp, Oryza sativa
  Clone ID: PAT_MRT4530_4316C.1
atgcttaagtcagagttacagactacccacgactggttccaaaaaccaaaacggtgtgattttgttgctgcttgtgttatccgaattgcacacgggttggatcaaggtatagcagatgcgatgggcatgaatattctttttctactgatcaagtggccagaagagggcctgcgctctgggctatgggagttcccatctgttcttgtaaatgaagagactggtgcattgaacaggagaaagag

SEQ ID NO: 39652 - DNA, 1657 bp, Oryza sativa
  Clone ID: PAT_MRT4530_43170C.1
gcgaacacgtggggcggtggcggcatcatcagcagcagcagcagcagcggtggtggtggtcgccgtagcggctgccagctttgacccccacctcacccgcctccggcggcgccgccgctcccgttcctgcgctcgccggcggcgcggcgggtcctcctcctttccctctggcgcgcggggccccgccccctctcccacccccaacatggaagcctctagaaggaggggaagctgctgatactgtagggtgatcgaataattgcccctttttctgttacaagcaaatgtgataatggacaaccttggccatagagaaaatgggaggcaaaggccagaccaatataaaggacttcatacccagtggatgatgccccagacccaaaggcatctgaaggaccatcaaagtatgaatctcttggcactgatgaatgatagagataatgccatccgagaaagggaccatgctctggctgagaagaaggcagccatagctgagcgcgatatggcgtttactcaacgggatgctgcaatggctgagcgtaatgctgcagtcgtggaaagggacaatgcccttgctgctcttgagttagcacgtacaaacggattgaacatgaataacgggaatggattcccccaaggatctctcagcggatcaaagaacatccaccaccacgaccagctttctcatgctcagtcatcaccgctgcaactggcagattctccatatgatcatgctagagaaatgcacatatcagaagcataccctatctcaacagctccagggagtgctggaaaagcaaagaggccaaagaagaatagttcccaagcctctccattgaagaggccatcaggtgtgctccggaaaaccaagaaaccttctggtgactggaagaatgtcgggatgtctggttgtggagatgattctgctcatgcttctgtgatgaagaacgagtggaaggaccaaaaccttggtctgaatcaagttgcgtttgatgattccacgatgcccgcgcctgcctgttcatgcacggggaagcttcgccaatgctacaagtggggaaacgggggatggcaatcatcatgttgcaccatgaacatttccatgtacccactcccagtgatgccgaacaagcggcatgctcgcatggggggacggaagatgagcggcggtgccttcacaaagctgctgagccgactagcggccgaaggtcatgatctctcgacgccggtcgacctcaaggaccactgggctaagcatggtacaaaccggtacatcaccatccggtagcttgctgatgaacgcggatgtgattcaagctggaaagatggggaagatcaggcaaatcttgcttctcctgcattccctaaaccctttgctagggccagtctttgtaaggttgtcattggtttgtagcggatgtaggtagaattttgtgtttaaagttctgtaggttcttctctcccgttctgaactctgaattttctcgtggctctagaacgctgcagcccacgagaattaaaaaatgtaaccgtagtctgcaggtattcatcgtcagatcattgtatagtttgacaaccagatttatgtggtagtagaccagtagtaaatggcaaaaaaaaaaaaaaaaaaaaaaaaaaaaaaaaaaaaaaaaaaaaa

SEQ ID NO: 39653 - DNA, 400 bp, Oryza sativa
  Clone ID: PAT_MRT4530_43171C.1
gaacaaccataaagatttctgatgggaaaattttctatacagaacacctgtaatttacatagacaaaagtgtattcgagaaatattccatcctataaacctagaagataaatacctaagtagaaaaaacatggaggtgacatgattttacttggaagtacaaacatgacaaagtatgatatatacaggtgattggctgcaagtctatgatgaacaatggactatctatgctcaattggctgttaacctaggtagcttgattccatctatgattttattaccagtattgactctcttactatgtgacgttgagttgaaagacagatcagatttcttgcaaactcatcatcactgacatcaatatgtagccagcacacatgccataggaaagaatgaagaat

SEQ ID NO: 39654 - DNA, 191 bp, Oryza sativa
  Clone ID: PAT_MRT4530_43172C.1
cgtcaatgtgtcacaacccataatgttgtgagcttggttgcaaaccgcagtggtggattgatccaatcaaacaccatgtggatctggggatgcaattcacactgtacagaggcgtgctttacaggtcaacatttgcccatgagtttgggtatatgggtcacttgtcagctgaccaaacacagacggtgcca

SEQ ID NO: 39655 - DNA, 1584 bp, Oryza sativa
  Clone ID: PAT_MRT4530_43173C.1
tccagcatgtcacctatctttgcagcaagggctttaaagaatctttacacattatttttccaacatacatcacaggagggcgagcttagttgccctgcccaaaagtcatatagtaagagtggaaacaagaaaagaaggcaaaagacatgtacaggtaaaacgtcaatctccttttcttccaggaaaatgcagcagctgctttgacactgtcctgagcggctcaactctatccaatctgtcgcgaacccaagggacttggatcggtgtagggggtcagtagtacttggaaaaatatttggcaacccatggagcgagctgagtattctctggttcccttctgttcttgttgtagtagtcagaccatagagctggatatatttcaggattgaaaccatcgcggtatatgcagaagggcagccaaccgtctcctccgttcatccttcgcttcctttctcgggggtacgccaaaggcgcttgaacatacctgatttcatcaaccacagaatcccaacagaaatgtgtatgcccaaaaacatggcaagcggctccatgtttagtgttgtcatgtatagttctcagcctcctctccaaaaaatctgatccgatgacctttgggaggtttggataataaagcatccgcttctctggacatagttcctgtcttggtacaaagtgtgaaaatgttagtatctgtttgctgctcttttttacttcttcaattgcatcttgatttctgtcattcaatttgtcaaagtagagagcaagagcttcatcttcatttgccaggtctggaggccattgacaagcatggaaatctttacaagccatctctaaggaagggacgcgaacactgttaacatccttttccttgtcaaagctgtagcggccgttctcgcggcggagccagaggtcgtggttcccggggacgtagaagacggccccgaaccgctccctgagcgcggccatggtgcgcgcgaagttgtcccgcgtctccgccacgtcgcccgccacgacgagcgcgtcgatccccaccccgtcgcccccgcctcccccgccgccgacggggagccgcagcacccagtccatgttctcccggtagtccgtgtgcaggtcggacaccacgaacaccctcgtcgtcgccgccgccccgcgcagccccgcccccgtcgccaccctcggctgcggcgccgcggccgcgcagcacctcacctgatgcgcccctccccccctccccctccccccgccgcacatcctcctcctccgccgccgccggtgctgcgcgtgcgccggcgacgccggcgtcggcgccgcgtcgagcaggtggtgggaggacgacggcgacacgggcagatgcggcgtcatcccgcgtctccgccacgtcgcccgccacgacgagcgcgtcgatccccaccccgtcgcccccgcctcccccgccgccggcggggagccgcagcacccagtccatgttctcccggtagtccgtgtgcaggtcggacaccacgaacaccctcgtcgtcgccgccgccgccgcgcagccccgcccccgtcgccacactcggctgcggcgccgcggccgcgcagcac

SEQ ID NO: 39656 - DNA, 226 bp, Oryza sativa
  Clone ID: PAT_MRT4530_43174C.1
gttatgattgccttaccccaaagccacctctttttttcccccctcttcggcatccttgggtgtagaagcatatagtccttgtgtacctctgtacatgttgaaatcaaaggacatgggaataaaaacattgtcctgttgtcgacagtataatgattctgactagccatgggttgttgacattataaggaggaattaaaaggtctttgcgtcttaattttttttcccc

SEQ ID NO: 39657 - DNA, 204 bp, Oryza sativa
  Clone ID: PAT_MRT4530_43175C.1
atgaaaaaaatagagcggagagaagagaagagcaggagggggaagcgcgccttttatagcacggggacgcctctggttaggtgcgactcggacagtttttttgcggctgggcccccggattcctggagtattacacaccgacagaaaaccacccctggtttcttggttggtggtgtctcgcagcagaagcggtttggggattga

SEQ ID NO: 39658 - DNA, 148 bp, Oryza sativa
  Clone ID: PAT_MRT4530_43176C.1
catagtatgggaacaaagctttcaccccatttgccaaaaaaaatatcattttttagggagcaacccggcctgggcaccccccaaagaccgttggaaaataccatgtttttgacgcacaccccttggacacaccaataaaagggggagg

SEQ ID NO: 39659 - DNA, 402 bp, Oryza sativa
  Clone ID: PAT_MRT4530_43177C.1
gtctgtgtgctgcggctccccgtcggcggcgggggaggcgggggcgacggggtggggatcgacgcgctcgtcgtggcgggcgacgtggcggagacgcgggacaacttcgcgcgcaccatggccgcgctcagggagcggttcggggccgtcttctacgtccccgggaaccacgacctctggctccgccgcgagaacggccgctacatggattcgctggagaaactgactgcattgcttgatgcgtgtagtgagctgggtgtggatacaggcccaagaataataggtgacttggggatcataccattgttctcatggtatcacaagagctttgacaaggaaaaggatgttaacagtgttcgcgtcccttccttagagatggctttgtaaagatttccatgcttg

SEQ ID NO: 39660 - DNA, 1294 bp, Oryza sativa
  unsure (1)..(1294): unsure at all n locations
  Clone ID: PAT_MRT4530_43178C.1
ccacgcgtccgcactcctagtggttgcactataacagtgaatagcatatcaggccattgggggaaaagaaagttaccatctctaaggaagggacgcgaacactgttaacatccttttccttgtcaaagctctggaagacaattaagcaaaatgagcaaacaggatattcctattaaacacggtgcattacagtctggctggaaaattagcaaccttgtgataccatgagaacaatggtatgatccccaagtcacctattattcttgggcctgtatccacacccagctcactacacgcatcaagcaatgcagtcagtttctccagcgaatccatctggaagaaataacttgagtaactgagacagcccaagcaatgtacaaaagaaagattaatggctgcagtcaaaaggaaaataaataaataaattcactgttatactagctatgatccaacagtagagttctcatttcataagtttgtggctgttcgtcatgctttgcggcatgtataacagctagaatagctatcaaacagcttccccatgtcgcactaatgtgttaataatgtccattacttatgtacaaacgggtcaccctttgtcatgaagcaagaaccagtactatcaacatgtcatcaaattcacaactgaaatacagcttagctggacaatactgccagaaaagaagtgacaagattcagaatgacatcaataaactgggtactacatctaagatttcttgtatcagcttatgcaacttactagtactacataaaggggagcactaagtaggcatatgtcatgccattcgatcgaattcactaacataactactcatgtagctttaataaataacggtagtacatatcaatcactaggccaaggcatttcgtcaaacaccttgcttgcagcgaaagccgagacggacaagaaaggggtgggaaagaaaggaaacggaaaagggggtggggagaaatccaactcacgtagcggccgttctcgcggcggagccagaggtcgtggttcccggggacgtagaagacggcnccgaaccgctccctgagcgcggccatggtgcgcgcgaagttgtcccgcgtctccgccacgtcgcccgccacgacgagcgcgtcgatccccaccccgtcgcccccgcctcccccgccgccgacggggagccgcagcacccagtccatgttctcccggtagtccgtgtgcaggtcggacaccacgaacaccctcgtcgtcgccgccgccccgcgcagccccgcccccgtcgccaccctcggctgcggcgcc

SEQ ID NO: 39661 - DNA, 708 bp, Oryza sativa
  Clone ID: PAT_MRT4530_43179C.1
atgccggtggacgagctggacgacggcgacgaggacggcgagctgtacggcgacgaggaaggcgagctggaagacgacgaggcaagccgccacggcccgcagatggctactgccgccgtcgccgtgcttggccgtcgacaccgccgcccgcgccctggccgccgctgccacccgtgcctggtcgtcgatgctgctgcccgcgctctggccgcagccgccgcccgcgccctggcagccgccgccgcccgtgcctggtcatcgatgccgccgcccacgcccacgccctggccgtcgacgccgctgcccttgcctactcaaccgcgccctcgtccttgccagctcaaccgcgcccttgcccctggcgcgatggcgccgccgccgcctctacctatgtgggttaacttcttgaagagatcatgtcgggccaaaaggggggaccaaaaggaggtttccaaaaacggaaccgaaattccatttgactactcctctacatctacatataatcccaatgatcccaccaaagaggacgacgtgaaccaacacaagaacgctcaagccgctaatgccatatttagcaccttgagcggtagtgagttcaaccgagtggatggcatagagagtaccaaagagatatggtacacacttcagaatgttcatgaagccatggatagtgtccgcgagtccaaggtggagatcttgaagggataa

SEQ ID NO: 39662 - DNA, 484 bp, Oryza sativa
  Clone ID: PAT_MRT4530_4317C.1
atttctatccaaggcttattaatctgttgtgtgatgaaggctcattagatgggagaaaagcgatttatatagaacacaagttgtgcacatgatgtgaccatgaggtagaaaattgagccacatagatcattgttgaaactattttctattgcccattaacatattgtatagtgtttattcatgtctgcaaggtcaaatttgccatatcagaccttctttgttaatattttacagtttaaagtcagttgccactctttgatgtttgttattcacacctgagcactacgattaaatatgctctgcctgctatatgttttattgatttcttcttattttcaggttttctacaacactgctcagtactatagggcatactatggtcataaaacggtacagcttttctacaatgaaatggttgagtatgaagcgtatattctctatactgctttagctaaatgcttcaactatttgtgataggatcctc

SEQ ID NO: 39663 - DNA, 5042 bp, Oryza sativa
  Clone ID: PAT_MRT4530_43180C.1
tcacttgtttacctcctgtaatagacatctatcattcaggccctttggttttttaacaaaactcccccaaacaatcagcatggtaaggaccacgatcaggaatattgcaagaagaatgacagtagcataaaactgcaatcttgtccatggactccatggtagaagtcttatgaatgcataatacactaatgtgatgctataaatgacaaagtataatgtcaagcttgctacgatagaagtccaaaatggtccacttgctaagtgagcaaagaccatagccattacgccaggtaatccacacaccaacgaaacttgaatcacaagatccttctcatattcaccgaaatcagattggctgctaagcattgatagcagaaacgcaacaataaatggtaccatacaagtgagcagcgactgaaaagacttcataagaacatcattttctttgttctggagcgtttgaacttgctgaccatgttgagttatatttgcactcatgtcttgctctactcctatgattctttcatgctgatggataatagaatcttccattttcaccaatctagaagcgttctgccgttctgctgattccaaaacttgaatcccacgttcccacgattccctccgcaacagcgcgtccacgttctttctcctgatagataaggaggccgcgagtccgatccgacttcttcgcttctttccccggtgttagtttctccttctccgtgcctgagttgctctcgcttccccgcttctgatctcttgcgcgcacgagagattggaaggagcagtgcctccgaaaccacaccttcgcctgagatctgcaccgggtaggcgggtgatcatgtttttggggagtgcctcccgcacgactgctcatcgccatgtctggagttgctgccgccactgctggcggaggtggtacgccgccgccgacaggagctggatctggatccggagctggtgcgccaggaggaggtgccgtgaacgactacaacaacggaggcaattctgcctcaccatccagcggagggccattctcggggtataatcttctcctcctgctactgctgttagcgctattcctgttcccattgttagcgctatactatgtgcgctatgttcttgttcctgttctacatgatgcctctagcatgttatcgcgttactggtatgttcctgttcctgacattcatgatgcgcatagtatgctactggttatgttaagatcaccctacactgcttatgccatgatcattgtttcattttcttagattaaaatataccgattaatgactatatttccaacaatccaaaaacctgataggtcattttcggtagttggctttgctgctgcactgaaaccacatgcttttgatggttcaaactataagagatggaaagcacgtgcactattgtggttgacagcgatgcagtgcttctatgtttcacggggcaaacgaagtgaaccacctctttctcctgaggaagaggctaagttcgaggcttcggattgcctgttccgtggagcattgatcagtgtactcgctgacaaaatagtggacgtgtacatgcacatgccttctgggaaggacatgtgggatgcacttgaggccaagttcggagtttctgacgccggcagtgagctgtatgtcatggagcagttctatgactacaagatggtcgatgaccgttctgtagtagaacaatctcatgagattcagatgctggctaaggaacttgagaacaacaactgtgagttgccggacaagtttgtggcgggtggcattattgccaaactaccaccttcttggtcggactttgccacttctctaaagcacaagagacaagagttcagtgttcctgatctcattggctctttgggtgttgaggagaaggcgagggcaaaggacgtccggggcaaaaaggttgagggaggttctagtgccaatatgaagaaaggcaagggaaaggcaaagggagactgctttgtgtgtggcaagtctgggcattgggccaaggactgtcctgagcgcaaagacaggaagtctgccaacatgatcattagcgagggcggaggaacatcggggtatgtcgggagaggttcctccttgttgatgggaaacgggtcgcttgcggctgttcatagtgttggtatggtcgatctgaagtttacttcgggaaagaccgtgcagctgaagaacgtgcagcatgtcccttcaataaagaagaatctagttaacggctctctattgtgtagagaaggttttagacttgtgtttgagtccaataaatgtgtcgtatctaaatatgggacttttgttggaaaaggttatgacagcggaggcttgttccgcttttctttgaatgacatgtgtaataatcataatgctgtgaaccatattagcgagaatgatgagtctaatgtgtggcattcgcgactctgtcatgtgaatttcggttgtatgacgcgcttagctaacatgagtttaattccaaaattcactttggtcaaaggttccaagtgccatacttgtgttcaatcaaaacaacctcgcaagcctcacaaggcatctgaggcgaggaatttggcacctctagaacttgttcattccgatttgtgcgaaatgaacggcgtgttgactaaagggggaaagaaatatttcatgacactgatagatgattgcactagattttgctatgtgtatctattgaaaacaaaggatgaggcattgcattactttaaaatctataaagctgaggtagaaaaccaacttgaaaggaaaatcaaacggttgaggtctgatagaggtggggagtatttttccaatgagtttgcatccttttgcgaagagtttgaaattattcatgagatgacgcctccctattcaccccaatcaaatggggtggccgaaagaaagaaccgtactctaactgagatggtgaatgccatgttagatactgcggggctttccaaggaatggtggggtgaggcagttttgactgcgtgtcatgtcctgaataaaattccaatgaagcataaggaagtaacaccattcgaggaatgggaaaggaagaaattaaatctctcatacctacgaacatggggctgtttggccaaggtaaatgtacctatagccaaaaagcagaaacttggaccaaaaactgttgattgtgtgtttcttggttatgctatccacagtgtgggttatagattcttaatagtaaactctggagtacccgacatgcatgctggtacaattcttgagtccagagatgctacattctttgagaatgaatttcctatgaaatatacacctagcacttctagtaaagaaactgtcatgccccatgagcactttgcaccgatagaacacgatgatcaaacgcctgaggaaaatcctgaggaggacaacattgtagatactcgcaagagtaagagacaaagggttgcaaaatcttttggagatgactacattgtatacctcgtggatgacaccccaagaaccatagaagaggcatattcatctcctgacgctgactactggaaggaagcagtacgcagtgaaatgaactcgattatgtctaatggtacttgggaagtcgttgagcgtccatatgggtgcaagcccgtaggatgcaaatgggttttcaagaaaaagcttaggcctgatggtacaatcgaaaagtacaaggcaaggcttgtagccaagggttatacccaaaaggaaggcgaggacttcttcgacacatactcaccagttgctcgcttgaccacgattcgagtactacttgctctggcagcctctcatggtcttctcgtccatcagatggacgttaagacagctttcctaaacggagagctggaggaggagatctatatggatcaaccagacgggtatgtactagaaggtcaggagggaatggtgtgtaaactattgaaatccttgtatggcctcaagcaagcacctaagcaatggcataagaagtttgacaccacgcttacctctgcaggctttgttgtgaacgaagctgacaaatgtgtatactatcgctatggtgggggagaaggggtgatcttgtgcttatatgtcgatgacatactgatctttgggaccagccttaatgtgattgaggaggtcaaagactatctgtccaagagttttgaaatgaaggatttgggagaggctgatgttattcttaacatcaaactacaaagaggagatgagggtgggattacacttgtgcaatcccactatgtggacaaggttttgagtcgctttggatatagtgactgcaagccagctcctactccttatgatcccagcgtgctattaaggaaaaaccgaagaatagcaagggatcaactgagatactctcaaatcattggttcattgatgtacttggctagcgcaacgaggcctgacatctcatttgctgtaagcaagctgagccggtttgtctcaaatccgggagatgatcattggcaggctctggaaagagtaatgcgctatctaaagggcactatgagctatggaattcactataccgggtatccaaaagtactagaagggtatagtgactcaaactggatatctgatgctgatgagataaaagccacaagtggatatgcgttcacacttggaggtggcgctgtttcctggaagtcttgcaagcagaccatcttaacgaggtcaacaatggaagcagaacttacagcactagatactgcgacagttgaggccgagtggcttcgtgaactcctgatggatttgccggtggttgaaaaaccagtgccagctatcctaatgaactgcgataatcaaacagtgattattaaagtgaacagttcaaaggacaacatgaagtcatctagacacatcaagagaagactgaaatatgtcagaaagcagaaaaactccggagtgatagcattggactatgtccaaacggctagaaatctggcagatcagtttaccaaggggctaccacgtaatgtgatagacagtgcatcgagggaaatgggcttgatacccacctaa

SEQ ID NO: 39664 - DNA, 610 bp, Oryza sativa
  Clone ID: PAT_MRT4530_43181C.1
tttatttccccaaataggactaactttcatgagattttacttctatgcaattcgatatttggtgtgctttctaatgcagactgtttttgtgtgcatgtaggaagtagattttatcatctgaatcaagtttagatttgtacaatatctgcacaaatggaattgggggacaaggcagtaggctttattttaaccttgacaagtctatccatctttacatactatactttctgggtcatcatcctgccatttgttgacagtgatcacttcgtccacaagtactttctgcctcaagagtatgctattttgatcccagtgcttgctggcgtgattctcctatctttcttaagcgtgttcatgggtcttgttatgctcaagtcaaagaaaaagaagaagaccacttgattgaatttaaccatatttgtttattgattacgattgcaagctctatacaagaaagcaggttttgcatatgattccgttctatgtagtggtttttgcatgtaagtcgtagtttcagctttattattattatttcatttttgctgttgggttgtgaactaaacttaaagtgcatgtttatatcttcaaaaaaaaaaaaaaaaaaaaaaaa

SEQ ID NO: 39665 - DNA, 8343 bp, Oryza sativa
  Clone ID: PAT_MRT4530_43182C.1
atgtctgcgcctggagccggagccgccggcgtggctgttggaggagatggcgtgcctggagctggagccggaggtggtgcgctaggagctagagccggtgccacgaacaacaacatcaacggaggcaattttgcctcacaatccagtggagggccattctcggggtatatccttctcctgttcctattgttagcgctttaccgctatgttcctgttcctgatattcatgatgcctttagcatgctagcgctttactgctatgttcctgttcctgatattcatgatgcctttagcgtgctactgcgttactgctatgttattcatgatgcctttagtatgctactggttatgttgtcactagattaccctacactgagatggaaagcacatgcactattgtggttgacagcgatgcaatgcttctttgtttcacggggcaaacgaagtgaaccacctctctctcctgaggaagaggctaagttcgaggcttcggattgcctgttccgtggagcattgatcagtgtactcgctgacaacatagtggacgtgtacatgcacatgccttccgggaaggacatgtgggatgcacttgaggccaagttcggagtttccgacgccggtagtgagctgtatgtcatggagcagttctatgactacaagatggtcgatgaccgttctgtagtagaacaagctcacgagattcagatgctggctaaggaacttgagaacaacaactgtgagttgccagacaagtttgtgcacaagagacaagagttcagtgtttctgatctcattggctctttgggtgttgaggagaaggcgagggcaaaggacaaccggggcaaaaagaagaagaaccctcatgcatcccacaacaacaagaaaatcaagcttgatgtcaaatccaaggctgcaaccaaatttaagaagaaatgcaagggaaaggcaaagggagactgctttgtgtgtggcaagtctgggcattgggccaaggactgtcctgagtgcaaagacaggaagtctgccaacatggtcattagcgagggcggaggaacatcggggtacggtaaaatattacctacagttctctctgtctttcactcacctgattggtgggtggatactggtgctaatattcatgcatgtgctgacatttctctgttttcttcttatcaggtcgggagaggttcctccttgttgatgggaaacaggtcgcttgcggctattcatggtgttggtacggtcgatctgaagtttacttcgggaaagaccatgcagctgaagaacgtgcagcatgtcccttcaataaagaagaatcttgttagcggctctctattgtgtagagaaggttttagacttgtgtttgaatccaataaatgtgtcatatctaaatatggaacttttgttggaaaaggttatgacagtggaggcttgttccgcttttctttgaatgacatgtgtaataatcataatgttgtgaaccatattagcgagaatgatgagtctaatgtgtggcattcgcgactctgtcatgtgaatttcggttgtatgacgctcttagctaacatgagtttaattccaaaattcactttggtcaaaggttctaagtgccatacttgtgttcaatcgaaacaaccttgcaagcctcacaagacatctgaggcgaggaatttggcacctctagaactcgttcattccgatttgtgcgaaatgaacggcgtgttgactaaagggggaaagaaatatttcatgacactgatagatgattgcactagattttgttatgtgtatctattgaaaacaaaggatgaagcattgcatttctttaagacctataaagctgaggtagaaaaccaacttgaaaggaaaatcaaactgttgaggtctgatagaggtggggagtattttttcaatgagtttgcatccttttgcgaagaatttggaattattcatgagaggacgcctccctattcaccccaatcaaatggggtggccgaaagaaagaaccgtactctaactgagatggtgaatgccatgttagacactgcggggctttccaaggaatggtggggtgaggcagttttgactgcgtgtcatgtcctgaataaaattctaatgaagcataaggaagtaataccattcgaggaatgggaaaggaagaaattaaatctctcatacctacgaacatggggctgtttggccaaggtaaatgtacctatagccaaaaagcggaaacttggaccaaatactgttgattgtatgttccttggttatgctattcacagtgtgggctatagattcttaatagtaaattctggagtacctgacatgtatgttggtacaattattgagtccagagatgctacattctttgagaatgaatttcccatgaaacatacacctagcacttctagtcaagaaactgtcatgccccatgagcactttgcaccgatagaacacaatgatcaaacgcctgaggaaaatcctgaggaggacaacattgtagatactcgtaagagtaagagacaaagggttgcaaaatcctttggagatgactacattgtatacctcgtggatgacaccccaagaaccatagaagaggcatattcatctcctgacgctgactactggaaggaagcagtacgcagtgagatggactcgattatgtctaatgatacttgggaagtcgttgagcgtccatatgggtgcaagcctataggatgcaaatgggttttcaagaaaaagcttagccctgatggtacaatcgaaaagtacaaggcaagacttgtggccaagggttatacccaaaaggaaggcaaggattttttcgacacatactcaccagttgctcacttgacaatgattcgagtactacttgctctggcagcctctcatggtgttctcgtccatcagatgaacgttaagacagctttcctaaacggagagctggaggaggagatctatatggatcaaccagacgggtatgtactagaaggctttgttgtgaacggagctgacaaatgtgtgtactatcgctatggtgggggagaaggagtgatcttgtgcttatatgtcgatgacatattgatctttgggaccaacctcaatgtgattgagggggtcaaggactatctgtccaagagttttgaaatgaaggatttgggagaggctgatgttattcttaacattaaactacaaagaggagatgagggtgagattacacttgtgcaatcccactatgtggacaagattttgagtcactttggatatagtggctgcaagccagcttctactccttatgatcccagcgtgctattaaggaaaaaccgaagaatagcaagggatcaactgagatactcccaaataattggttcattgatgtacttggctagtgcaacgaggcctgacatctcatttgctgtaagcaagctgagccggtttgtcttaaatccgggagatgatcattggcaggctctggaaagagtaatgcgctatctaaagggcattatgagttatggaattcactataccaggtatccaaaagtactagaagggtatagtgactcaaactggatatctgatgctgataagataaaagccacaagtggatatgtgttcgcacttggaggtggcactgtttcctggaagccttgcaagcagaccatcttaacgaggtcaacaatggaagtagaacttacagcactagatactgcgacagttgaggccgagtggcttcgtgaactcctgatggatttgccggcgggtgatcaggtttttggggagtgcttcccgcacgactgctcgtcctgagtgcttcccgcacgactgctcgtcctcgcccaccatgtctgcgcctggagccggagctgccgccggtgccgctacttctggaggagatggcgcgcctggagctggagccggagatggcacgcctggagctggagccggtgccgcgaacatcaacaccaatagaggcaattttccttgggtgtgccacgatgtcgccggacatgtcgtcgacggccaacacgtcgcccttgggatcaaggatttcttcgttgatgaatcccatgagttgttcttgaaccgccgcgataaattccttgtgtgtggtcaggttatccctcatgcgaataaaatcgagctctcttgtggtgatgatttggtctgcaaggcagtggcaatactcgcacacgtaatagccgcacaagttagttccctgcttttgctttgcgcagttgacggtgcaggcctccaggtcgatgagtaaaagcacccagtggaattctgtgttgtatggcaacagtatgaacgtcttgtaatgctgcgccttcaggagatagacgagattgtcctctgtttcttgtggatattggtcgagcattgcgacgtttactttccgagggtcgatgaatccagtatcgaaaaccctccgccgtcgggccatttgaatctccattaaaatccagcaactcataatagagacgtcgagggcgtccagctggtatagttcgtagattcccctgaaattgatccagagaatgtcatctccttgcaagaagtccgtgtccctgatcctcgctccgatcatctctctaccggtggcgctcatctccatgtacagctgatggaacttgtacatttgtgtgggtagggactgcagcagctcaggcttgacaagcggtttaccgagttcgtacatgtatttcacttccgccttttcgattggtgcgactcctagcaattgatccgtagttagaccggtgtcagtaataaattgttctatcgtcatttctttaccggtcaccaacggctcgatctccaggtttggttgctctccaagctgagggactggtttggactttccagaagatgctttcttcagcgttcgctcatagtccgatagcttgatggcctccttgacagatgcagacatacccctgaagaagttcctgacactggggtctataggaatcttcttttctggacttcgaggcttgaattgtctcttgacttctgatgcaacgtaagcgtcaagctcctcttgcgtgcaatcgtaccccgggtccttgttcttggcggcgtcaactttcgccttctttgttgcccttgtgtgggcaagcggtggagctgggggggcccttgactttgaaggtgccggaagaggagcttgcgggggagtaggtgtaggagcacgaggaggagtcggtgcaggatcctgaggagtcgatgctggagcgagacgccgcttgtcgcccagggaggatgatgtaccgccgtctcctccagggtaatccagctcgaggtcctcgtacgcgccttcgaccaactcaacttcgaccttggagtatcctgctggaatcggcggcattacatcggcggtgacggttgaccgcacgtactttctcctcactattgttccctccttgtgatcgctgcgtgagtaaggggtgtcttcatttgataggaggatgctagggtcaatcgtcaccgtgaaagggggttgcccatccaactgatcgtaatcctcgtcagtcttgtcctcaactccgacgatttttcttttgcctgggagaaccacttgacgcttaggctcatcaggccctctgcccttctttcctttgctagacatgtccttcacgaaaaagacttgcgttacatcattggcaaggacaaaaggttcgtccgagtatccaaccttgttaaggtcaacagttgtcatcccactgtcatcaatcattacgcctccaccagtcaacctaacccattggcaccggaacagaggaaccttaagaggaccatagtcaagttcccatatgtcctcgatggcaccgtaatatgtggcagttgttccatcgtgtcccatggcatcgacacgaacagcgctgttttggttcgtgctcttcatgtcttgggctctcgtgtagaatgtatacccattgatctcatatccctggaatgtcgcgatagacccagacggtcccctcgccaggaaggcaagttgttggttgatcgactcgttacccatgagatgttgtcgtagccacgcggggaaagtatcaatgtgatgccgtgtaatccatgcatcggacttaccgatgttcctggcgcgaactagagccaagtgctcctcgatgtaaggagctaccaatgaagagtgttgcagaacagtgaaatgggctttacggaataaattgttgtctaccgtcattattgctttccttccgagagttccctttccccgtagtctcccttcatggcgtgattcaggtaccccgattgggcgaaggtcttcgataaattctacgcaaaattcgatgacctcctctgttccataacccttggcgatgcttgcctctggacgagcacggttacgaacatacttcttcagaacgcccatgtacctctcgaaaggaaacatgttgtgtaggtacataggcccaagaatacggatctctttcacaaggtgacaaagcagatgcgtcattatattgaaaaatgaaggtggaaatatcaactcaaaactgacgagacattgcaccacttcattctgaagggcttctaatctatccggatcgatgaccttctgcgaaattgcgttcatgaatgcacatagctttgttattgttgcccggacattgtctggaaggataccccttgctaagagtgtagctggctggactcaagtaatggcttcctttctcctttggttccgggtgaaggtcgccgcgttgttccatatgcttcagatcattacgtgcttccagtgtatctttcgactttccgtatacacagtggtcggccttatgttcgaagtgcttgcctttcttccgtaccgggtggtttgagtgagtgcaagccttgtaccccttgttggactgtccggataggttgctaagtgcaggtcgccgcgttgatggttacgaacagcagcgctcgtaggttaaactcctcctgtttgtcctcgtcccacacggggacaccttccttcttccacaactgtttaagatcttcgaccagtggtcttaggtacacgtcgatgtcgttaccaggttgcttggggccttgaataataatcggcatcattatgtacttcctcttcatgcatagccagggggggaggttgtagatacacatcgtaacgggccaagtgctatggccgctgctcatctctccaaaaggattcatgccatccgtactcaaaccaaaccgtatgtttcgtgcgtcctttccaaattctttaaattttctgtcgatgtttcgccactgcgaaccatcggcggggtgtctcagcatcccgtcctgttgacgctcttcagcgtgccatcgcaacattctagcattccccttgttcctgaacaaacgccttagccgtggtattataggaaaataccacatcaccttagcaggaattctcttctttgttagctgcccgtcaacttctcctggatcgtcccgtctaatcttgtatcgtagtgctttgcaaacatggcatgcttctaggttctcatactcctcaccgcgatataggatacaatcgttcggacatgcgtgaatcttatgaacttccagtcctaacgggcagactatcttcttagcctcgtacgttttctcgggcaatttgtttccccccggaagaatgttcttgacgagtttcaataaatcgccaaatgccttgtcactaaccccattttttgccttccattgcaacaactccagagtggtatccaactttttgtgcccctgctcgcaacctgggtacaacgaagttctgtggtcctccaacatcttgtccaatttatgggcctccttttcactttcgcagtcttccctggcgtcctgcaacatctgaccaagatcatccgcaacgtcgttaccatcagcagctatttcctcctcgcccgtttgatttccttcaaatccaacatactgagcaaagtccggaatattgtcgtcttccacttcatcttcttccatttcaacaccttgctctccgtgggatgtccaacaattatagcttggcatgaaccccgactcaaacaagtggaaatgaatagtcctgaatgcagaatactccttctgattcttacacttattgcatggacaacaaataaaacccctttgcctgttagctttggccactctcaaaaaatagtgcacgccgtcaataaactctttggaccgccggtcagcgtacatccattgccgatccatcctccatttatcaataccggacactttaccaaaccaaggcaggttttgcctaggccgggatgttacagctaggctcctcaagccctcgagggacacctccactggtcgacctcctcctcccaagcccat

SEQ ID NO: 39666 - DNA, 3558 bp, Oryza sativa
  Clone ID: PAT_MRT4530_43183C.1
atgtctgcgcctggagccggcgccgctgctgctgctggaggagatggcggaggtggtgcgccaccaggagctggagccggaggtggtgcgccaggagctggagccggtggcgcgaacaacaacaccaacggaggcaattctgcctcacaatctagcggagggccattctcgggatcaccctacactgcttatgccatgattattgtcttaacattttggattaaaatatgccgattcatgaccatatttccaacaatccaaaaacctgataggccattttcggtagttggctttgctgctgcactgaaaccacatgcttttgatggttctaactataagagatggaaagcacgtgcactattgtggttgacagcgatgcagtgcttctatgtttcacggggcaaacgaagtgaaccacctctttctcctgaggaagaggctaagttcgaggcttcggattgcctgttccggggagcattgatcagtgtactcgctgacaacatagtggacgtgtacatgcacatgccttctgggaaggacatgtgggatgcacttgaggccaagttcggagtttctgacgccggtagtgagctgtatgtcatggagcagttctatgactacaagatggtcgatgaccgttctgtagtagaacaagctcatgagattcagatgctggctaaagaacttgagaacaacaactgtgagttgccggacaagtttgtggcgggtggcattattgccaaactaccaccttcttggtcggactttgccacttctctaaagcacaagagacaagagttcagtgtttctgatctcattggctctttgggtgttgaggagaaggcgagggcaaaggacgtccggggcaaaaaggttgagggaggttctagtgccaatatggtacagaagaagaaccctcatgcatcccacgataacaagaaagttaagcctgatgtcaaatccaaggctacaaccaattttaagaagaaagacaagggaaaggcaaaggtagactgctttgtgtgtgacaagtctgggcattgggccaaggactgtcctgagcgcaaagacagaaagtctgccaacatggtcattagcgagggcggaggaacatcggggtacggtcgggagaggttcctccttgttgatgggaaacgggtcgcttgcggctgttcatggtgttggtacggtcgatctgaagtttacttcgggaaagaccgtgcagctgaagaacgtgcagcatgtcccttcaataaagaagaatctagttccaagtgccatacttgtgttcaatcgaaacaacctcgcaagcctcacaaggcatctgaggtgaggaatttggcacctctagaacttgttcattccgatttgtgcgaaatgaacggcgtgttgactaaagggggaaagaaatatttcatgacactgatagatgattgcactagattttgctatgtgtatctattgaaaactaaggatgaggcattgcatttctttaaaatctataaagctgaggtagaaaaccaacttgaaaggaaaatcaaacggttgaggtctgatagaggtggggagtatttttccaatgagtttgcatccttttgcgaagagtttggaattattcatgagatgacgcctccctattcaccccaatcaaatggggtggccgaaagaaagaaccgtactctaactgagatggtgaatgccatgttagacactgcggggctttccaaggaatggtggggtgaggcagttttgactgcgtgtcatgtcctgaataaaattccaatgaagcataaggaaataacaccattcgaggaatgggaaaggaagaaattaaatctctcatacctacgaacatggggctgtttggccaagcactttgcaccgatagaacacaatgatcaaacgcctgaggaaaatcctgagaaggacaacattgtagatactcgcaagagtaagagacaaagggttgcaaaatcctttggagatgactacattgtatacctcgtggatgacaccccaagaaccatagaagaggcatattcatctcctgacgctgactactggaaggaagcagtacgcagtgaaatggactcgattatgtctaatgatacttgggaagtcgttgagcgtccatatgggtgcaagcccgtaggatgcaaatgggttttcaagaaaaagcttaagcctgatggtacaatcgaaaagtacaaggcaaggcttgtggccaagggttatacccaaaaggaaggcgaggacttcttcgacacatactcactagttgctcgcttgaccacgattcgagtactacttgctctggcagcctctcatggtcttctcgtccatcagatggacgttaagacagctttcctaaacggagagctggaggaggagatctatatggatcaaccagacgggtatgtactagaaggtcaggagggaatggtgtgtaaactattgaaatccttgtatggcctcaagcaagcacctaagcaatggcatgagaagtttgacaccacacttacatctgcaggctttgttgtgaacgaagctgacaaatgtgtatactatcgctatggtgggggagaaggggtgatcttgtgcttatatgtcgatgacatactgatctttgggaccagccttaatgtgattgaggaggtcaaagactatctgtccaagagttttgaaatgaaagatttgggagaggctgatgttattcttaacatcaaactacaaagaggagatgagggtgggattacacttgtgcaatcccactatgtggacaaggttttgagtcgctttggatatagtgactgcaagccagctcctactccctatgatcccagcgtgctattaaggaaaaaccgaagaatagcaagggatcagctgagatactctcaaatcattggttcattgatgtacttggctagcgcaacgaggcctgacatctcatttgctgtaagcaagctgagccggtttgtctcaaatccgggagatgatcattggcaggctctggaaagagtaatgcgctatctaaagggtactatgagctatggaattcactataccgggtatccaaaagtactagaagggtatagtgactcaaactggatatctgatgctgatgagataaaagccacaagtggatatgtgttcacacttggaggtggcgatgtttcctggaagtcttgtaagcagaccatcttaacgaggtcaacaatggaagcagaacttacagcactagatactgcgacagttgaggccgagtggcttcgtgaactcctgatggatttgccggtggttgaaaaaccagtgccagctatcctaatgaactgcgataatcaaacaatgattattaaagtgaacagttcaaaggacaacatgaagtcatctagacacatcaagagaagactgaaatctgtcagaaagcagaaaaactccggagtgatagcattggactatgtccaaacggctagaaatctggcagatcagtttaccaaggggctaccacgtaatgtgatagacagtgcatcgagggaaatgggcttgatacccacctaa

SEQ ID NO: 39667 - DNA, 4769 bp, Oryza sativa
  Clone ID: PAT_MRT4530_43184C.1
aagacgggaacaaagaggagtgagagggtgccacgtcacgtcacgtcgctatccttttgcagccattaacccacgattccgcgcgtccacgttctttctcctgatagataaggaggccgcgagtccgatccgacttcttcgcttctttcccggtgttagtttctccttctccgcgcctgagttgctctcgcttccccgcttctgatctcttgcgcgcacgagagattggaaggagtagtgcctccgaaaccacaccttcgcctgagatctgcaccgggtaggcgggggagtagtgcctccgaaaccacaccttcgcctgagatctgcaccgggtaggcgggtgatcaggtttttggggagtgcctcccgcacgactgctcatcgccatgtctggagttgccgccgccactgctggcggaggtggtacgccgccgccgccgacaggagctggatctggatctggatccggagctggtgcgccaggaggaggtgccgtgaacgacaacaacaacggaggcaattctgcctcaccatccagcggagggccattctcggggtataatcttctcctcctgctactgttgttagcgctattcctgttcccattgttagcgctatactatgtgcgctatgtgcgctatgttcttgttcctgttctacatgatgcctctagcatgttatcgagcatgttatcgcgttactggtatgttcctgttcctgacattcatgatgcgcatagtatgctactggttatgttaagatcaccctacactgcttatgccatgatcattgtttcaatttcttggattaaaatatgccgattaatgactatatttccaacaatccaaaaacctgataggtcattttcggtagttggctttgctgctgcactgaaaccacatgcttttgatggttcaaactataagagatggaaagcacgtgcactattgtggttgacagcgatgcagtgcttctatgtttcacggggcaaacgaagtgaaccacctctttctcctgaggaagaggccaagttcgaggcttcggattgcctgttccgtggagcattgatcagtgtactcgctgacaacatagtggacgtgtacatgcacatgccttctgggaaggacatgtgggatgcacttgaggccaagttcggagtttctgacgccggcagtgagctgtatgtcatggagcagttctatgactacaagatggtcgatgaccgttctgtagtagaacaagctcatgagattcagatgctggctaaggaacttgagaacaacaactgtgagttgccggacaagtttgtggcgggtggcattattgccaaactaccaccttcttggtcggactttgccacttctctaaagcacaagagacaagagttcagtgttcctgatctcattggctctttgggtgttgaggagaaggcgagggcaaaggacatccggggcaaaaaggttgagggaggttctagtgccaatatggtacagaagaagaaccctcatgcatcccacaacaacaagaaagtcaagcctgatgtcaaacccaaggctgcaaccaattttaagaagaaaggcaagggaaaggcaaagggagactgctttgtgtgtggcaagtctgggcattgggccaaggactgtcctgagcgcaaagacaggaagtctgccaacatgatcattagcgagggcggaggaacatcggggtacggtaaaatattacctacagttctctctgtttttcattcacctgattggtgggtggatactggtgctaatattcatgtatgtgctgacatttctctgttttcttcttatcaggtcgggagaggttcctccttgttgatgggaaacgggtcgcttgcggctgttcatggtgttggtacggtcgatctgaagtttacttcgggaaagaccgtgcagctgaagaacgtgcagcatgtcccttcaataaagaagaatctagttagcggctctctattgtgtagagaaggttttagacttgtgtttgagtccaataaatgtgtcgtatctaaatatgggacttttgttggaaaaggttatgacagcggaggcttgttccgcttttctttgaatgacatgtgtaataatcataatgctgtgaaccatattagcgagaatgatgagtctaatgtgtggcattcgcgactctgtcatgtgaatttcggttgtatgacgcgcttagctaacatgagtttaattccaaaattcactttggtcaaaggttccaagtgccatacttgtgttcaatcgaaacaacctcgcaagcctcacaaggcatctgaggcgaggaatttggcacctctagaacttgttcattccgatttgtgcgaaatgaacggcgtgttgactaaagggggaaagaaatatttcatgacactgatagatgattgcactagattttgctatgtgtatctattgaaaacaaaggatgaggcattgcattactttaaaatctataaagctgaggtagaaaaccaacttgaaaggaaaatcaaacggttgaggtctgatagaggtggggagtatttttccaatgagtttgcatccttttgcgaagagtttggaattattcatgagatgacgcctccctattcaccccaatcaaatggggtggccgaaagaaagaaccgtactctaactgagatggtgaatgccatgttagacactgcggggctttccaaggaatggtggggtgaggcagttttgactgcgtgtcatgtcctgaataaaattccaatgaagcataaggaagtaacaccattcgaggaatgggaaaggaagaaattaaatctctcatacctacgaacatggggctgtttggccaaggtaaatgtacctatagccaaaaagcggaaacttggaccaaaaactgttgattgtgtgtttcttggttatgctatccacagtgtgggttatagattcttaatagtaaactctggagtacccgacatgcatgctggtacaattcttgagtccagagatgctacattctttgagaatgaatttcctatgaaatatacacctagcacttctagtaaagaaactgtcatgccccatgagcactttgcaccgatagaacacaatgatcaaacgcctgaggaaaatcctgaggaggacaacattgtagatactcgcaagagtaagagacaaagggttgcaaaatcctttggagatgactacattgtatacctcgtggatgacaccccaagaaccatagaagaggcatattcatctcctgacgctgactactggaaggaagcagtacgcagtgaaatggactcgattatgtctaatggtacttgggaagtcgttgagcgtccatatgggtgcaagcccgtaggatgcaaatgggttttcaagaaaaagcttaggcctgatggtacaatcgaaaagtataaggcaaggcttgtggccaagggttatacccaaaaggaaggcgaggatttcttcgacacatattcaccagttgctcgcttgactacgattcgagtactacttgctctggcagcctctcatggtcttctcgtccatcagatggacgttaagacagctttcctaaacggagagctggaggaggagatctatatggatcaaccagacgggtatgtactagaaggtcaggagggaatggtgtgtaaactattgaaatccttgtatggcctcaagcaagcacctaagcaatggcatgagaagtttgacaccacgcttacatctgcaggctttgttgtgaacgaagctgacaaatgtgtatactatcgctatggtgggggagaaggggtgatcttgtgcttatatgtcgatgacatactgatctttgggaccagccttaatgtgattgaggaggtcaaagactatctgtccaagagttttgaaatgaaggatttgggagaggctgatgttattcttaacatcaaactacaaagaggagatgagggtgggattacacttgtgcaatcccactatgtggacaaggttttgagtcgctttggatatagtgactgcaagccagctcctactccttatgatcccagcgtgctattaaggaaaaaccgaagaatagcaagggatcaactgagatactctcaaatcattggttcattgatgtacttggctagcgcaacgaggcctgacatctcatttgctgtaagcaagctgagccggtttgtctcaaatccgggagatgatcattggcaggctctggaaagagtaatgcgctatctaaagggcactatgagctatggaattcactataccgggtatccaaaagtactagaagggtatagtgactcaaactggatatctgatgctgatgagataaaagccacaagtggatatgcgttcacacttggaggtggcgctgtttcctggaagtcttgcaagcagaccatcttaacgaggtcaacaatggaagcagaacttacagcactagatactgcgacagttgaggccgagtggcttcgtgaactcctgatggatttgccggtggttgaaaaaccagtgccagctatcctaatgaactgcgataatcaaacagtgattattaaagtgaacagttcaaaggacaacatgaagtcatctagacacatcaagagaagactgaaatctgtcagaaagcagaaaaactccggagtgatagcattggactatgtccaaacggctagaaatctggcagatcagtttaccaaggggctaccacgtaatgtgatagacagtgcatcgagggaaatgggcttgatacccacctaa

SEQ ID NO: 39668 - DNA, 716 bp, Oryza sativa
  unsure (1)..(716): unsure at all n locations
  Clone ID: PAT_MRT4530_43185C.1
ggatcttttttttntctttttttccatnctctatacacgcatccggggttgaactctctatgctctatgcagctctatacatcctcgaacacctctacaccgatcttaacacccctgggtcaccccgcacatcgaacttgaactcggacctcgaacccttnngcttttttnnacccacctttctggaaccccacctctaataccctaactctacacaacttcaccgttaacccnccgaccccccccnccacacgggtgggggaactcggctccctccgcgacgcccacttgtacgtaccgcttaacggacnacgactatcccaccactatttgggacttggggccacagtttatacacgggggccacgcgacanacaggctctggacgcgctctggacgcgctctcgacagattctngacttccacacgatatagacaacaccacncccgacaccctgggctcggcacgcgcttggtatcgattttgnctctgncacacacacatttcgcgccctctggacacaccgcgctcacacctacacactttgggggcccctcggggatacgctttgacagacatnctgattttgnccgcctctacccacgggccctcgaacagacnctgtntttggggccacacccacacatgnggtgtttggggcctctgggcacatctgaacaaccctcttgggggggttgttttgggttgtttttta

SEQ ID NO: 39669 - DNA, 1362 bp, Oryza sativa
  Clone ID: PAT_MRT4530_43186C.1
atggataccaaattgggagcgcttgctctcatgctcccgcttctactgctgatttccgctactcgcgtagcctacggcggcatccaacccacgccgcctcccgcgagcttccaagccgccttggtccgcatcgagcccgcaggcatcaactacacgcgcgccgtgcagcgctcccgctcccgcctgtccatgctcgccgccagagcggtgtccaacgcgggggcggcgccgggggagagcgcgcagacgccgctgaagaaggggagcggcgactacgccatgtcgttcggcatcggcacgccggcgacggggctgtcgggcgaggcggacaccgggagcgacctcatctggaccaagtgcggcgcctgcgcgcggtgctcgccgcggggctccccgtcctactaccccaccagctccagctccgccgcgttcgtcgcgtgcggcgaccgcacgtgcggggagctgccccgaccactgtgcagcaacgtcgccggcggcggcagcggcagcggcaactgctcctaccactacgcctacggcaacgctagggacacgcaccactacacggagggcatcctcatgacggagaccttcaccttcggcgacgacgccgcggcgttcccgggcatcgcgttcgggtgcacgctccgctccgagggcggtttcgggacgggctcgggcctcgtcgggctcggcagagggaagctgtccttggtcacgcagctcaacgtcgaggccttcggctaccgcctctcgtccgacctgtccgcgcccagccccatctcgttcggctccctcgccgacgtgaccggtggcaacggcgacagtttcatgtccactccgctactcacaaacccggtggttcaggaccttccgttctactacgtcggtctgaccggcatctcggtcggcgggaagctcgtgcagataccttcggggaccttctccttcgaccggagcaccggggcgggcggcgtcatcttcgactccggtaccacgcttacgatgctcccggaccccgcgtacacgctggtgagggacgagctgctgtcacagatgggctttcagaagccaccaccggcagcgaacgacgacgacctgatctgtttcaccggggggtcgtcgacgacgacgttcccgtccatggtgctgcacttcgacggcggcgccgacatggacctgtccaccgagaattacttgccgcaaatgcaaggccagaacggggagacagcccggtgctggtccgtggtgaaatcatcgcaagccttgacgatcatcggcaatatcatgcagatggacttccacgtcgtgtttgatctgtccggcaacgcgcggatgctgttccaaccgcccaccgcctga

SEQ ID NO: 39670 - DNA, 873 bp, Oryza sativa
  Clone ID: PAT_MRT4530_43187C.1
tcgtaatcatctacatccattcatccagttaagttgattttttaagctagctttgccggtgactgaagagaatttgttggttaattaaagtgaggatttcgccgggatcgatggaggggaggattagcagtgcaacgctggtggtggcagcggtgttggcgatgctggtgctggtgccggcggcggcgcgcgccgagcggttcgttgtcggcgacgcggcgcggtggacgtggggttacaactacaccgactgggtcatcaagaagggccccttcttccaaaacgacagccttgtgttcatgtacgacccgccgaacgcgacgacgcacgcgcacagcgtgtacatgatgcggaacgcggcggactaccagtcgtgcaacctcaaggcggcgaagctggtggccaacgtgatgcagggcgccgggtcgggctacgagttcgtcctccggaagcgcaagccccactacttcgtctgcggcgagcgcggcggcatccactgcaccatgggccagatgaagttcatcgtcaagcccaagagctccgcctgccgcgacgactgacccggcccccgcccacccctctccgccgccggccgccgccaccgagatgttgggttggtcgccgccggccatggtgcggctgctagcctacgtcgatcttcttcttcttctgcatgccaccttctgggagttctggttcgatatcagaacatcattgtgctttgataatattgtaagttattaattgcaatatatactatatgtctaattgtgttgcgttgcgtgtggtgtatttgtatgggtcattcggttgaaataaacgatcgagggattaattgtactgcgcatgttcgtggcgtgtgttgatttttgt

SEQ ID NO: 39671 - DNA, 181 bp, Oryza sativa
  Clone ID: PAT_MRT4530_43188C.1
tttttggttttttatgattagtgggttacaataatatattttatccgagatagaaataatccaaactatagggtagacaaaaattacactgccctaatggcgtgcactcggccaaattacaaacacaatgcttttaccagggcagactaaaacaggaactacaaggtgcataaatcactga

SEQ ID NO: 39672 - DNA, 1206 bp, Oryza sativa
  Clone ID: PAT_MRT4530_43189C.1
tgaaaatatttcatgtttctgttgtcttgctcgtataaattttcatggttattggtattgctgctgctgctgctattattattattattattattattattattattattattattattattattattattattattattattattattattattattattattattattattattattattattattattatttactattacaggctcaacaccacagaagcaatccggaagacttaaagccaattcgctgacagatctcgtcgagcctctctcggaaggaatctcgtcagtaatcttagagttttgttgttctctcttatactctgtggtttattctataatcccatataaattcactcttaaattttcaaccttaaatttgaagctgatttggggtttttcgtcgaagtttattttttagctttgcttttagatcgctaagaacccgtatataaaggttttatccacaaattattttttgtttacaaatatgccgtttgtcttattttacaaataagccaaacgatgcgagccttcggctatgttctttatcctaagttcccaactcatattccttatttttcgtgcgcacgcttatcaaattattagacggtgcgttttttatagagtgttttttttttgatttttcatttattagattatttgtggaggaatttgtagtattaaaatctgataggagttttttttcgttttgtgaaatagaggattgaagctttgttgaggagggtagtcccacacgccagagtctcagcttgcctcgttgtcactcaccaactctctttcttctccataaataccacctccttctcactgcgtgatatcaaaggagttcgagcagccattgttgggggataatggctggaaggcgttgatgaagcaattggccatgatgatgagttctaccgtgttatgattctccctttttcaaaaaaattaagttcgccgctggtcgttttgtttcagcagctgctcctcctcctgcttgtcgtgtgtgtgaagtgaacatccatgtgtttgtaatctgtttttaaatcgagggatgtctcatgtgtttagcctgtactcccatttaatttagcgacgataagcatcgatgcccgcctctcctatctggaatatactccctccgtcccaaaataagtgcagttttatactattcacgttcaacgtttaaaaaaaagaa

SEQ ID NO: 39673 - DNA, 344 bp, Oryza sativa
  Clone ID: PAT_MRT4530_4318C.1
gtcacaatgcatgctctctatttatctgcaaacatggcatatcaacaaagaggcatctaccataaaaagcgcctatgttccacattcgcgcgtgacaaatcgtctacacactttacatcgctgtgagaggggacagcggtacacacactgtgtactctgtacacaaggacgagcacgggagggacataaagacgcatggatacgaacggactgcgcaattgcacgaacgaaggatgcacaaaactcaaatacgatggccaaacacgtgtaggtcagtctgtgccttgggagggtagtctagccagcaaggtatcgaaaatagaagccgtggctgtgtgctgcgc

SEQ ID NO: 39674 - DNA, 316 bp, Oryza sativa
  Clone ID: PAT_MRT4530_43190C.1
cgttccgcggccggggggctcgcatgcaagcctagctagcttcacattcccttcctttccccgcattgctgcgagcgacgctgcttctgcttgcttgctcgtgcatggtggcttcttcttcttcttgcgccggtttggtgatccttgttgcgccggtttggtggtgatccgatcgaggacggaggaggagcgcgcgggggatccgagtggtgctggggagagtggtcatatcatagatgctacagtagaagacgcagaaaagatgccatcccagttacgaactcgcagtgacagttcagcgagagtattcatgtct

SEQ ID NO: 39675 - DNA, 159 bp, Oryza sativa
  Clone ID: PAT_MRT4530_43191C.1
atggcaatggatagagatgccaattgtgccgttcaacgcacaactgaactggaactggataggaaggctgccaggctggaagggattcctaggcttctcatgaaatcaaaatcttctctaaataatttagcttttgatataaattctaagaagctatag

SEQ ID NO: 39676 - DNA, 3438 bp, Oryza sativa
  Clone ID: PAT_MRT4530_43192C.1
cgctgcttctgcttgctcggctcgcggggccgccgccagatgcgatcttctccttcctctccgatcctctccttggcccccttcctcccgttgctagctcgtgcatggtggcttcttcttcttcttgcgccggtttggtgatccttgttgcgccggtttggtggtgatccgatcgaggacggaggaggagcgcgcgggggatccggtgatgggagaaaagctgtgaaatgagatggtggtgatgcgctactccccgaggtgcaggtgtgaatgcagtcataatattcggcatgagatctgtctctgagctggtgtggtctccggatgagggtttgagcattaaaattgcagcgtccagcttaagtacaaggaaaacttctcttcattggaatgcagataccttgagcatagtaatatcttcacctcaacagagtggtgctggggagagtggtcatatcatagatgctacagtagaagacgcagaaaagatgccatcccagttacgaactcgcagtgacagttcagcgagagtattcatgtctagcccaagtagaataagaaacactgatgctcaacaatctacttctataagatcacatgggcaagattcaaaatactgtggtgggatggatgtgatgaatgaagggaaagaaacgtctgacaacttctgtgtggataagctggagaaagaggacgaagtgggtagctgtcccacaagatactgcaacgatacttcccacagtctaggttcagcttccagaaaagaggtcatgcctattattgctgaaaaacaggctttctgtgcaactactgtccatgatgaaagatcttgggcagctaatgcttggcgtgctcgattagtaaaagcaattagtcagaaggactctgttttgccaaagaatgcagacaatatacattcaacttcggcctttgggagcattggtaatacagaaaacatgcctggcaaattgacaagtatgctaggtaatagaaatgacagtagccaagatcaggctatgcaggaaaagcataaggatgggcttattgttgctagatgtgagtccgtgtctgctgtgaatcctgttgctagatgtgagttagcatctggtgttaatcctttagcaagacatgagtcgacatccggttgtaatcctagaaagctcgagaaggggaaagaaaagcttatctatgatatgagtaattgtgttagcaacacaaatgaaggtgatgacagcaatgagagtatagagagctgcccaagtacaaaagctccgaagcggaagcatggtcaattttctgcagctgagatgacgtctggaaataaaagatgtagaagggaagataatgagagttcttgttcaggattattccacaaaaatgatagctctttctttaactggatgtcaactctcactaatggagtaaaggtgtttgatgaaactactgctgttccacttaatcagaagttttcagcagctacaggagaggaatttccaacaaaccctgtgccacttcaaaacaactgtggtgttccgctgcaatccgttggcttcaattctctttttcaatctctttatagtcagaatgttatgataacttcaagaaatacctgtcaccagtcagaaagcagttacaccgccaacaggctaacactgggtttcaagagtagcaaaccagttagcatgggcagagaaactcttaatgtggctactgagactttagctgcgggcagaattcaaatggattcttatggtgacagaggggcatttcaaaatcaaatgggaattttccctttaagagcagaaagaaatcagaatgggttccatggaagctcttcaaatgctgcatcgggacataaagatgatttctcagaaagcttatgggtaagtagacttttgccaaaaacacccatgaaagtgatggacacaacgcgctgtgatgaagaaactgatttttgttctgctaacccaaaaggtttaggtgatagttcatcaccgcaggattttaatgtggagaaggaattaaacaattcacaatactttactagcaaaggaagtgacaatgaaactacaagtagcaaatgtgcggcgcctcaagacgaaaataaaccatcagaaacaatggcatcaatttttgctaaaagattggatgcgcttagacatgcaaatacatcagcagtacatgtggccattacatgtgaccatggaacacccaaagggcgtaatcacaaaacaagttcttttgttgttagttacaatagtcatgatgagcaagaatctggacaaaaaactcacaagtcttctggtggagaaggaagaatagttttatggacaggtgacaaaggtaaggaacaattatctcctgggaatgacaaagaattaggagaaaaggttttgtctaagcatgaaaatcagaattgtgaagggagctctgatggaaaggtggtaccccctaaatgtaatttagaaacaaacacatatattgaagaaattgatcggaagagactacaaaataaagaaggagcaccaaattccatggagaatcagccagataacaaacaaatggtaccttatggtattgtgcccaatgatgtttatgacgaagcaagtgtagtttttggagccttgcagaggctccgtttgtctcgctccgatataataagatggatgaggtcaccagttatgcacaccaccttagatggctttttcttgcgtctacgatttggtaaatgggaggaagcattgggtggcactggatatcatgttgccaggataaatggagtactggataagaatcgcctttctgtgaccatcaggaattcaacttgccaagtagattctcgctttgtatccaaccatgacttccaccaggatgagctgaaggcatggtggtcagctgccatgaagagtggctggaaactgccttcgcaagaagaactcaatacgaagctacgagaaagagagctgcttcgtttttgaaacggaaaaggcacagacgccccagctccagatgacagatgccaacatcaattacagaggtttttctcttgcttgcctctggtctgaaaacgccagcgatgcaagcatcatcactaccggtcaggctaattaagttctgcactgtactgctgggattgctatccccacggttgatggtatattgagagagaaatcaggctgccgtttcgtgccgtggcgtaagcagcttgtattgtattttaagtacacgatttgacgatttgatttttacgatcggatgagcagttgcacgagttgttaacttgttattgctcatcctatctgctgtaaataggaagctactaacagtcacagtgcagtgcaatcgtacaatttgtactactgctgctgctgaatataaatacttcctgaaagaataaaaaaagttatgctggctgccaaaaaaagcaaaaaaaaaaaa

SEQ ID NO: 39677 - DNA, 724 bp, Oryza sativa
  unsure (1)..(724): unsure at all n locations
  Clone ID: PAT_MRT4530_43193C.1
cccacgcgtccgtttcagtggattctgaaggggcagactttaaggccttagtatttgaatacatgaagaatgggaacctagagatgtggttacatccaaagaaacatgagcatagtcaaaggaatgccctaacttttagccaaagagtcaatatagtcttggaggtagcatttgctctggattatcttcacaaccattgtgtacctccactaatacattgtgacttgaagccaagcaatattcttttggatcttgacatggttgcatatgtcagtgacttcggttcagcaagatttctatgcccaaaatcaaacttggatcaagagagtgtaacaagtttgggttgccttaaaggaacagttggatacatcccaccaggtgagataccttctttttgtaaatttttttttcccaaagacttctttctctaagtctttttcccccacagacatgtgcacatgcacatattgtgcctattctgatctaattttatttatctcttaatctaaatgcagaatatggcatgagcaaagaaatatcaacaaaggccgatgtttatagttttggagtgattctattagaaatgataacaggtattagcccaacggatgaaatttttagtgatggcacaagcctgcatgaacttgttgctggagaattcnccaaaaattcctacaatttaaattgatcccaccatgctacaagatgaaatagatgcaactga

SEQ ID NO: 39678 - DNA, 268 bp, Oryza sativa
  Clone ID: PAT_MRT4530_43194C.1
gctcgctcgctcgctcgcgctcacccgctctctttccccttctcggctcctcccccgctgcagcgccggtggggggtggcccccacggtcgccggcgaccggaatcccttcaccgccgccgccgccgtcggccgtcgtcgcccgtgttcggtcccgccgcgccgtgacgcgacgcgacatttttggactgggacttgccatgatctagtggagggaattttcggtattggcactggttggtggggtggatggatggatgaataaagaa

SEQ ID NO: 39679 - DNA, 534 bp, Oryza sativa
  Clone ID: PAT_MRT4530_43195C.1
atgtcgaagaaaactgttatcaaagctgacctcattggcagagcatgcaagagtgagattttggcgattgttgccacgatcaaggggatcaagtccatggacattgatgcggagaagtgcacgctgacggtggtcgggatcgtcgacccggtgcgcatcgtgcgcaagctgaggaagaagtgcttctccgcgtgcatcgtctctgtggaggacgacaagcccaaggaggaggagaagaaggacccctgcaaggaggccaaggagaaattggagaaggcttggaaggagtactgcgagaagtgcaacgtcaagctcaagccaggctgcccctgctcctgctctaccccctgctcgttccctcccatcggctgccacgaccgcggcatttgcccaccaccttgcccgccaccttgcccgctaccttgcccaccaccttgcccactaccttgcccaccaccttgcccgccacgggggtatggctatggctgctactatgaggagagatatcccgggggagaatgtgtcatccagtaa

SEQ ID NO: 39680 - DNA, 832 bp, Oryza sativa
  Clone ID: PAT_MRT4530_43196C.1
atggatccggcgtccgaggagctcgagcagcgcagccgctacctcagctcgctcatccgccgcaccaagctccacgccgcgccggcgctcgccccgcccccgcccacgcctcccccggagcccgagacgaagctgcagctggagatggagccgcagccggagcgagtcgaggaggccgccaagaagccggcggcggtggccgccgtggtggagaagagggaggtcaagggagggggtggcggtggcggccaagctgggaaggggaaggggaaggagaaggagatggagaaggggaaggaggagaggaaggtgtcggtccgggtgcgcgcggccgacatgccgctggcgatgcagcggcgcgcggtccgcctcgccttcgacgccgtcgccgccatgccgcggctcgacagcaagcgcctcgccctcgccctcaagaaggaattcgacgcaacatatggtcctgcttggcactgcattgttggtacaggctttggttcctatgtcacccactctgtgggaggcttcttgtacttctccgtcgacaaggtctacgttcttctcttcagaaccgctgtcgagccattaggccatccacaatgagatcaaaaatcgattcattacaaggtaaaaaattgctgtgtattatatgtatctgacgtccaaagagccgtaggaatgttaagggtgagtagaccaatcgtggctctcacatggaaattaatctgcagccagatgtaaacatttggcatccaatccatgaactcctgcgaagcttttagttgaaaaaaaaaaaaaaaaaaaaaaaaaaaaaaaaagagggggggcctcgtgc

SEQ ID NO: 39681 - DNA, 438 bp, Oryza sativa
  Clone ID: PAT_MRT4530_43197C.1
gtgttttttggtaaaagggggaattaacctatgagtgctgttgaaaatcacactgaagagatcgcgtggaattaaagacgctggtacaagttaccatacgcatgatttgattacgggaattccaaaaaactagtaccgctgacaggactcaattattaaaaagtacaggcttagattattgcgacaaatgcttttgataccggttggattggacgcttgataggcaaaccacactaaaaaccatagatatggatacgggggatgtccaatgggaagtttagcactgaccaaaggtagaccagcgcttgtagttcttgacctgaagggtctccaggcaccctcggcgagccagcatgaccctggtatgtccaaaggatgcctagagacgggcttgccctggcgtgaaggacctctgcgcctcccaggttcttgacttgc

SEQ ID NO: 39682 - DNA, 421 bp, Oryza sativa
  Clone ID: PAT_MRT4530_43198C.1
tttatatcaagtaagccaagttatcttatactagcagggacccatattttcatgggttggttccaaaatgtcttctcctggcatatgcgtgggtcatgatcattattttgcattggttagtcaagggtgatggcctgttctgtgttagtgatgtttttgcaattgtcaggacttctcagggtgtcatcaaggaagcaatttgcatgtgtttgatgaatagtatgacactaatagacaacatgttgatgtgaaggcagcacatggtctgaagaacctgaacagggaaggtgtcatggccatcatcttcagtaaacttaccaaattattgctgagaggcagcttatttcttattttcagtatactcctactaactttgaatcaagtttatttctgtattgccagatccaaagaaagctgtatc

SEQ ID NO: 39683 - DNA, 1224 bp, Oryza sativa
  Clone ID: PAT_MRT4530_43199C.1
ttttcctcccttctcacactccaatccatcctccctctccaccctccaggctccagctatgtccgcctcgcccgagttctacaggccctcgccgccggccttctcgccctcctgcgccgccggtaccagtaccacggaggtcgacgagtacagctgctgccggacgccaacgccgggaatcagggagccagccacctgcccgccggcgccccggaagcccaggccggtggcctgcaggaagctcctcttcgacccagctcagcagcaggggaaggggaaggccatcagcctgcgtctcgacgagctggagcgcctcttccgccccatcaccaataatgccaaccttcacctccaaaccaacaagcccacccatacctgacctcactgcacttcaacttcattcatccgagtgcatactagtactattatatactaaatgcttcttcttcttcttctttggataatcaatctcttttcgctttaatttcctcttactactaggattagtagtagtaggattttagtctaggagtaatcgttaccgccacgagctgcagtgttgtatttgtatgtatgtatgtatcagcaatcaagccaagcttcacgtaagatcgagcagtgatttcagtcagtatgtatgctcaattgcagattctgggatcgtggagaaaaagctttttgtctctattctcagggctgctccttttattgagaagttagagatccatttttccatgaatttattaatactggatgaatcgcatgaggaccatcctatcaggcaacaacttggacgctgtgaatacaataacctgaagaacatgcgtatcataggatataaaggttcaagagatcaggtcgaatttcttctacatgttgtggagaatgcccctgcacttgaggttttaactctagaggcagctggaatagagtaccaggaggtttcatttgtgttgaatgaagcgtggatcgacagaattactcagagtgccgatagatctgctctgattgctcaacagtatctgagggagaaacttagctcaaagacacagctttgtattaagactactagttccagatagagctagcgctctatgcaagccatgtgaaaatagccattagtgtaagattaattaaataatattattataaacttgaaaataattgagtttatttgatttttctagttctctctctcctcgtgccgaattcctgcagcccggg

SEQ ID NO: 39684 - DNA, 502 bp, Oryza sativa
  Clone ID: PAT_MRT4530_4319C.1
cacaacacaggtccctcgatgggtgacccggagttattgtcatgagccttaaagatgctcacaaatgaaaatggtgaaatgggccccagttgagatgataaaacttgctcttatgtgcgtggacagatctgtgccaatggtgctggtgccacctggaagtggtgcttatgagagaatgcccatgatgctcggcttcgttggggcttggaattacatgcctattgcaggtggaattgcatcggatggctgctagtgcaggcagtgctagcatacgaggcgtgcccaaggtgcggattgccccgggccacagaagataccactgccagtggtttgttgcacaacctgagatggttggatgcccttggggaaaacgttcataattatgtcgaaaaatatgaatgaagaataagagaagaaatcctccagttggaatatttctggaagaaataaatggaaaaagaaataaagagacctgatccgggaaaaaaaaaaaaaaaaaaaa

SEQ ID NO: 39685 - DNA, 789 bp, Oryza sativa
  unsure (1)..(789): unsure at all n locations
  Clone ID: PAT_MRT4530_431C.1
atggagttcctagccaccctagccctcttcctccccactgccgcacctagccctgctgcgccgctgccttgcgccccgcgcgccatcgctatcgccgtcaccgcgcgccgcgcgccgtcatcgtcacgttgccgcaccctcgagccccgcgccccgtcgctgccgcgccgctcgcttgtcgccgtcggcctcgcgccccgagccgccgcgcgccccttccctccgcgcgtgctgtcgccgtcgccccgcgtcgcgccccgtgccgcgccgcctcgcgccccgcgcccctgccgcgccgcgcgcgtcggggatnctncaagagacgacgggcttggtcagccccgacgcgccgcgccgagcaccgtgccgctgccgcgccatcgcgtcactaccgtcgccattagcgcctcgagccccgcccgcgccgcgcactgtcgccgtcgtgcccgccgtcccgtcgccgcgcgttgccatcgaccccgagccccacgacgccgcgccatcccgtcaccgtttaaagccggtcgcccctaccccgtgccctataaataccacttccgtttcccttccctccccatgccatttcccctcttcttcttcttttttttccccttttcttcccctccaccgacgccgcattccgccgccgcgccgccgctgccgtgccccgagccccacgacgccgctgccgtgccccggcgcctcgccgccgccgtgccccggcgcctcgccgccgccgcgccgcacctcgccgccgtgtctccaccgccgtcgccgccggtccggtaa

SEQ ID NO: 39686 - DNA, 193 bp, Oryza sativa
  Clone ID: PAT_MRT4530_43200C.1
gactacactatgtgcactcttcctcaacactagtattgaaaaatcagaactggtagcatacaccagtacgatctttgccctgtttgccttaactgctctttctgcacccgccctactgcattaaccactatgcattatttcccaccaacattaaccatggccaccatggatcccggacggcagtgcatgatgc

SEQ ID NO: 39687 - DNA, 281 bp, Oryza sativa
  Clone ID: PAT_MRT4530_43201C.1
gggccaacccaaagcatttaaatgcgagggtgtttagtaaagttacatgacactacgaggtgtggcagtcctgtgcaaatgacaggactatctgcaaacacaaccgacaggaaggatacctcaactcgcaaaccatgctccaggggaacaaccgatgttaaacacattcaacgggatcaagacgaatttttaccagcctataccaacaccttatcagcggctaacatccgatggagcaagcccagaatgtcgttatgtatactcacattgatctggaggta

SEQ ID NO: 39688 - DNA, 647 bp, Oryza sativa
  Clone ID: PAT_MRT4530_43202C.1
gttaatcacaagggaggatttggtggtgaaggccaagggattggcattgcagggggctgagatcgcaaaaagtctgctgtctagcagcacatcggtgctcggtggtagtgccaatctgatgttatccattactctccacattgtctctggtgcagctgaggtgctcaattttgtgtcacagttgatggttttcttgtgggtgctgtactacctcatcactgtagagggaggtggggctacagagcaggtcattgatcttttgccattgtcaaaacaagtaaaggatcgatgcgtcgaggtcatcgaccatgccattagtagtgtcttgttagccactgccaagattgccattttccagggatgcctgacatggctgttgttcaagctcttcaaggtgcattttgtgtacacatcaactgtgtttgcaatcatcagtgcacttctgccaatactcccaccatggttgtcctcgatatttgccgcagacagctgctcatggaagggagatatgtgctcgctattgtggtgacagtggttcatctcataatcatggattatggaactacagtcattcaggagggatatacccggggtacaatgggatatctcactgggccttagcataattggtgggcatgggcattgtt

SEQ ID NO: 39689 - DNA, 383 bp, Oryza sativa
  Clone ID: PAT_MRT4530_43203C.1
ttttgtttttttttttttttttgggtttttttttttttttttttttttttttttttttttttttttttttttttttggaaaagaaggaacgattcccattacaacgggggaggggcaaacaaggttaagggcccacagatttttcaaaggtcaaggggggccttactttagggggcaaaacattttattggggggatgaccagcactgtttaaaggtcctggggggaaaaaattgggcagggggggaaatgaaacggggaaccccaaaccctatttgggactggctctaaagggaagggggggggcccttgaggggaggggaacgggtttccagaacctctaaccattttttaggggaaggggaaagaaaagccaaagcttaa

SEQ ID NO: 39690 - DNA, 282 bp, Oryza sativa
  Clone ID: PAT_MRT4530_43204C.1
atgtcgtcgaggggaggaggcgattccggcggcggcctcaccggcgggaggaggccgctcgtgcagcaaggccatgagcaggatgcctttgccgcagcaaggctcagccaacgagcgcagtgcagcaccctccgttgccactgcggaggcaggctcgggttcgccaaggttcggggcgaggcgtccatgactccatgccttactcggctgcgcccggtgagttttttcagtcctgaaatttccagtggggtgagggggaggttttgtgagcaacagtactag

SEQ ID NO: 39691 - DNA, 285 bp, Oryza sativa
  Clone ID: PAT_MRT4530_43205C.1
atgccgctcctcggccgcctccccacgcgcacccgcccaccgcctctcttcctctggtgcttgctcgtcatccagaacatgagccgctacatgcgcgatggggaggctgcgtctagcgacgagcaggaaggcgaggtccctgttctccatgacgacgcagccgaggcgggggaagacggcgtagtggaaggggcccgggtgcacggcgaagacgcgggacacggcgccattgacgtcgccaccaccgcgtccctccggtgcgaggtgcacgttgacgagcgctag

SEQ ID NO: 39692 - DNA, 1672 bp, Oryza sativa
  Clone ID: PAT_MRT4530_43206C.1
tttttggtgttttttttttttttttataccaacagaattgattgatctctctcatagaggaggaagaacttgcaagggaggtaggtaccaacaaattaattaacaaaaaagcattgaaaaatatctggaataaggcaaaaaagagaaaaaaagggagaggaaataaacaagagaaagggagacgggagaatttcgcaaaaggatctaagcccgcgcgtctgtgctgtgcatgcatccatccatgcatgcgatgtgatgcgtagctgcgcctgcatggctcgctctggacgccgcgtgcgccgcttgatcagcacacgccgtagtcgcggaacatgagctccggcctcccggtcgccgcggcggatcccgcggcggcggcggcggcggctgctgctgcggccgcggcggcgtcgcggtggctgccgcggatgatgaggagctccttctggcggcgcagctccatgaccttgcggtgggagttggagtgctgcgtcagcacgaacgtggggctcgccgccggcctgtactccggcatcagccgcccggacttgaacctcacgccgcacgcgttgcacagggtcttggggcccaggggccccgtccgccactgcggcgtcttctccgacgcgcagtgcgtgcaccgccgcacgccggcctccatgcccacctccgcccccgcggggccggggctcttcttgccgcggctgccgcctcctgagccgttcggcctcgcggtgcccgatggcttgttcgaggacgggaagtcggacgacgagcacgacgacgacggcgacgactgggacggcgggcgcgggacgagggagtgccacgcggcggcggccgcggccgtcgcgcgcgacctcttgctacgggcgccgcggccaggcgccgccgtgaggcagctgtcttggccggccgagctgccgccgccgttgttggccgcggaagcagccgccgccgccattgcggcgtgcgcggacgactggtaattcggcatgtcggagtaggagtcgtcgacgaacttggatagccactccagctcggcagcgtcctcggtgggtatgtagaagtcgtcggcgaaggagagcatcgacgtctggtgatctgacgacgtggccgacggcgtggcgcccgacggctcgcccatgccgccgatgtggtggtggtggtggtgcccgtggtcacctgcggcggcggcggcagcggaggccgggaagaagtcgtgggcgccgggagtgttggagaggtcgaggaggtcgtcgacgcgcatggcgtcgcccatcgccgcctgatgaggcatcccgtagtaatggtggtggtggtggtgcgcggcggagtacccgccgccgccgcctcctccgccgtggtggcccatcatcggcgcggcggcgatgccaccggaggcgttgtggtacgtgctcatccccatgccgaggtcgacgcccatggccatttcccactccgacgccatcgcgagctagccactgccttggccgtacgtaccacacggtcacgttctgaattggcaagaagctggttgtcactggagttcccttgaaacgggcagtgcaactaccgcccgtttgatgcagtacgagctagagctatctatctttttgccactagctaagtgagtgtagtgatgactgatgagagggccggctccctgcag

SEQ ID NO: 39693 - DNA, 311 bp, Oryza sativa
  Clone ID: PAT_MRT4530_43207C.1
gtcacaaaaacattgtgataaccgatgtaggcgtacactattgaacagacgaaaacaccaaactggtgagatagagaaatacaagagaggaactaaagcgaactagcgggggaacacagcggaaataactgaagtcatgcgcattggaacagacacctatcggatctgacaggacacctgcactggaaaattgttacattaaccttgacatatcacagcgatggaaatagcattttaagatgaagctggctgtagcttcaacaggtgcaggctcagaaagacacaacgaggtctggattgaccgactttga

SEQ ID NO: 39694 - DNA, 438 bp, Oryza sativa
  Clone ID: PAT_MRT4530_43208C.1
ttcttcagcatccttcaactattctttgtagccattggatacatccctgaatcaccgcactcgctcatcacaaaaaataggaaggaagctgcaagggaagtcttgtgcttgttctatgagtaatccttcgtcgatcagatggtggaggacagagagagtgccataatcaatgctaaatcagatatggatgagaataaggtagtatggactgataaaggatatatgattggcatcattctttcagtactgcaagtactgacaggaattgcatcttttgtcacccaggccggccacgttatagcctttaccttcaaatcaacagcgattgggctctacactcccattctcatcactatctctcaactggttggtactttcttatcagttccaatgcttaagtacttctaatggaggaagatgaccatcattggtggtttt

SEQ ID NO: 39695 - DNA, 441 bp, Oryza sativa
  Clone ID: PAT_MRT4530_43209C.1
aggggtttcgcccaattcttaaaagagttaactcatggttaccctttttgtgttttaggctcaaattgttaatggcagccagcaaagacaatgatgtccaactagatatttggttgatgcatacacactctgtttgagttttcctcttcattgttaaatttaactggctcatgtccatgtgacaacatattgcttggctggcttatgggggagtgaattggtgagtaataagtattgtattagacattttacttggtctaccactctcccaatttttgcatcagcaggaacttgtatattctatgccctatatgcatcatctgcctttcgccatatacttggatgttaatggcaccaagatgccaggaaagttgtgttactaatgccgtatgttaagaaactaatcctttcttgaatttttaaaaaaaaaaaaaaaaaaaa

SEQ ID NO: 39696 - DNA, 264 bp, Oryza sativa
  Clone ID: PAT_MRT4530_4320C.1
atgtacggcctcctcgccaacttcaagaacatcttcgacaagttcaccttcaaggattcctctgctgccgccaaggattacgagaagaaagatgaggctggcactgatgcggcaaacaaagctgcaggatctgattctgacgacgatgacaagcaggggacacggcaaaaagaaggaatatttgaaagatatgtgttttgcttatccgtttgtttgcaatggctaaaatgtggattcgtcaatcatccggtcattagaatttaa

SEQ ID NO: 39697 - DNA, 200 bp, Oryza sativa
  Clone ID: PAT_MRT4530_43210C.1
tgaagatcatttttcgtatttgctctccttgctattgttgcatgcaatgctctcgccggtttgatcctcttagtcaaagttatagagaatatcaactacagtcgcatctcctactacagcatcaactacagtcgcatctcctactacagcaacaagagctagcccatgcagtaggttcgtaaggaacagatatcgatagt

SEQ ID NO: 39698 - DNA, 175 bp, Oryza sativa
  Clone ID: PAT_MRT4530_43211C.1
cctgcagtaccgtccgatttcccgtcgaccacgcgtccatgcataggagaatgagactgagctctgctccatctgcgtccacctcatggcgcccggaccaacaggccgggttcttcccggatgtacccaagcctttcaccacaactacattcaacgaaggagaaccatatcttca

SEQ ID NO: 39699 - DNA, 732 bp, Oryza sativa
  Clone ID: PAT_MRT4530_43212C.1
atggactactccatggcgacattgtggccgccggcgacagcagcttgcacggagaggaagatgggcaagccggccgacggatggggaggagtccgccggagcgaggcgggagaggaggaggcagtgggcgacaaggcggcggcgacgacgacaacacgggaggactgctcctccgccgcggcccggtcgccccacagcctcctcagcacagtctgccacggcatcggcctcgtcggaggcgagcgaggcacgcgcatcccacccaggtcagtgctccagtgtcacagcctctcctccgcctgggccgccgcgctctccttcgacaccttcatcgaccaccacctccgtctcgccaaccgccgatggggtcccaagctttgcatcccgccggaatcggcgttcgccgacacggtgagtgcgtggtcgccggagacgcctaggaacgcgacggcggcggcgtctgggaaggcggcgaccgggaaagcgttgctgtcgttgggcggcactagaggagctcgggcggcgccagtgtcggtctcgccagttgtcgcgtcgtctcctctcccgccttgcgccgctagcctcgtgtggctcttccttatccacttcgggaagcaaaccgtcggagaggatgcggtgaggagggattcggcggatggggaggatggaaggatgcagcggaggagggaggggagggaatcggagctggagcccgcggcgatgagggagtag

SEQ ID NO: 39700 - DNA, 1014 bp, Oryza sativa
  Clone ID: PAT_MRT4530_43213C.1
taagtgaaggaagctgattgcggttgatttaagttcccagcaaacaagattgagaaaaaggctacaacatggaaaagtggccatttgttgtatgggggaagctgattgcggttgatttaagtatcccagcaaacaagattgagaaaaggctagcaacatggaaaagtggccatttgtcgtatgggggaagagcaatccttccaaagacaacacatcataagatggataatttgagaactagattttttttggaatgattggaaaacaaaataaaatatcatatgattaggtggaaagaattatgtaggcccaaggacctagggggtttggatttcataaacaccaaggtaatgaatgaagccttattgtgcaagtggattttcaagattgagtcagaggggaaatgacccatgctgtagacttctcagaaccaaatactgtgcgaagggaggtttcttccaatctactgacataggggtttcacaattttggaagggggctgcatgagttcaaacattggatgagagcagggagtaaatacaaaagtgagagtgggagatccgtatttttctgggatgatgtgtggattggagaaactccattgaagattcaattcccatatatatatagtatatgtagggagccaagggcagcggtcaagcaaatttgtacaaatggggagtggaatatagaactgcaaggaactcatggagaagaggaccttgatgaatgtaatggtttgttggagatcttaagggatgttacacttacagaagaaagggatgtaatgagttggagcttgactaaatcagggaatttcaccacaaagtctttatacagggaaataatctctgggtgtgtaagagatactagaatgcaggaaattttgactatcccagtgccatataaatcagaatggtaaaagggagaatacaggcaaccaaacaattaaaagcaatgaaatggcctggggaggtgtcatgcaaattgtgtggatccggtggcggtggctct

SEQ ID NO: 39701 - DNA, 2770 bp, Oryza sativa
  Clone ID: PAT_MRT4530_43214C.1
ttactcctctctctcactcttccggtcttccctgggcaagctggccagctgggcgtggcaaggtgggacgggaggagggcggtagcggccggtgacggccgacgtggtggcggtggcagccgacgacgagcggcgtgggagaaggagaggcagcggctcggtggtggccggtgacgggcagcgtgggagaaggagaggcggtggctcttccgcatcctctccgacggtttgcttcccgaagtggataaggaagagccacacgaggctagcggcgcaaggcgggagaggagacgacgcgacaactggcgagaccgacactggcgccgcccgagctcctctagtgccgcccaacgacagcaacgctttcccggtcgccgccttcccagacgccgccgccgtcgcgttcctaggcgtctccggcgaccacgcactcaccgtgtcggcgaacgccgattccggcgggatgcaaagcttgggaccccatcggcggttggcgagacggaggtggtggtcgatgaaggtgtcgaaggagagcgcggcggcccaggcggaggagaggctgtgacactggagcactgacctgggtgggatgcgcgtgcctcgctcgcctccgacgaggccgatgccgtggcagactgtgctgaggaggctgtggggcgaccggccccgcgcggagaaagaacatctcctcccctgtgtgtgtttgttggttccccccgcccccttttgtcccccaagtgtcctcctcctctcccgcctcgctccggcggactcctccccatccgtcggccggcttgccgagtgtggcgcctcacatctcgctcgacgcgccgccgccatcaagtggctcgccacctccctcctccccacatcggtactgccttgctcaccatcttcctctccgtgcaagctgctgtcgccggcggccacaatgtcgccatggagtagtccatcttcgaggtgatcgagtctggccttggcgttctcgtcttctcgatgatgatgtgtgctgatcgccaccgacggccaacggacaaggacgaggactaagcgatctatgccggtggcacctagccacctggggcttggcgatggcttgaatacgatggaagcggcgccagagaagttgcaagtgccgctggcctggcccttgcgttggtagtagtcgttgaatgcgtacgacgcgtgtgcaaccaaggtgtttggttcgaaacacacactgccctgccggatagcgctgcagtccgcgccgttaccgcacgcaaagtccaatgctgactgcaatgctgcactcccaacatctgttcttgccacacaccaacttgtctttgtggggcaagctccgccaccgccaccgcccctaaagtcaacctcatacaccttctgaccatttgggtagaacaagccaaagtttctctctatggctggcccaggcttctcgttttcattgaaaagagagaagatgtaggcggagacgtcacgcataccggaggctccggatactacacgtctgataagcccattgttgtacgcttgggcatcggctatcgtggctatcgagtccgtatcggctgcagctagcatggaaaataggggaaatgtacctccagaggggtgccctgattctgaagcttgcacactaaggattccatctcgtcgagccattgagaccgttaagctaccaccagaaaccctgtttatcgcagcataaacagcgtcgagctgagcatcaaagaggctgaagtacctgatgccggtattgccatcaagcacaccagcgttagggcggaacgtcgcgaactccagagagattttgtcaggctgagccacgtatgcgaagtacgggtagagattgaccatgaagtacgagccggtctgtttcaagaagtcaatcatgggcttcatcaccgattgcgcgatctcatctttaaactcccccgcagatggaggggacgactgcttgagcgcatcgaaggcgatcggcgtggacacctttacgtcgttcgccaggttcaggttctccagcgccttgtgcaagtttcgcatggccgagacgagcatcccggtcagttcgggtctctgcctgaacacctcgttcccgacggcgacgccgttgatcagcgtgccccggctgcgatacggcaccacgttgttcgtcacccagtcggtcgcgctgcgcagatcctggccggcggcggccagatcggcgttgggtatcgccaccatcaccttgatgccggtgttcgccatcgcgtccagcaccgtctggtccgcgtcgaagatcctcaccgcggagatgccgttcgccttcagaaggctcaccgccgccggtgggtcgatcaggttgttcgcgtccctcccgtagcacaccccgatctcgccagcatctgcattgacgagcaaggaattactccatcgtttggcgttgccgatcagctgcattggcaggaaagccagaagcacgttacctgcagcacgggggagaaggagcagcggcaacgccgcggccacgaggagggcgtggaggaggtgactgaatgccatgctctactctgcaactgcacagtgcacaccgtggcaagaggcagcgtaaatcaagagggctgattgcttctttggagatccctacatctggtccatccaaaaatcacagcagcagccagcaggtccgatcttagagctgtcaagatggcttccttgtgtcttcccgtcagttaaagagaaagggcagtggatctttgaatacggaatggtgcaaaggaaagcgaag

SEQ ID NO: 39702 - DNA, 474 bp, Oryza sativa
  Clone ID: PAT_MRT4530_43215C.1
cgaattaaaagcaaaaaaaaaaaaggaaaataaaggagaaaagagtggcggccatggcggcggcggcggcggtggagagcgtggtggtggtgcacaacgtggcgaagcggcacaacgtgggaacgctggcgcggagcgcgacggcgttcggggtggcggaggtggtggtcgtcggccgccgcgacgtcagcgccttcggcagccacggcgccacctcccacgcggcgcttccgccacttcgcctccctccccctcgcccgcgcctacctcaaggacgagagggggtgtgacatttgcggcgtggagatcacccacaacgcgctgccggtgacggcccatccgttccgccggagcaccgccttcctcttcggcaatgagggtacaggactctcgcagaaggagtgcgagatctgcgacttttttgtctacatccctcagtatggtggtggaaccgcatcattgaatgttacagtt

SEQ ID NO: 39703 - DNA, 1089 bp, Oryza sativa
  Clone ID: PAT_MRT4530_43216C.1
atcactcctccctctcccagctcatcgccatggccgcagctgcagcaccgcgtagctccgggaaagaagcgcttcccgctgcgctcggctccgcctctgagccccctcgcctcttcgacggcaccaccaggctttacatttgctacttctgcccgtttgctcagcgcgcttggattatcaggaacttcaagggcttgcaggacaagatcgagctagtcggcattgatctgcaggacaaaccagcttggtacaaagagaaggtttacgaacagggcacggtgccttctctagagcacaacggcaagatcatgggggagagtttagatttgatcaagtacatcgacagccatttcgaaggccctgcactgctccctgaagatcctgagaagagacagtttgctgatgagcttattgcgtatgccaatgcgtttaccaaagcactctactcacccttaatctccaaagcagatttgtcagctgagacggttgctgctctggacaagatagaagctgccctgtcgaagttcggtgatggtccattcttccttggacaatttagcttggatgtgtcgaaggtggacattgcgtatgtgacaattattgaaaggattcagatatactactctcatataaggaaatacgagatcaccaatggccggcccaacctcgagaaattcatcgaggaaatcaacagaatcgaagcatatacacaaacaaaaaatgacccgctttacttgctcgatcttgcgaagacgcatcttaaggcaagaccacttcctgaaacaaatgctcagcctccgcaactttgatgtactgaatgacagaatgatgatgatccatgccccgcccccccccccccccccacacacacacaaaaaaaatcaatactcttttcttgctactccagttgatagtacatgttttgcagcttttgcttccaataaaccgaagttgacatgtggtgtaaaagtcatgtttgagtaataaaatactggtgtaattctatgttactcaatgtcgttggtcttaaatatactttcatgtcattgaaaataatcttttgttgtcaaacttaaaaaaaaaaaaaaa

SEQ ID NO: 39704 - DNA, 273 bp, Oryza sativa
  Clone ID: PAT_MRT4530_43217C.1
gacatacgcgcgtgtgtgtgcagaacgagagggggtgtgacatttgcggcgtggagatcacccacaacgcgctgccggtgacggcccatccgttccgccggagcaccgccttcctcttcggcaatgaggctttgtttcaactcaagggtacaggactctcgcagaaggagtgcgagatctgcgacttttttgtctacatccctcagtatggtggtggaaccgcatcattgaatgttacagttgcagcgtcgattgttcttcatcactttggag

SEQ ID NO: 39705 - DNA, 240 bp, Oryza sativa
  Clone ID: PAT_MRT4530_43218C.1
atggaggagagaatgtgtgggcccgagttcctccgcatgattgctcggttccttggtgagcaacgagttcctcataaaaaagcctgcaaaaagcggcgcacgacgacgctgcaagccgccgtcgtcgcgtcccacccggtgatcgtcgggctcgccagggaggtcgccggcgagtgccgtgggctgccactcacgctcatcaccatcagcatggaggaggagaacgccggcatgctgtag

SEQ ID NO: 39706 - DNA, 1944 bp, Oryza sativa
  Clone ID: PAT_MRT4530_43219C.1
cccacgcgtccgaggctcccctctccactccccttccctcacccgcgccgcatcgcagccgctatccgcgtgggcattccgccgagcacctggcgcgcatggcgatggcttcgcaccacctcgcccagccgcccacgcgcgcggctctctcctcgcgccccacctacccgctctccagccatcaccactcctcccgtctccagctcccgctcgtcagcggggcgcggcgcagcaggctgtcccccgcggtggcgacgtccccggtcgccgccccagcgatggacgccgtggccgactgggggctgaccactctggaggaggctgacccggaggtgtacgacctcgtcgagcgcgagaagcggcggcagcgcgcgggcgtcgagctcatcgcgtcggagaacttcacctcgctcgccgtcatggaggcgctgggctcgccgctcaccaacaagtactccgagggcatgccggggtcccgctactacggaggcaacgaggtcatcgacgaggtggaggagctctgccgcgcccgcgcgctcgccgccttccacctcgaccccgaggcctggggcgtcaacgtgcagccctactccggctcgccggcgaacttcgccgcctacaccgggctgctccaaccccacgagcggatcatggggctcgatttgccgtccggcggccacctcacgcacggctactacaccgccggcggcaaaaagatctccgccacgtccatctacttcgagagcctgccgtacaaggtgagctccgagacaggatacgtcgattatgataagctggaggagaaggccatggattttcggcccaagctcatcatctgcggcgggagcgcgtacccgcgggattgggattacgccaggttcagggccatcgcggataagtgcggcgccatgttgctctgcgacatggctcacatcagtggcctagttgccgcgcaggaggctgcaaatccttttcaatattctgatgtggttaccaccaccacccacaagagtctccgagggccaagatctggtatgatcttctacaggaagggcctgaagcctcccaagaaaggccagcctgagggcgctctgtatgactacgaggacaggatcaacttcgcagtgtttccgtcgctccaagggggccctcacaaccaccaaattgctgcgctagcggttggtttgaagcagactatgtcacctggattcaagtcttatattaagcaggtcaaggccaatgctgttgcccttggtaaccatttgatgagtaagggctacaaattggttactgacggaacagagaaccatcttgttctctgggatctgcgccctcttggcttgactggtaacaaagttgagaaggtctgtgatttgtgcagcattacactgaacaaaaatgctgtctttggggatagcagtgcaatgtcacctggtggtgtccgcattggtacacctgccatgacatcaaggggtttggtagaggaggactttgtacagatcgccgagttccttcaccaggcagtgaccatctgcttggatgttcagaaggagcgtggcaagcttctcaagtacttcaacgagggcctggagaacaacaaggacattgaggacctcagggcggaggtggagaagtttgccacttcattcgagatgcctggcttcagggtatccgacatgaagtacaaggattaggcggcatcgtgcacatcgtcctctttctcttgccctgaactttggcgcccttgaaacctgattactgtggcgtgaatcgtggtgtatggattttgctgaactctgggtagtctctaaccgctttcgtctacctgagctggttgtgccattcagtcgttaaatgctggaattgtaatgatgtggtataataataataactagcatggtggtccgcgcagattgcgcggctagcatcattatattttctctc

SEQ ID NO: 39707 - DNA, 897 bp, Oryza sativa
  Clone ID: PAT_MRT4530_4321C.1
tgaaatctgagttcaaaatgcaagacttgtgcaaaactaagtattgcttaagcttgtagcttgagcatatccctgaaggggtcttagtgcaccagtcaacctacacatagaaagtgttggaacaattttgctttaaaaaaaaatccttcgaaaaccctcatggtagaccaagagaagaggaggaggaagtccttggatcagaatttccatacttgagtgtaataggagcgctcatgtaccttgcaaattgcacaagactggacatagcatttgtcggcaacttacttggaagggcatcaaggatatcctttgttatcttcaaggaagcaaggacatgggactattctacagaaataaccaagatctcaccttggtaggatatgcagatgttgggtacctattacacccacatatagccaagtcacagactggttatgttttcctatgtggaggaacaacaatttcctgaaaatcatcaaaacaaaatattgtagcaattgcgttgaaccactcgaaaaatcttcgcactatacgaagcctcttgcaaatgtgcatggctttgtaggatgattcaccacattcaacaatcatgtgaattgaacaccatccagacccctacaattatttatgaagataatgcagcgtgtgtcacacaagtggaaatgggttacgtgaaaagtaatctcaccaagcatatcaaccccaagttcttctatgctcacgaactgcataagacgaatgaattaaagtattgcataccaagtcctgtgaaaatcttgcagatttattcactaagtcattaccgacatcccttttgaaagatgcatccaagggattgggatgatgagacttagagaagtgcaaaaggagaattttgctaactcacttgctaaactt

SEQ ID NO: 39708 - DNA, 120 bp, Oryza sativa
  Clone ID: PAT_MRT4530_43220C.1
gtaggacccgcgggaactgatgaaaagcctacgttttatctttaaaccggagtctgttcttgcgatacaccaaattaagatgctctcgtataactagaatcttagtgcgagaaatgctgt

SEQ ID NO: 39709 - DNA, 348 bp, Oryza sativa
  Clone ID: PAT_MRT4530_43221C.1
atgcggcgaggagggtgtcggcagaggggggggggacgggaggatgcggcaacactcgatatctccgcggcggagagcgcggacgggaggatgcggccggtggaggcggcgtgcgagcgaagcggaggcgcggcggtggcggcaggcgacgtcgtcatcggtagcccgcctcctcccgcgcgccgccccttctcccctccagtcgccttgtcccggcgccgccccttctccctcccccttatcccaattggccaccgtgcgccgccctcaccgctggtcgccacccgtcgcgccatcctcctcgctggcagctgcccatctcttcatcgtcagcttgcagagaagtga

SEQ ID NO: 39710 - DNA, 225 bp, Oryza sativa
  Clone ID: PAT_MRT4530_43222C.1
atggcacaactacgagtgggcgatggcatggaagaaagcagcggcgctgatgttcattcacccgaggcggcattggtggatgtgatggtccttaccaaccacgatagtggagacatggcagcaacaatatgtgctagacgacgaggcagtggcgtctttatgtgcacacgacagcaacccgacatggaagaacagaagagcagcagagtgatggggatcctctag

SEQ ID NO: 39711 - DNA, 399 bp, Oryza sativa
  Clone ID: PAT_MRT4530_43223C.1
catattactaacaatataatgatcactgctatgtctgcaccatacatatttttttagcaataataccatatctgagatttgatcgcccgaggcgtatctcatccaggtatacattattgttagactagcatgcctactatcttcaagacagattacgagcaggggttcgatctgcacgcggtggcgtgggtgaacatactgaacagcatgttgctggtcttgataggacagcgaacctacttttgtacatgactagatgctaccctggtctacctcaacagaaactggcgccacactagcactctttcggtgatacaggaaatcttgccctccaaccagtgtacactttatgacggggaggagaaaaggagggctcggctttgtaaagatcagcttcaa

SEQ ID NO: 39712 - DNA, 372 bp, Oryza sativa
  Clone ID: PAT_MRT4530_43224C.1
atggcggtgtgggcagagatcacgctaaagccttgggggcaacatggggagcttgtgactggaaagactcgtgtggaggagctcgagctcaaggacagcttgtgggtgctgatgcctgctggtgcctggaggtcgacgtcgagcggggggagacacggcagaggtcaaggccgggggtggcgcgtcggcatgggactatgggagagttcgaggcggaagtcgaggtcgagccagcggacgacatcggcggagattgaaatcaagccaggaaatggcgtgcgagtgtgggcggaagtcgagatcaagccaccggacatcgagcttgagcctgagaccggccggcacgacgggaacaaagtcgagctagcgtga

SEQ ID NO: 39713 - DNA, 484 bp, Oryza sativa
  Clone ID: PAT_MRT4530_43225C.1
tttgttttagcccaaagtgaggcacaaggtgcgtcaacaattgacgagtgcactacatacaggacaacacactcaacactgcaattcccttgtatctcaacttttaacacaaccaccacaagcacctatcaacccagagagagcatcaccagctctgcacatgtaatgcacagtcagcacagcatcaggcaccccatcgcaggcgtgcagcattgaggaagtgatcttccagaacattaccacaagcaacacaaactgcacatgtccacagggtgtcggcacccccacaccttcacaagaaccaacttttcagcctccccagaacatcactggcctatgcgccaagacagtacatgcataccagagtcacccagtgatgcccactgccaagtagtctcagtgaggctgcaaaagcccctgggagcagcagctgcagcagctccaatgcacacccgacagcagcacccatgcacccaacagcagc

SEQ ID NO: 39714 - DNA, 141 bp, Oryza sativa
  Clone ID: PAT_MRT4530_43226C.1
atggctctggtcaagctctctctctctgcctccctggcctggcctcctgcttttctagtgttggttttgataaaccggaagggagcggttttcactttggaaactgaaagtaatattattgcatttgttgaacaaatatga

SEQ ID NO: 39715 - DNA, 1006 bp, Oryza sativa
  Clone ID: PAT_MRT4530_43227C.1
aaaaggctggtcccgtttctcacttcgcaacactaggctttttgcccgaagcgactcgactctacacccctcaccctaccctaccctagcaacgaggcggccatggcggacgaggagcacgaggtgtacggacaggagatccccctcgacggggaggacgtcgacatgggcgcccccggcgacgaggccgccaagatgcaggagctcgacgagatgaagcggaggctcaaggagatggaggaggaggccaacgcgctccgcgagatgcagaccaaggtcgccaaggagatgcaaggtctggatcctaatgcgtcctcatctgaatcaaaagaggaaatggacgctcggtcggtatatgttggaaacgttgactatgcatgcaccccagaggaagtccagcagcattttaattcctgtggaacggtcaacagggtgacaatcctgacagacaagtttgggcaaccaaaaggtttcgcttatgttgaattccttgaagtagaagctgttcaggaagctgttaagttgaacgaatcagaactgcatggtcgccaaatcaaggtggcgccaaagaggactaacgtccctgggatgaagcagccccgcggaggcagaggattcggtggtcatccttatatgaggccatatggagcaccattttacaatccctatggttatggataccccagattccgccgtccacgcaggccatacttttgaagctgtcttcgtggagtcttcagcacatgacattagtccaatagcccaaagaatccgtcgttgttgctgtatttcgatacttcatagttagcaactataaagttcgatcactttcttcacagggtgttttttgttgtttaaagatatgtgcaaattcaggcagcagcattatgtactattaacttcgtttatgtggaagtgcgcactattttgggttttggctgcatttttggtttccatcttttcaattcaattatagcttattgcttcaaaaaaaaaaaaaaaaaaa

SEQ ID NO: 39716 - DNA, 1697 bp, Oryza sativa
  Clone ID: PAT_MRT4530_43228C.1
attcatcttcattctactctcttaccccctccttccttccttccttccttcctaggggagcatcagcagcagcagaagcaatggggatatgctgcagcaaggggaaggaggagcttgaggaggagggatttccatggaagcacgacgccttcttccacgaccagctttggagcgctggcgtctccatgcacaccaagcaaggctggaagggcgccaaccaggacgccatgactacctgccaggactttgcggggcacaagggccagatattttgtggagtttttgatgggcatggccctctcggaagggaagttgctcgccatgtccgcgacgtccttccagtgaaactatcctcctctttggcactgaagactgaacaagatccatccagcaacacagataaggaaaccttggaaaagtcagattgcacctcattgagcgatacaagcaatgagaagcaattgttatccacctggaagaacatatttgtcaagacatttgaggatgttgatgaggatctgaggcaacattctggaattgactgcatttgtagtggcacaactgctgtcactgtcgttaggcagggtgatcacctgatcattgcaaatttgggcgattcacgtgcggttctttgcacccgagacagcaaggaccgcccaatttcagtccaactaaccactgacctgaaaccaaatcttccaagcgaagctgagagaatcctgaattccaaggggcgggttttcgccatggacgatgagccggacgtgcctaggatgtggctaccagaccaagacgcgccgggcctcgccatggcaagggcatttggagatttctgcttgaagagtcatggactaatctgtacaccagaagtctactacaggaagctatctgcaaaagatgacttcttggtacttgctactgacgggatatgggacgtgctgtcgaacaaggaggtgatcaagatcgtatcgtcggctactgaccattccaaggccgccaagcagctcgtcgagcgggcggtgcgcacgtggcggcgcaagttcccgacgtcgatggtcgacgactgcgccgtggtgtgcctcttcttgaagccttcaccgtcgtcgtcggagagcacccccggggacgcgaaacctcctcaggccgtgtcgttcacgggcagcttccgaaaggtcctgggcggcggcggcggcgaggcggaggaggggacgaatgtatggagagctctggagggggtggctcgggtgaactcggtggtgaggctgccgcggatgggcgccgtgctgagctggcggcggcggtcgacgtcgctggaggaagacgacgaggcgaggattgattgataacagtcgctttcgttgccggaaaacgtaatccagagggtttgattacatgctttaaatggcaaaaattagggagacgctttagaagttgattgacgtaaacgtatgtcgcattcaggttgttgagttgacggaatagggaccgatactgctgctgctatcctccctctcttgtagtagctgaaaatgattgcctagctgttggatgtggtggcctttgtttgatttatttattgtgattcttccttccttaatggagtacgctatcaacaaattaaatggacatatatgattgatgattatctggaatggattaaactccatttcaatttcagttaaaaaaaaaaaaaaaaa

SEQ ID NO: 39717 - DNA, 520 bp, Oryza sativa
  Clone ID: PAT_MRT4530_43229C.1
tcagtggtaaccgacgtacatacccgtcggcagcgggacgtccgtaataacttcgttaatatcaagagatatcgacacagtcgtccggagatgcccatcatatatgtccctaaaaatgctgccatttaagtccacatggtccatcttctcattcacctctgcacatcgtcggaggagtgggccggccagcacgtcctggtggtgccccatgtgcgagttcttcaccttcgttgcatggttcgcgccgacactccccatcatgcccattttcgacctcaccgagaagtccgccaaggcaccgaccaagtgccttagctgtatgcaacccaatgtactacaacaactggccatggattgggtctttggtgcagaccgcagggcacccccttggagaatatggggaaaagagaggggagatgggaagagaggaagaggaaagcgccggccgtttacatgtggggtttgttgttggctccgccaggttaaacatggtcaattatccatgttaaccacaatctag

SEQ ID NO: 39718 - DNA, 900 bp, Oryza sativa
  Clone ID: PAT_MRT4530_4322C.1
atgagcggccgaaatccggaggagaaagaaaataaggtggttcgtgtgcgggatagatggaggagcgtcgaggtgcacgcagcagctgatgggggcgaaatcggcggaaacgggggcattacctttgtggcgcttgtacttggtcttgcactgggggcaagcctgggcgccatcctttcgctcgtactcatagcaggggcggcacaccgggaagccgcagacgtcgccctccgtcacctaagatctggcacgcctgcccgctcccgtgcctccccgacttttgcggaacagatcacccacaaaaccaaaaatcaaaatctggactctcctccgcaagatccacccacgagttgcggatccgtacaccgggatcagcaccgccgcatcccgcgctgccaagaaatgaacacgacaacatccagatcaagaacggagacaaaaccaagaagtcaccggcggaggcggggcaagcattaccaggaatcctcccggcgaagaaggcttccagcagaggacgcgggagtggacgggaacttcatcctcctcagcgccgcccgatctgtcatcgacgagcccggaacggccgacgtcgacacttgcaatgaacctcaatgtgctagccctcgcctccggatgaccggatctgccggcgaggaggtcgtggctgccagatccggtgaccacggcctgccctccaccggatttagtcccacggcgttaaggaggaaccagatgcctctcccttctccttttttttttctttctccgagaaagctcggctggtcaactcaatgcagcacacaagaggtggtggttggtctccgccatggcgagctcatcatccgacccccacaagctcaccacgacggcgagaagaaggcacggcgatccagctgggtg

SEQ ID NO: 39719 - DNA, 606 bp, Oryza sativa
  Clone ID: PAT_MRT4530_43230C.1
gtaccagtaatgcaggctaacactgaagataaactttattggaagcatacaaaaaatggtgaatgcaacacaaaaagtgcttacaaggaagtctacaaaagttgcaggactgattttgacagattccctatcaactctcatgtggctctgattattgcttttgtgattaataacgatcctaataaaactaatctgagcaggctcctcatagttatgtggcaactttggaaagctagaaatgatctcaagttttatggaattttcaaagaaccctctcaggatgatgtccaatctgaggcttgcaaaagaaagatggatagtatcccaaatggaatcaggtgttatttggatgctacatgggacaatggtagaactggcattggaatcttctttcattttccacacaatcatactgttatttttattaaggccacctctgataaagctcacagctctcttcaagctgaactgcttgcccttcagttgtctttggaaattgccatatttctgaattttgcaggggttaccttcctaacggacaatgccaccatcgcagacacgactatgaagagaaatttcatggaagacctaggagattggagttga

SEQ ID NO: 39720 - DNA, 558 bp, Oryza sativa
  Clone ID: PAT_MRT4530_43231C.1
ttccgatgttctattgtggacagattgtgccgattgttttctaggaaattattcagacggagtgaaactgggttgagtgtgatctgctatcagtttgaaaagtttgggggatattcatattttgagaagattcatggtgtcctaccatggccccaagaaagagcattctttttaaaataggagtatacatcgtttcatctgtttatgttggatttcgtttataaatcctgagaggatgggctgcatatgtggggaatatgacagacagtgcgggatgctggttgtacagcgaagtgaaagagatatcaattccatctgcgctgtgtgctttctgcagaaacttttggaaatgttgtggaactgagctagtagtaagagaaaatgattagaagaataccaaccatggtaacatctgacaggagctgccctgtaagataaacactgatgacctggtttctatctctggctacttgttggaagaaatatactctacaagcctgcacctggcatgtgatatcagcactagagtcatttatatacaaaactagagcgtaataa

SEQ ID NO: 39721 - DNA, 453 bp, Oryza sativa
  Clone ID: PAT_MRT4530_43232C.1
atgccggtgttctacaggtacagaagcgaggtgaataccttctccgtgcccgtgcagaagcctttcgtctccgtcgcgaagctcaagcgcctcatcacggccaccgtgcgcaacggccatggacattcgcgcggcgggggccccaagaagagtgtcacgctgtacagcgacaacaccggcgaggagtacgcggacgaggccgagctgatccgggtcaatacaaagaggcgcaacaagctactttatgataggatgagagatattgtctttgtcaaattgaactcccaattaataaacaagagagacaacaaagatagggatcctttagagaaggaagtcaatgatgctgtgtctaatgatgagaatgagttcattaatggtattgtacctttttctaatgagcttgctgaagatgatccacaagatggagcatcacagggagaatcatcataa

SEQ ID NO: 39722 - DNA, 206 bp, Oryza sativa
  unsure (1)..(206): unsure at all n locations
  Clone ID: PAT_MRT4530_43233C.1
gtttaagcnccnggntcccaaagggcaattaantgcagaatggctgcatttaatgctggattccctaanaccnttcctnnaatnantgtaaacaggcaatgtncgtttgggcttcaagcagttgcaaatnttgcttcnaacattaaagcagggctttntaacattggnattgctgctngcctagagtccatgnaagtaaaccaagt

SEQ ID NO: 39723 - DNA, 1137 bp, Oryza sativa
  Clone ID: PAT_MRT4530_43234C.1
atggcgaagcctcgccctcgcgccgaggagatctcgcggccgtcgaggtcgctgtccaaggccgtccgccgccgcgccgacgccgtatccgcgaagctggcggcgcgcggcctcggcgccttcgtctggcagaagaagctcgagcgcgacctggcccgcggcatcctgcccgatatcgtctcgctccgcgacgagcggcgccggtgcctcgcccgccgcagggaggccgccggcgtgaactcgtccgccgccgcctcgcggcggagatcgccgccgccgatcctggacgcgtcgcgcgccagggcggcggcggaggaggaggcgaaggaggcggccttcctcctcgatcagagcaggctccgcgccgaggcccgtctctcgacgggacgcggcgcgtccgtcgaggagctgaaggagctcggcgaggagatcgcggcgtacgccgatctcgacagggcgaacgagcccttctgggcggcggccaaggcgatgtgcaacgccgagatcgagcaggccgccaccggcaccggcacggctggccacggcgacagggccttgcactccgcggtcttcgccgacgtgaagagcgtcgtcgagggcaagagcctcgacgagctcgacgcgatgcagcacgccatcgccgcgcgcatggccaccggcgaggcgaaggtcgtcgagcactggcaggaagtgacggagctcatccgtgtggagaaagccaagaagtacctagaacagcactacacctgcgacgcgcccccgcccccgcccgacaacgacggcggcggcgaggacgccgacgaggaaggctcggaaactctgcgcccggtggccttgccgccgccgccgggaccggagctgaggaagcccaagtacatcgcgcgggtgcgatcaggtttcgagtggaacaagtacaaccgcgcgcattacgaccacgaccacccaccgcccaagaccgtcaagggctacaagttcgtgctctactaccccgacctcgccggcgggaagccgccacagtacaccgtcgacgaggacggcagcaacagcggcggcggcgagacctgcgtcatcaggttccacgcgggctggccctacgaggacgtggcgttcaggatcgtgaacaaggagtgggattga

SEQ ID NO: 39724 - DNA, 252 bp, Oryza sativa
  Clone ID: PAT_MRT4530_43235C.1
atggggcgactcgggagagggaggaagggcgccggcaagcgggacccgcatggcagtgactcgggagagggcggtccacggcggatcgggtccacggaccggggaggagcggcgcaccacgtggcggccgaaccgatggccccgatctacccaagggtagatcggacggcaacgggagcttcccggccggggcgcgccggccccgggcaaaccggcccggtggtcatggcgtgcgacggggccgtgcaatag

SEQ ID NO: 39725 - DNA, 1089 bp, Oryza sativa
  Clone ID: PAT_MRT4530_43236C.1
atggaaaataaggtcaaatgtaaggcatgtgaaactctgctcaccaagaatagtagtggcactacaacacattggcggaggcatttagagcagtgtgattatcacaagcttcaacaaaaatccataaaacaacagaatatcaatttccctagccttgatgaaggtgatgttgatcttgatgctccttgtgtttctgtccctggttattatgatcctacaaagatacgagatgcaaactataggtggctgccaacaccagaggaatggaatctatattgtgaagtcaatgatgccctttctgtcattcatgcagccactgaggagttctcaggttcaacctacccaacatctaaccttttttattctcacattgtcgatattaagagagtactaggtcagttgttgaagtccaaagacccaattcttaaagaaatggcaaatgcaatgcttgaaaaatttgagaagtactggggcccagaatgcaatactttgtttgcagttgctttggttctagacccaaggtttaagatgggtatgattaactacacattccctgctttgtatgaagaaactgtacttcctaagaaacttgcaaatgtggaatccacattgaaatctttgcatgcatcatatgaaagtgaactccagagcacatcaaaggaaaatgatgccaccactcaatctactagtacatctctgggcactactagtagtcatttctttgctgctagccaatttcatgagtatatgaaatcaaagaatgctgctagtcttcctaagtcagatttaaagaggtacttagatgatcctgttgaggatattcctgcaaaaagtttcaatctacttcagtggtggaggatgaatgaattaaagtatccaattgtggcaaagttggccaaggatattcttactattcccatcacctcagtctcatctgaatcagctttcagcacagggggtcaagtgattagtgattatcacagctctttactcccatcaacagcacaagctttggaggatgatactaattctattatccttgtcccaactcaagcttcaactgcaaattcggttgtgggcagcaattag

SEQ ID NO: 39726 - DNA, 2811 bp, Oryza sativa
  Clone ID: PAT_MRT4530_43237C.1
atggacgcggatgaagcgaagtacatccctctaacatctacaatcctaggctgctctagtgctccactgaccactgctgtggatctagccaagcaccgtccatccttcgcctctcctgtccaggaagaaccccatggaggacagcagcagcccaccgcctccgccatgtctgtaaacctgcaaagacagctatctatagagatcgagtcaccgagcaatagggatggcatagcagcaacagaagcacaaccgaatcagcagctagtaccaggtgaagtaaggggagaagagggccaagagggaaacccaactaaagccaccaggaaaaagaaatctccattgtgggatttctttgaagaatgcactgtgccatcaaagaagaagaaaggagaaatggaaaataaggtcaaatgtaaggcatgtgaaactctgctcaccaagaatagtagtggcactacaacacattggcggaggcatttagagcagtgtgattatcacaagcttcaacaaaaatccataaaacaacataatatcaatttccctagccttgatgaaggtgatgttgatcttgatgctccttgtgtttctgtccctggttattatgatactacaaagatacgtgagcttatttgcaaaatgatcattgtccatgagttgccattttgccttgtggagtatacatggtttaatgttttgctaaagaggctaaacccttcttacaaaaaggtctctagaaataccattagaagtgattgtatgaggctttatgaatctgaaaaagaaaaactgaagaggactttcaaagatgttagaaagataagcctcacatgtgatctttggacctctaaccaaacaatttgctacatgagccttgttacccactacatagatgctgattggtcaatgcattgtcgtgttattaactttcttgagttggagcctccacatactggtgtagttattgctaatgccatttctgattgtcttgcttcatggagaattgaggacaagatagctagcatcacatttgacaatgcctcaagtaatgacagtgctgctaacctgttgcttgccaagtttacaaaacgtggttcactttggttttatggaaaattccttcatatctgctgttgtgctcacattttgaacttaattgtccaagatggtctggctgtgattaagcatataattgacaaagttagggacactatcaagtacatcaagaaatcaaacaatccagcatacaagttcagtgctgatattgattctctcaaccttaaaagtgacatgggtttggctattgattcctgcacaaggtggggctcaaccttcaaaatgctgcaatctgcatttttttataggtctgccttggatgtatatgctgcaggagatgcaaactataggtggctgccaacaccagaggaatggaatctatattgtgaagtcaatgatgccctttctgtcattcatgcagccactgaggagttctcaggttcaacctacccaacatctaaccttttttattctcacattgtcgatattaagagagtactagttgctttggttctagacccaaggtttaagatgggtatgattaactacacattccctgctttgtatgaagaaactgtacttcctaagaaacttgcaaatgtcgaatccacattgaaatctttgcatgcatcatatgaaagtgaactccagagcacatcaaaggaaaatgatgccaccactcaatctactagtacatctctaggcactactagtagtcatttctctgctgctagccaatttcatgagtatatgaaatcaaagaatgctgctagtcttcctaagtcagatttaaagaggtacttagatgatcctgttgaggatattcctgcaaaaagtttcaatctacttcagtggtggaggatgaatgaattaaagtatccaattgtggcaaagttggccaaggatattcttactattcccatcacctcagtctcatctgaatcagctttcagcacagggggtcgagtgattagtgattatcgcagctctttactcccatcaacagtacaagctttgccgcgcctctccgtggcccagaagatgctgcgccgcctaccgctccgcctcgcgccgacgctcgccggcggcggcggcggcgccatcccccaccgcgtccttcgcggcgcgtgcaccaccgcgccagcctccaggcccccgccctacccgctctccccgtccgacctcgacgccgtctccgcgctcctcccgcgcctcgtctccgcggggaacgtccccgccgccggccgcctcctcaccgccgcgctcctcctcccgggctccacggagcgcctcccgttctccccgctcgccgcgcacctcgcctccatgcccaccctcaccccggccttcgcgctcctcaccgccatccgccaccacccgctccgcccctcgccgctgcccctcgccacgccgctcctcggccacctcctctcgcgccgccgcgcccgcgaggccgcctccgtcgtccgctggctctgccgcccggactccccgcagcggcccgacagcgccaccttcgctgtcgccgtcgcggggctctgccggctcgaggaccccaggaacgcgctcgccgcgctccgggagatggccgtggacgggatacggacctcggcgaagctgcgggagtcggtgcgggacgcgatgctgcaggacgcgaggatcgaggaggcgtgggcgctggaggcggcgatgaagcagccggactccggcaagctggctgagctggtccagaagcttctcgaagagtgggaggactga

SEQ ID NO: 39727 - DNA, 2820 bp, Oryza sativa
  Clone ID: PAT_MRT4530_43238C.1
atggggacggccagtcttcggtacctcagccagattcatcgttcctacaccgacggcgaaggcgaccacaacaggccgtggagacagggagtggccagggaggtgaagcaagtagggcagtgtggcatggtgaagtgccaaggcagcggctgctctagtgctccactgaccactgctgtggatctagccaagcaccgtccatccttcgcctctcctgtccaggaagaaccccatggaggacagcagcagcccaccgcctccgccatgtctgtaaacctgcaaagacagctatctatagagatcgagtcaccgagcaatagggatggcatagcagcaacagaagcacaaccgaatcagcagctagtaccaggtgaagtaaggggagaagagggccaagagggaaacccaactaaagccaccaggaaaaagaaatctccattgtgggatttctttgaagaatgcactgtgccatcaaagaagaagaaaggagaaatggaaaataaggtcaaatgtaaggcatgtgaaactctgctcaccaagaatagtagtggcactacaacacattggcggaggcatttagagcagtgtgattatcacaagcttcaacaaaaatccataaaacaacagaatatcaatttccctagccttgatgaaggtgatgttgatcttgatgctccttgtgtttctgtccctggttattatgatcctacaaagatacgtgagcttatttgcaaaatgatcattgtccatgagttgccattttaccttgtggagtatacatggtttaatgttttgctaaagaggctaaacccttcttacaaaaaggtctctagaaataccattagaagtgattgtatgaggctttatgaatctgaaaaagaaaaactgaagaggactttcaaagatgttagaaagataagcctcacatgtgatctttggacctctaaccaaacaatttgctacatgagccttgttgcccactacatagatgctgattggtcaatgcattgtcgtgttattaactttcttgagttggagcctccacatactggtgtagttattgctaatgccatttctgattgtcttgcttcatggagaattgaggacaagatagctagcatcacatttgacaatgcctcaagtaatgatagtgctgctaacctgttgcttgccaagtttacaaaacgtggttcactttggttttatggaaaattccttcatatccgatgttgtgctcacattctgaacttaattgtccaagatggtctggctgtgattaagcatataattgacaaagttagggacactatcaagtacatcaagaaatcaaacaatcgagcatacaagttcagtgctgatattgattctctcaaccttaaaagtgacatgggtttggctattgattcctgcacaaggtggggctcaaccttcaaaatgctgcaatctgcatttttttataggtctgccttggatgtatatgctgcaggagatgcaaactataggtggctgccaacaccagaggaatggaatctatattgtgaagtcaatgatgccctttctgtcattcatgcagccactgaggagttctcaggttcaacctacccaacatctaaccttttttattctcacattgtcgatattaagagagtactagattttaagtttgaaggcgaccgtcgatactcgcacagagtgcacgaatatcgaggcgcaactgggtggttacaaggggacatggttaatttggagcgtcacgggctaattccagtcgggactagctcggggcgtgacatgaagtccaaagacccaattcttaaagaaatggcaaatgcaatgcttgaaaaatttgagaagtactggggcccagaatgcaatactttgtttgcagttgctttggttctagacccaaggtttaagatgggtatgattaactacacattccctgctttgtatgaagaaactgtacttcctaagaaacttgcaaatgtggaatccacattgaaatctttgcatgcatcatatgaaagtgaactccagagcacatcaaaggaaaatgatgccaccactcaatctactagtacatctctgggcactactagtagtcatttctttgctgctagccaatttcatgagtatatgaaatcaaagaatgctgctagtcttcctaagtcagatttaaagaggtacttagatgatcctgttgaggatattcctgcaaaaagtttcaatctacttcagtggtggaggatgaatgaattaaagtatccaattgtggcaaagttggccaaggatattcttactattcccatcacctcagtctcatctgaatcagctttcagcacagggggtcaagtgattagtgattatcacagctctttactcccatcaacagcacaagctttggtcaatatggacctcgcaccttccctggatttgataggtagtactggtatgggactgaacatgcagtacaaaattgctcacattgctgtaagcaatttgcctaccattccactctatgtgtatgagatccagatgactaatttgacaaaagggaaaatggccttcagtttgccatttagcaagcagtacataaacaaccacctttcaacaccaattgatgatttacttgtgactctggttggatcagctgaatcctttgagatgagactgaagaaatccaaagataagcgggctacctttacaactagatggaacaagttggttcaagccaatttattcgagcttggtgatgtttgtgtgtttctgttcactgaagttgatgatgacctatgtattactcttgaggttctcaactag

SEQ ID NO: 39728 - DNA, 327 bp, Oryza sativa
  Clone ID: PAT_MRT4530_43239C.1
atggtggccgacatcgtaaccttaatgggtagggttgagaagctaggatggcacaacaccacatggctagagaaggagattgggagaactacccctaaccacctcatctcctcctgttctcactcctcccccatcttcctcccgagtcctagctgcggctgtggcggtggcggcggcggcggacgtcagcagcgacagcaggcgcatggcaggcggcgacgacgcgcggccggcggtggcgtctgtggtggcaggccggagcgtaggatgaccgatgatggcatcagcggtggtagagcagcacgcgggcggtgggatgcaggatga

SEQ ID NO: 39729 - DNA, 290 bp, Oryza sativa
  Clone ID: PAT_MRT4530_4323C.1
tcgttctcatacgacatccaacttcaagagaggcctttatgtgtgagatagagagatatcctattgaggacgggcccagtctcccctcctgctagatacaaaggcgacgttcctggcgcatgctcatggcggcgtgctgctcatcgtaatgtgagaacgacaggacagggctgtggcctgctgctgctgccgactcaagtgctgtggattatgcctccagtggccacaataagactggccagggatcgctcatttgaggaccctgagctggcaccctttgatggatagaa

SEQ ID NO: 39730 - DNA, 219 bp, Oryza sativa
  Clone ID: PAT_MRT4530_43240C.1
atggcgacagagctagggttcggcctagcgaaggaaagagacagtgacgaaaggaaaaccgaaaaaccgaaacgtgtggaaattatggccgacggtggctgtggctatcatgtgccacaccgccaccgcgtgaaggagatcgtgagggaagtgagggccatccgcttacgggtcatgcgcatcttcgacagcttcttcgtgtacaaggttgttgtttga

SEQ ID NO: 39731 - DNA, 510 bp, Oryza sativa
  Clone ID: PAT_MRT4530_43241C.1
cggcacgagggcaactcgctcggtgcctggccgacaatcatcatatcagtaaaatgttggacattggcaaagggggtagtaggctcacatcaaaatgactaggaataggtcaccagaaaacaggcaaaaatctgaaacttgagtatcacactgaataaattgcatagtggaggagtaagatatgttgcatgttgtatattcagctgtgacacttccactgaaaatagttgaaacaactagagaaacataaggctttggcttccccctgacaaatctgaactgaaccacctggtggcttctctttttctgtcactacaagacagagccaaatctgaactgaaccacatttggtttctctcttttttcttttatatgcactacatggcagcacaatcagttgcaaaaatcagatatttgttcttggcacacttggcagctggcaacttgaggccaatgcagaattgcaggtgagatatatggggtgcggcatgaatggaattgaagatggaa

SEQ ID NO: 39732 - DNA, 222 bp, Oryza sativa
  Clone ID: PAT_MRT4530_43242C.1
atgaatcagaaagaggacgcaccaggatcccctcccctccgctgctctgctcgccagatggagatcgccgcccggccctcccctcgtctcggcggcggcgcaaggagcggaggagaacgagaacgagaacgagacgggagatttcttttacttttacgcgatactcgaccactccgcccttacggtgtgttcggacttcggagttcggactcggacccaagg

SEQ ID NO: 39733 - DNA, 1194 bp, Oryza sativa
  Clone ID: PAT_MRT4530_43243C.1
ctcgccggcgacggccaacggcgcggcggcagtgcgacggagagcggaaaggggaaaaacggaaaggggaggagacgacgcaactccaccaccgccttctccaccaccaccaccggcgtaagcatccatgtctccttctgcctcgcccgcccgccgcgcctctcctacctctgcgtccactgcccccgccccggcgacggcgagggcgcctaccggttcactgtcgatccccgagtcctcggcacgcacaccgatgtagccctcctccgcgtcccgcaccccaacgacgggctccaccgcggaatcaaatcctacgactacttcgtctacacggcccgcccaggcccgggcgcctccttgctccggctgctgccgaacccgcgggtctcccccttccgcaacgaggaggtcgccatcgtccgctgctccggcggcgcccgctacgtcatcgcctgcctcatgccaaccatcaggcgccccatggagttcaaggttatgcgcttcgactccgacgtcggccgctggaaatccacagctgtgtccatcagtgagccggtcgagagggacagggtgctccccatccctgacacggccagccagatggtcttccactgcaccaccaaggtcatcacgctcggcggcaccatcggctgggtggatctctggagagggatcctgctgtgtgacgacgtgcttgaccaacacctggtgctccgcgacgtgccactgcccaagccagcgagaagcaaccgcaaatccttctgcagagggccgccgcatcattaccgggacatcaccgttgtcgtgcaggactctgttcccacctgcatcaagtacgttgagatggtgacccgccccgccccaacgacgagctctaccgcggcatcagatcctacgactacttcgtctacacggccagcccccgcccgtcgctccggctgctgcccaacccgcacgcctcccccttcagcagcgacgcggtcgccatcgtccgctgctcgggcggcgcactggaaggccaacatatggagcaggccgataccggctggttcatggaaggattggcacagggagtgcacggtggatgtaaccgacatcgccgtcgtcgacaatgtcaggtacagtgagctgctgccaaagatctgcaatgatccagaggaaacattgaggaggttgctcacaggtcaccccaca

SEQ ID NO: 39734 - DNA, 537 bp, Oryza sativa
  Clone ID: PAT_MRT4530_43244C.1
atgtcggcgccaccaccaccggcgccctgcatgatctgcgccgccgccgccgcatgccatcccggcgaggtggtcccggagggtggcgagcgcgatgagctgcggcagcgcggcgaagaagtcggtacgtggccggtgcgtcatggggtcgaatcccatctgtatgagacgcttcttgaggtgcgtgttctcgttgtccgtcctttccgaaaggttctggaagagatgcacccttacttgctggaccctggtctacaaacgattaggcttgaacagcacagtaagcaatccaatacgatcactctgttgttcctctttccatatccaactatacagaagaagattggaaatagaatattcttaaaaagctggaaaaccttaaacacaaatgtggctcttcctacagttgtgagatttaaagaattgattaggccatacaaaaactacaaaatcgttggttatgtcataggacttgaattgcgtggccttcaattatgtttgatagataagtggggtaagatgatgacttcaaggtag

SEQ ID NO: 39735 - DNA, 2954 bp, Oryza sativa
  unsure (1)..(2954): unsure at all n locations
  Clone ID: PAT_MRT4530_43245C.1
ggccgaagaaaattcctgagcatccatttcaggccaatcatcaggggaagatagcagtttaacttgggataaacagacgaaaaccaaatccattacagaaagtagcatgtcttgaacagaacaactctgataatagctcattacagaaagtagctcatgaatcgcccagtctctgcagctcgtttcatttcttcaacccaggtagcctacgtgattcattaattaattcctacttcttcttttttgagactctactattaaccccagtttttacaagagttcctgcctcacctgtagccttgataagatatttggagatctcactggtgttgtagtagcgctcgaagaggaaattcttcctctcatcaagctcagccacgccttgcagcgtcttactcctcagatcaacagagataacccatcccttatcatccaagcgattgatcttggacaggaaagaaatgacatccccatccatacccaatgtggggaaacctgtgaccagcctcctcaatgtctcctctggatcattgccaatctttggcagcagctcactgaacctgacattgtcgacgacggcgatgtcggtgacatccaccgtgcactccatctgccaatccccccatgaaccaactggtatcggcatgctccatatgttagccttccagtagtaagcaacgtcctcttcctcatcagagtcagagtcatcagaatgttgcggcggctgtcgttgtcgaggaggtggccgatcaccggggcgggtctccatctcgacgtacttgatgcaggtgggaacagagtcctgcacgacgacggtgatgtcccggtaatgatgcggcggccctctgcagaaggatttgcggttgcttctcgctggcttgggcagtggcacgtcgcggagcaccgggtgttggtcaagcacgtcgtcacacagcaggatccctctccagagatccacccagccgatggtgccgccgagcgtgatgaccttggtggtgcagtggaagaccacctggctggccgtgtcagggatggggagcaccctgtccctctcgaccggctcgctgatggacaccgccgtggatttccagcggccgacgtcggagtcgaagcgcataaccttgaactccatggggcgcctgatggttggcatgaggcaggcgatgacgtagcgggcgccgccggagcagcggacgatggcgacctcctcgttgcggaagggggagacgcccgcgggttcggcagcagccggagcaaggaggtcgcggcccgccgcgggccgtgtagacgaagtagtcgtaggatttgattccgcggtggagcccgtcgttggggtgcgggacgcggaggagggctacatcggtgtgcgtgccgaggactcggggatcgacagtgaaccggtaggcgccctcgccgtcgccggggcgggggcagtggacgcagaggtaggagaggcgcggcgggcgggcgaggcagaaggagacatggatgcttacgccggtggtggtggtggagaaggcggtggtggagttggagacggcatcgggggagacgtaagctctgtcttcgaggtacacccagcttgggctcacgccgccggtggcgtcgtcgtcggccggcagcggcggcggaaacagcaagggtagtagcacaccctcatccatgacgtaggggacgggctcatcaccatcatccatggcgaaggcggcgagggatccggtcgaatcgaatcctaatcagcgatgaggaggaggagttaactctaaccggaactcgcgcgcgcacacgttcaagtctggtggcatcgcgaaaagtacggctaagtgtgtgaacaaccctcggctccgcgggctctcctttttcctcggtcgtagatctttttggtgttagagcccgttttgacttgggacaagcacacaaaaacttcctgccttcctcaggtgatcacgcgtccgacatacctcttcgtctactttttcattggcaagctcacgccttgatttcctcttttttccaagcacatgtgaatttaccaatgtcgaccgtccaattccatcattcactaacttctattgtgcttcatcttcctgccgtactggttctatcttcttcataattctggttctctcccgtaatttcctgtgagttacttcttctggtcttaccagcagctggagtccatcttcttcccttaaggtgatactctgtagtttagtgttggcttgactactccagtccagtacctgtttactagaataaagtgggtccacttgggctccggtgacggcgacagggaaggcggcgagggcgcagagcgcgacgaaagccatcgcgccagcccccgccattcccggcccattctagctataaatgcaagagactagccacgcaccgcgggccccgacctcgtcggcggagctggccgtgcctcccaccctgctgtccagctggcaatcctcgcacaattgatccaaatatctagtccaccatatgtgtccacatgttttccaaaggcagcagaaagatcacctgcattagtaacatcacatttaataaacataccacttggaactttaagatctccgtgaaactttttattttcattttgaactaatgaagcggcttctcttccattttcttcagagaaatcaactgctgtcccaattaggccccgccggccctctgcagtgcgatgtgcggtcccgtcgcccgggccgccgcccgggccgggcgccgacctcccgggcttcggctccctccccgccgcgcggcgggtgcccgcgccgcggccccacccggccgatggggccgccgggcgtgatgaccgcggcgggggattgggcttccggcttgggggccgcggggggggtggcgagccncccggtcccccccggccggctcgctcggggtcgccgcggtgcttgtccagcggccgacgtcggagtcgaagcgca

SEQ ID NO: 39736 - DNA, 543 bp, Oryza sativa
  Clone ID: PAT_MRT4530_43246C.1
cacacatctctcgatcgcttggacgaggcagcgagcgagccatggagaccgagccgtcgacgccgatgacgcagtcgtcctacttcgccggctgcatgggctcgccggcgtggctgccggcggtgcagaggagccccgcgcggttccacctcctctcgcgcgacgccgccgccggccgcgacgacggcggccggcgagcgtggagccggctgctgaggaggctggtgcgggagagcaggagcttctgcagcctcggcagcaggcacggcggcgccatggccgccgccaccaccaccttccactacgacgccgccagctacgccaagaacttcgacgacggccgacgcgcccactacgccgcctccgcccaagcgccgccgccggtcgccggagctagctagctagagggtttcttgatcttttcttttcctttttttgtttcttttttccttcttttttatttggtggttcgcttgtagctacttaattagctctgttcttgaaatggtagttgaagtgttgattttcaaaaaaaaaaaaaaa

SEQ ID NO: 39737 - DNA, 328 bp, Oryza sativa
  Clone ID: PAT_MRT4530_43247C.1
ctgtgtctgcccaaatgtaccactaaacactgacggcacagccgggcgccacagcgaacaagcccctctccctgcgcgagccgagtgcaccaggcgacggacaaactaacaaaaatggcgagacggagggcggcggatgaggcagcggaggccactgtgctgcgcggacggggcagcggcaggttgctccgaagaatctactggaggctacgacccggaaaccggccgatgcaaaccgagcgcgggaggtgacacaacggcagacgggaccacgcccggttgaactggcactacgaagcgctgagctacaccctacacttgcacgaca

SEQ ID NO: 39738 - DNA, 408 bp, Oryza sativa
  Clone ID: PAT_MRT4530_43248C.1
atgaacggcggcggcttggcccgcgcggcggcgccggcggtggtggcgctggcgctggcggcgatcctctcgacgccgccgccgcagccggagaccttctccaacatcccgcagacgctctccggcggcgacgggaagcagcaggtgaggataaagcggcccaagtcggcgaaggcgctgcagtgcacctccaagtgcgtcgccacctgcatccgcggcggcgagggccccctcaacgcctctggtagttttcaagggacaattccgcagccggcagtactgagtgctcggatgtctgcaatctcatcaaggatggagaagatgggcaatgaggaaagctttgacaaggagaagcagcagcaattcaaaccaaggcaaggcatggattcaaggatggttactgactga

SEQ ID NO: 39739 - DNA, 8588 bp, Oryza sativa
  Clone ID: PAT_MRT4530_43249C.1
atgcagcccggcgaggcacccccctcctccgggggctcgccggcgacgtcgccgcggccgccgccggcggtggcgctggggctggaacagttagtgtgtggtttggaggcaatgatgcatcaccatgatcagcagcagcagcagcagcaagggtacccatcgggcgcgccgcatggtatgatgggaggtggtggcagcagtagtttccctccgtcctcaggcccaatgcccccgttccagggccagaggaacatgacactacccggtggaaccatgggactggcttgtggctagcagcataaccagacggcgacgcaacaagaatacctggagtacatcatcctgcagcagcagcagaatgcccatcggatggtcctactgcagcaacaggatgccaatatgaacatagcagacacatcgaagagggaccagagaggtgtctaccatctctgcaatagtcctggggcttatgtcccttcaggctcagtccccgtccccagatgttcaagagacaacaatctgagcatcttcaacaggcagagaagcaggcggagcaagggcagccgagcaatagcgagcaaaggagtggtgatatgaggccaccttcgatgccaccacaaggggtccctgggcagcagttgtcatcggcgggtatggtgaggccgatgcagccaatgcaagggcaagctggcatgagcaatgctggagctaacccgatggcaatggcccaacttcaagctatccaggcctgggccaaagagcacaatgttgacctgtccaatcctgcaaatgtgactctcatttctcaaatcctaccaatgttgcagtcaaacagaatggctgccatgcagaagcagaatgaggtaggcatggcgtcacagcagcagtctgtaccctcacagatgaacaatgatgcaccaggacatagtaattttcctagtcagggtgccccatcgaagccccgacagcctcttccaccaagcacctctgtttctggtggggcagagcctaagatgatgaatatgagcaacatgcagatgcaacaacagttagcagctcataacagagatagctcgaatgacagggctgcgaggccagccatgtcaatgggcaatggtggacaaatgatgcatatgccccaaagttctggacatgcaaacaagattcctgagcagcccaatccaaaaaatgcaaattccgaagcaatgcagatgcaatatgcaagacagttgcagcaggctaaccgagctactgccccttcagcaaattctggtgaaacaggaggatcacaggccccaaatcaagctgcccgaccacctatgggtttcaccaaacatcagcttcatgtacttaaagctcagatattagcttttcggcgtctgaagcgtggtgataagaagctaccaccagaagttcttgatttaatcatgtctggaccaccacctgattcacaagcgcagcaggtttctggacctccagtaacaaaccgtgaaagatctgctacaagcagcgctgatgaacatggaagacctgtggagagtggtggtatagctcctgaaagatcttccctgttgaaggcgccctgtttaccaaaggtggaggtttctgctccagaagacaaaactattcctgctagtggtcccatgcaagtgatgaaagcttcacccaaggaacctcttagaattggaccagtttcaatgcctgaacaaaccaacaccaccctgattaaatctgagcaggatccagaaaggggtatccagagaacacctgggagaagtgattacaatggtgaaagggggaaatctttgccagcagaaagtggttcagcagacgctgagcaggcaaaaagagctgcctcatcaagtagcgtgcctactcccaacagagatgtttcaagaaaataccatgggccactatttgactttccatcctttaccaggaaacatgattccatggtgtctgcaaattacaacagtaatctagcactcggttatgacgtgaaggatttgttagctcaggaaggcatgatagttcttggcaagaaacgggaggataatttaaaaaagatcagtggcttgcttgcaattaatctagagaggaaaaggatccaaccagatcttgttttaaggctgcagattgaagaaaagaagctgaaactccttgaatttcaggctcgtatgagggatgaagttgaacaggagcaacaagaaataatggcaatgcctgatagggtgtacagaaagtttgtcagacaatgtgaacgccagcgtgttgagcttacaaggcaagttcagcagatgcagaaagcctcaagagaaaagcagctcaaatccattttccagtggcgcaagaagcttttggaggcacactgggccattcgtgatgcacggattactcgtaaccgaggggtagccaagtaccatgaaaggatgctgagggaattctcaaagaaaaaggatgatgatcgaaacaaaagaatggaggcactgaaaaacaatgacgtggaaagatatcgtcaaatattattggaacaacaaaccagtgttcctggcgatgcagctcaaagatacaatgttctatcttctttcttgacccagactgaggagtatctctataaacttggagggaaaataactgctgccaagaatcatcagcaagttgaagaggcggcaaatgctgctgctgctgctgcccgagcacagggtctttctgaagaagaagtgaaggctgctgcacaatgtgctggtcaggaggttatgataaggaacacattctctgaaatgaatgcgcccagggaaaacacatctgttaataagtactacacattggctcatgctgtgaatgagagagttacaaggcagccctcactgctgcgagcaggaacgttaagggactaccagctggtgggccttcaatggatgctttccttgtacaataataagttgaatggtattttggctgatgagatgggtcttggcaagaccgtacaggttatgtctctgattgcatacttgatggaatttaaagggaattatggaccacatctcataattgtaccgaatgctgtcttggtcaactggaaggaggttctggctgtgaaattcaatgttcttgtaacaacatatgaatttgttatgtatgaccgttccaagctttcaagaattgattggaagtacattattattgatgaggcccaacggatgaaggacagagagtcagtcttggcgcgagatcttgatcgttatcgttgccaacggcgtttgcttctcactggcactcctctacagaatgatcttaaggagctttggtccctcctaaatttgttgctaccagaagtatttgacaaccgtaaggcatttcaagattggttctcaaaaccttttcagagagatgttcctacacatagtgaagaagaagatgattggctggaaactgagaaaaaagtaattattattcataggctgcatcaaattttggaaccttttatgctacgaaggcgtgttgaagatgttgaaggctcacttccaagaaaggtcgattgttctgcccttgtcacactcagtgatgctatttgtcactcagctctttttgtttgctacattgttaactcgtcatgtcatttgcaggagtcaattgttttgaggtgcagaatgtctggtattcaaggtgctatatatgattggataaaatccactggcaccatcagggttgatcctgaagatgagaaagcacgtattcagaggaatgcaatgtaccaggctaagacatataagaatctcaataacaaatgcatggagctgaggaaagtttgcaaccatccattgctgtcatatccttttatgaattactatggaaaagattttataatcagatcttgtgggaagttgtggaatcttgataggattttaattaagcttcataggtcaggtcaccgtgtactccttttcagcactatgacaaaacttcttgacatcctggaagaatatttgcaatggaggcaacttgtttacagaagaattgatggaacaactagcttggaagatcgtgaatcagcaattgttgacttcaacaggcctaattctgattgttttatattcttgcttagtattcgggctgctggcaggggtctgaatcttcagagtgcagacactgttgtaatttatgaccctgatccgaatccacaaaatgaagagcaagcagttgctagggcccatcgtatagggcagactagggatgtaaaagttatttacatggaggctgttgttgataacatctcaagttatcagaaagaggatgagttgaggaatgggggaagtggagatctggaggatgatcttgcgggaaaggacaggtacatgggttcaatagaaagtctcatccgcaataatatccaacagtacaaaattgacatggcagatgaagtcattaatgctggtcgatttgatcaaagaacaacccatgaggaaaggcggatgactttggaaacactcctgcatgatgaagagagatatcaagaaactgttcatgacgttccttcactacagcaagttaaccgcatgattgctcggactgaagaagaagttgagctatttgatcagatggatgaagaatttgattggacaggagatatgatgaaacacaatcaagctcccaagtggctccgtgttagctccacggagcttgatgctgttgttgcgagtttatccaaaaagcccttgagaaatatggcggctgggggaatttctcttgacactaatgaaaaacttgagaaacgaagggggcgacctaaggggtctgggaagtactccatctacagggagattgatgatgacgattttgaggaatctgatgatgattctgaagagaggaatacctcatctctgcctgaagaaggggaaataggagaatttgaagatgaagaggacaatgatgattcagtgcctgataataaggatcaatcagaggaagaagagcctatcaatgatgaagggtatgatttttcacatgggatgggacgcagaaaagcccatagatctgaagaagctggttcaacaggatcttcatctggtggccgtagattgccaccacctgcaccttcctcctcttcaaaaaaattgcggtctttgtctgcattagattcccgcccgggtgctttgtcaaagagaactgcagatgacctagaggaaggagaaattgcattatcaggggattcacatctggatctccagcagtcaggcagctggaatcatgaacgagatgatggtgaggatgaacaggtagtacagccaaaaataaagcgcaagcggagtatccgtattcgtccaagacctaatgcagaaaaactggatgatagatccggtgatgggaccgtccctcaacgtggtgttcatcttgcatttcaaggagatggtgattatgattcacaatttaagtctgagcaagcctttgctgatcctgcttccaggcagcaagacacagttcatcggacagtaaaacaaaagcgtaacatgccatctagaaaggctccccctgccactaaggctgggaaaatgactcagctgtctggatctggtgagggatctgctgaacattctaaggaaaattggagtaacaaggtgatagaatctgctggtccaaattcaagtggaacaaagatgtctgacagtatgcaaagaaaggtaaatctcgactgctatctgcttgcattagcaaaagagccaagtatgacgccgcttatttcatgtggtgttttcacattgttctacaatcataacaactgcaagaacgtgataaacaagctttggaggaggattgacaaagagggtcatcaaatcataccaaatatatcttcttggtggcgtaggaacgagaattcctcattcaaaggtttggctagcagcacccttgatctacagaaaattgaacaacgagttgatggatttgagtatggcggtgtgaatgaattcatagctgacatgcagcagatgctgaaaagtgtggttcaacatttcagctataggcatgaggtccgagtagaagctgagaccctccacaacttatttttcaatataatgaagattgcctttccggactcagacttcagagaagctaagggtgctatgtcattttcgaatcctggaggaggtgcaagtggctctgctgcgcaatcaacaaagcaatctgcttcaggccagaaacgtcgttcaagcaccagtgaagcggagcagcatggttcaagcactagcagacacaatcagcatgcaccagttggtgaggtttcaggccgggcccacacttcaaaatctgagaaggactcccggcattctggaccaggtagcagggaacagttcacggatagcgcagggctgttcaggcaccctacagatatgttcatagttaagaagaagagagatcgaaggccgagcctggggtctccatccagttcaggccgaactggaccgctctccccgaccaacgccgggcggatgggaccggcgccatcacctagaggtgccaggacgcccttccaaagagatccacacccttctcagcagtctatgcattcagctggatggggtgctcattctgtgcagcaatctgatcgtggggggagttcatcacccggcattggagacatccagtgggctaaacctaccaagagatcgaggactgatagtggcaaaagacggccaagccatatgtgaaaaagaaaagagggattgttattcttggcattgcggtgtacattccttagcacccttgaatcttgattgacctctctacccgctgctgattctggagcccattggcctggttttgacacccatttcttcgtcgccattcctgccatccttcaaagaagttatcacgaccgtctgggactgacttgtgttgtcatggacattgtgggaaatgtgggtaggagtaatcgttcttgtatgttggtattttctgtaaagggcaaacacatttaatcttgttctctgttgactgttaagtagcgctccatccaacagagttcctgtctcacctgtagcgttgatgagatatttggagatctcactggtaatgtagtagcgcatgaagctggaattcttcctgtgatcaagctcagtcacaccttgcagtgtcttatccctcagatcaacagaaataacccatctcttatcatcactgtagccgatcttggacaggaaagagatgacattgccatccatgcccaatgtggggtgacctgtgagcaacctcctcaatgtttcctctggatcattgcagatctttggcagcagctcactgtacctgacattgtcgacgacggcgatgtcggttacatccaccgtgcactccctgtgccaatccttccatgaaccagccggtatcggcctgctccatatgttggccttccagtagtaagcaacatcctcgtctgagccgtcagaagaatccgagtcatcagaattatgttcaatcaaccgtcgtcgccgccgaggtggtggatcaccggggcgtgtcaccatctcgacgtacttgatgcaggagggagcagagtcctgcacgacgacggtgatgtcacggtaaccatgtgggtagcctctgcagaaggatttccggttcctcctcgccggcttgggcagcggcaggtcgcggagcacggggtgttcgtcgagcacgtcgtcgcagagcaggattcccctccagagatccacccagccgacggccatggcgtggtcaccgccggcgagcgtgatgaccttggtggtgtagtggaagagcacctcggtggcagtgtccgggatggggagcaccctgtccctctcggccggctcgtcgacggacaccgccgtggaggtccagcggccgacgtcggagtcgaagcgctgaagcttgaactccatggggcacctgatggtgggcatgaggccggcgatgacgtagcgtgcgccgcccgagcagcggacgatggcgaccgcgtcgctgctgaagggggaggcgtgcgggttgggcagcagccggagcgacgggcgggggctggccgtgtagacgaagtagtcgtaggatctgatgccgcggtagagctcgtcgttggggtgcgggacgaggaggagggctacgtcggcgtgcgtgctgatgactcggggatcgacggtgaaccggtaggcctcgccgtggccggcgccggggcgggggcagtggacgcagaggtaggagaggcgcggcgggcgggcgaggcagaaggagacgtggatgcttacgccggtggtggtggtggagacggcggtggtggcgttggagacggcatcgggggagacgtaagctctgtcttcgaggtacacccagcttgggctcacgccgccggtggcgtcgtcgtcggccggcagcggcggcggaaacagcaagggtagtagcacaccctcatccatgacgtaggggacgggctcatcaccatcatccatggcgaaggcggcgagggatccggtcgaatcgaatcctaatcagcgatgaggaggaggagctaaccctaaatcggagttgtgccccaagacgaggaagaatgggaatttgaggtttcctttttctttttctctttc

SEQ ID NO: 39740 - DNA, 849 bp, Oryza sativa
  Clone ID: PAT_MRT4530_4324C.1
atgcccaaccggttctcccatattgcccatcaactggtgcatgcagagaagagggaatcaatattctttgtgaaaatggttagagtgcctcactgccatgctaagatagtggagcacctgcagaataaattccatatgaaaccatctgaagcagaaggcacaattaaggagcccttctttgctactggatctatgatttatcaggatgagaattttggatacattttgacctgtgctcatatcctcgaggatttctattcagccaatattgtactgagtaaggagcaggccaacaggtggttcaagtttctcatcctctgcaagcacaatgaagatcacatgaagactatccatcctgacttgtatgaatctgagcgtgataagcggaattacactgtagcaactgttttgaaaattgatcagcgtaaggatcttatgttgcttcagttcaatttgtccacactctatgccacccagtatgctcaaagatgtcgcttacctcatcagtcattaaagctcgcagaaaatccatcctcagcaccaaatgatgtggtcatgatctcctggccacctaataggcctgatactgttgtcattgggcaagtttcaaatcaatgccgcttattcaaccaactgacaacagaaagagataaaggctataatatgcaatttatagagctaaagatcaatgttgaaaagggagcatctggctcacctatactcaatcatgctggtgatatccttgcagtttatcatggccggattgaaggaaagggatatgctataagccatgacgacatttacgaattcctatacacgcgcaaaattctatcacagaatttgcgttaa

SEQ ID NO: 39741 - DNA, 739 bp, Oryza sativa
  unsure (1)..(739): unsure at all n locations
  Clone ID: PAT_MRT4530_43250C.1
gcgcccgcctcacacgctcccgcgcgcgcagattgcgtcgtcggagacggagaggatgaacggcggcggcttggcccgcgcggcggcgccggcggtggtggcgctggcgctggcggcgatcctctcgacgccgccgccgcagccggagaccttctccaacatcccgcagacgctctccggcggcgacgggaagcagcaggtgaggataaagcggcccaagtcggcgaaggcgctgcagtgcacctccaagtgcgtcgccacctgcatccgcggcggcgagggccccctcaacgtcagaaagtagcagtaccctctctcaatctcatgtagcctgatcaaatatgttcactgaattcctgcagaaaatatgttcattcgccaataattcgagctcaattactgttaaacctgcaggcctctggtagttttcaagggacaattccgcagccggcagtactgcttggcagagtgctcggatgtctgcaatctcatcaaggatggagaagatgggcaatgaggaaagctttgacaaggagaagcagcaggtacagttgaagatggtatatccaggcaacaactaaacattgctgctgctctaacattgtgatagtctgctattgcagcaattcaaaccaaggcaaggcatggattcaaggatggttactgactgaattntacacaagaaactgaacaatccggtaagattgttccgtgaagttacagtgagaagaattagtgc

SEQ ID NO: 39742 - DNA, 633 bp, Oryza sativa
  Clone ID: PAT_MRT4530_43251C.1
atggatttcgcagctcccgttttggtaacgggaggtttgactcctgtccctggtgacggtggtggtttttcggccatcgggaagaagtcgttgaaactattgtcccaccaggcgtgccaaaaacgtgttgatgcgaaaaacatgagcgtcgcctcgtccggtctcccgtgcacctaccccaaatccccatctcgctgtggtcgtcgtcgccgctacgtcgcctcgccagatccgctgccgtcgccgtggtcgtcgtcgctgctccccatcgccgccagatccgccgccgccggtgcggaggccggactcgcgtcgcttcgccgtggtcgtcgtcgcctcgccagatccggcgaccccgcacccggatccggtgagcccgccgccgccaagctcgccacgccgtcggcgagctcgtctgcgccgtcgtggggggaggaggatggcggcgtcgagccatctcgccgtggtcgtgaggaggacagcggcgtcaagccatccgccctcaccgttgctccccgccaccaccaccgctgctccttgccgccgccagatccaccgccaccgctgctccccgccttcgccagatccgccaccgccagagctcgagtgacactgatctgccaccgaaggtag

SEQ ID NO: 39743 - DNA, 993 bp, Oryza sativa
  Clone ID: PAT_MRT4530_43252C.1
atgccgctctcctactcagccgccgccgccgccgcgccgtcccctctcgccgcgcgcagccgcggcctcctccgccgaccgccgcgctcttcccccgtcgtcgtgcagtggtatgatgatcagtatgcagttatcgatagggttgtagatgttgcgatgaggtgcaagaagattgatcaactgagggcagtcaatggaataccaccatacgctccagtgtctaacagatcgttgttaagtcctgtgacgctgccgattatccgggatgcgaatattaagaatgatacaaggttgcgtatcttctcagggactgccaacccttctctttcccaggaaatagcaagttacttgggcttagaacttgggaagattaacataaaaaggagagcatctgctaagaatattactgcagtcatcccttattttggttatgccagagctgacaggaagtctcaaggccgtgaatctatagctgcaaaacttgtagctaatatgattacagaagctggtgcgaaccgtgtccttgtatgtgatcttcattccagtcaagccatgggatactttgacatcccagtagatcatgtttatggtcaggtaatgaatcttattggagatgttagaggaaaagtggctgttatgatggatgatatgattgatacagctgatatttcgcttccaaatatcaatattctaatgaaaccaattaaattaggaactattgccaaaggagctgagctgctgcatcaagaaggagcaagagaagtctatgcatgctgtacacatgctgtttttagcccgcccgccattgaaaggttatcaagtggtttgtttcaagaagtaatcatcacaaacactatacctctcaaggaggacaagagtttcccgcagctgactatcctttcagttgctaaccttttaggcgagacaatctggcgtgttcatgatgattgctcagttggtcatgagccatactctagcttggacattgactga

SEQ ID NO: 39744 - DNA, 1935 bp, Oryza sativa
  Clone ID: PAT_MRT4530_43253C.1
tgcaggcagcagcagcagcttcctcctcctcctcctcatcttcaccgacgacaccgcacgctccgcttgctcgtctcgccggcgccatgtcgtacaaccattcgccgtccatcaccgcagagaccataaaccagaaggtcaggatcttcacctacgagccatgtggggagattgtccgccacgcacggcggttagagaaggagatatacgaaaatccaggctctctcccttttcaagagataatatactgcaatcttgggaaccctcaggctcttggccaacgaccaatcaatttctttcgcgaggttctttctctgtgtgacaatccatctctcatagactgacattctttcgaagctcgtgccttatgcagtccatgtgcgctaaaacgagccaggaagattattgaatcacttccaggcagagattctggttcctatactagtagtcagggagtcagaggtttgcgtgaagcagttgctgatggaatagctgccagagatggttttccatcaaaaccagataacatttttctgacagatggagcaagttcagcaatcaacatgatgatgcaaatactcatcaggtcccatgaagatggcattttgtgcccgctgcctgaatatcccttatactctgcttctattattcttcatggtggaacaatggtaccgtataatcttactgaagacagtatttgggggcttgagattttcgaagtcaagaggtgtttagaggacgcccgtgcatcgggtttgactattagagctatggtggtcataaatcccggcaatcctactggccaggtactgtctataaccaaccaggaggagattgtggaattctgtaggaaagaagggttggttattcttgctgatgaggtataccaagaaaatgtctatacagagaataagaggttcaattccttcaaaaaggtggccagatcacttggttatgatcaccatgacctctctatagtgtcatttcactcggtctctatgggatactatggagaatgtggtagaaggggaggctacatggagatttgtggttttggagatgatgtgatcgatgagatgtacaagttggcttctctaactatttgtcccaacatagctggccaaatccttatcagccttgttatggatccacctaagctaggggatgaggcttttgagattttcatggtcgagaaggaagagacttattcatctctactcaagcgcgcaaaggctttgcagaaagcgttcaacggtttggaaggcgtgtcgtgtaacaagttcgagggagccatgtacctcttcccacggctgcgcctgccacaggcggcgatcaaagcggcgcagctggagggcgtctcccccgacgtgttctacgcgcaccgcctgctcgacgccacggggatcgccgtcgtcccaggctctggatttcacccagatttggtctcctcctgcaaaaaggtctccgggacatcgcacatccggtgcaccatcctccccggcgaggagacgatcacggcgatggttcccagcctccaggcgttccatgaggcgttcatggacgagtttcgcggctgatcgattgagcttcgtgaagcaacagaatttggcagatcacaagatcggcagctgtgccatgccttgagttacacaggagatacagctagcggagctgttgcttgtcgtctggcttgcttagcttcctgtttgtgtaatgtccatcggtccattggactccatgcatgtgtgccgtattataactgcaagtgcgttttagttatgcgcctatatgcaaaactcgtggaattggtgttagtgtttgatcagtttgttactatgatgtaaggagttatcagactacgatctagtactgtatggctgtaataatcaagtaatcaactaccccttgagggacaagtcctatttgtattgtatt

SEQ ID NO: 39745 - DNA, 465 bp, Oryza sativa
  Clone ID: PAT_MRT4530_43254C.1
atggatcggcgggaggggaggaggaagcgcgcgcgggaggaggaggcggcggcggtgttcgaggaggtgacttcgtcgtcgtcgtcggcggcggcggcggcgacggcggcggtggtgggagggggggataaggggaaggaggaggaggagggggaggggtggaagcggccgccgggggtgttcgagttcccgtggcagaagtgccgcggcgggctgggcgtccccgtcggcggcggcggcggcggaggaggaggagggtcgtgggagctccgggacgtgttcttccggtcgctggtggacggccgggcggcggcgatcgggttccccggcgaccgcctcttcccgccgccgagcaagcgggcgctgttcgacgacgtggacgcgtggctcgccgccgccggcgagggcgaggtggaccccgtctggcgctccgtgctcgaggaggggcccaggcccgccgcatga

SEQ ID NO: 39746 - DNA, 2011 bp, Oryza sativa
  Clone ID: PAT_MRT4530_43255C.1
caaaaattttctatgaaattaaaaagttgttgtaaaaattatattaatgcatttttcaattttttttctaatacttaattaaccattgtcacgcccagaaattcccgaatagaattccaggcagaatgtgcattaaaacccctgtccaggaccggccagggcatcctcgacggcacagacgaagcctactcctatgagaagccaccatctgacgcatactcaaactctggggttgggagatagagcaagactgagtactacccactatactcaacaagtcatactggaactgaggggacctcggcgactatttcaaagtacaccgaagcgtcgggagagccagaatctacgcgacatacaaggcacttgaatgggcttaaacggagcacagtggaccgagtccacgggactggggagaggagcaccatgtgacgctgacgtggcgccgaggtggcgcacacgctggcggccaagtgggcggaggcggctcgcagccggcgcgcacgggcggcttaagccggcccggcgccatggcgacgcggcggcggcggcgcgggcggcgacctgcggcgaacggctggcggcgaagagcggcggcgatgcggcggtgctacaagggggagagggagagagggagaggagatgggggtggggagtgcgggaacggctgggagtggcgcggattcaccggcgaagtgggggaggtggaggaggaaagagaggcggtggtggtggtgaaggaggtgggtctggtagcggcggtgttcggggtggtggtggccgggaaatggatgggggcgggaggaaggcgagcgggcggcgtcggcgacggcggcggcggctaccacgcgggagagaggagcggcggaggcggccatggcagtggaggtggaggaggagggaaaaggggggggagggatggatgggacgtgagggcgcggcgggggaggggtgacgtggcgcggcggcactgggcgggagatggaggttttttttttgtggggggggggggtggctgcgatgacagcgaggccaaatccgtggtgggtgccgccagatctagaggcggcgaaggtggaggtaagggaggaagcggcggggtcgcagtagggacggcggcgactgcggtatgtgccgccggatctggtcctcggctagagccggcagccgcctagcagtggggcttgaggtggcgctggcgtagcgcgggtaggctgaggaggcgccacggctggcggtggaggatggagcaaggaggttcggccgtcggcgacaggcagccatggcgcatggaggtgcagccgacaacggtgcgaggtcgtggctggcgtggaggcgcacctggcgcgcgtggaggtgaggccggcctggaggccgctgtggaggaatgaccggtggcgaaggtggaggcggggaagggagaagatagcggcgaggtgcgaactgcatgggggggtggcggtggcgacgacgatgccaaatccgcggcgggtgctgccagatctagaggcggagatggtggaggtaggggtggaagtgacggggtcgtagtagggtcggcggcgactacggtgggcgccgccggatcaggtcctcggccagggccgattgccgcccagtacgagcagttggcgtgaggtggcactggcgtagcacgggtaggctgaggaggcgcggcggctggcgatggaggacggagcaaggaggtttggccgtcggtgacggaggccgccacggtgcatggaggtgcagccgacaacggtgcgaggtcgtggctggcgtggaggcgcacctagcacgcgtggaggtgaggccggcctggaggccgccgtggaggaatgaccggcggcatggaggtgtggtgcagttgacggcaggtagcatcagcggcaacggtacactagagcgggtggcgtagctggtgaggattgcggtggcgacggcggcagcggcagtggcggcgacgacgctgggtggactggctccaaaggagatgacgttgagatgagga

SEQ ID NO: 39747 - DNA, 441 bp, Oryza sativa
  Clone ID: PAT_MRT4530_43256C.1
ctgtaagactctctggcatggaaattagtgatctcacccttgaacttagtgacttgagccaggagatagcagatggtgtgaacaagtcggccaaggttgctcaggcagtggaaactggcctagggcaaatgcgtgatctggcgatgcagcaggcaacatcaatgattgaagagcgagcaaacttgcaaactatcccaaattcagctaagaagtcgaatggttcttcgacccgacagcggcgacaggagaaaggaaaggaccattcaaccgatagaatggaaccttgacactctaaagatgtatgaatttctttcctcgttgctacttgcttaaggattggttattagcttttttttctaggtagttcttgtaaatgaaatgtatgttcaatgcaatgttatcttttcgtcaaaaaaaaaaaatttaaaaaaaaaaaaaaaa

SEQ ID NO: 39748 - DNA, 2180 bp, Oryza sativa
  Clone ID: PAT_MRT4530_43257C.1
cgggctgcaggtctcgactctcctctgctccgagcatccgactccgcgcggccgaaagaaaaaagaagaagaagaagaagaagctggcttgaagatatggcatctcttactccaggggtactgttaaaagtactaaaaaatataaattctgatgtgaaagtatgtggagaatatcggtccattcttctccaagttattagcatagttcctgcaatcactggttcagaactttggccagaccatggtttctttataaaagtttcagactcgtcgcactcaacgtatgtttctttatcgaaggaggataatgaactcatcttatcaaacaaacttcaacttggacagttcatatatgttgaaaaggtccaatctagtatccctgtcccagttcttgttggggttcgacctgttccaggaaggaacccttgcattggaaatccaaaggatttgatgcagatgtcaactcccactgggatttcagaagcattggctcatcaacggaaggctacaaagtcagctgaactgtctgaaagtgaaaaggagaactctcagaggaaggtagtcatcaaagagcagaaggcagttgtagcttcacgttacatgcttgggatatctagcaacaatagcaaaattaccaatctaaactccagcatagatagtgacaaaagtaatggaggaagtagcatatgttctgcaaatcagaagtcagctccgacaaaattcaaacaagaatcaaaacctcaggaacggccaaatactccatctcgcagtcctgctaagatagtttctgcaaaacaagaaattaacaaggacacacgcaagactagcgcttcttcacccagtcagaatggctcagctgtagtgaagaagcaaatgtcaaaggacagcaaaaaggagtctgcatctgaaaaaaactcaccaccaaagctttataagacttcaccaccaacaccaacaccaacaccaccaccgcctgcaatgacttcaccaccaaagctcaatttggcagcaaagcctaatggtacttccggtacagttacttctacgccgactgttaaacgaagagttactgaaactgtctcctgggactctcttccaacaagtctaatcaagtcagtaaaggttgttgcaaggaggaagactattgctcttgtagtagcagctgaggctcaaagggaggctactgcagcggcctcacttcttaaaggccttggaatattcgctgagatcagaaagtccgctgaggaggatccacatgctgcaattaccaagttttttcagctaaaccggcttatcattcagcaaagtgttttttggaaagattactcatcagagcctgtcaaagaatctcggccagagaaggaaaagccatcaaggaaagcctctgcatctcagaacaaagctgttgcaggtagtacggcaaagaactctgacgatgcttacacaagtgaaaagattgactgggccagagaggatggtttcaaggagatctccagatcatggattattctaaagaaagaatcacagtcatggtttctcagtttcttggaagatgctcttgaagctggattcaagttcgagggccaaaacaagaacaccagagaacgagtaagagggcactccaagggcggagacgggcaaatcgcggttcggttgtcgcaactgaaggagacgagtaactggctcgaccagttgcatagtgaggttgataaatctcaagatgctttggttgaaaccattgagcagctgaagcagaaggtgtacacctgcttacttgggactgtcgagactgcggcatcagcacttgaagccaggtagatgctgtcacaggagctcagggctggttgtgtttattttttggcttggaaccagctgaagggagtactctgctgtaacagaactgcaacacacaatatgatcgatcctgatgccaaggagagtgaaggaatcgatcatctaagttatttattccacttgtacaagatgacgtagggagtgattgaggtgtaaatagccgctgtgtgtgtgtgtccacttttaagttatgcattaatttattcattttggcacgtggtcatgtttgctgttgcgtgttgcaatctccgatactcttcatgtttgctcatacgaagtacaatctgaaagctttccattttcacccttcaaaaaaaaaaaaaaaa

SEQ ID NO: 39749 - DNA, 532 bp, Oryza sativa
  Clone ID: PAT_MRT4530_43258C.1
gcacgacgcacaaagccggggtagcttgaggtagtggtgccctggattctaaggtaagatccacagcaacgccatgaacacgcaggtcgacgtcgagaatgtggacgtggtcatcaagcctagaatggtacctgcccatcagggttggcagactagcctctgcgactgcttcggagacggctgcgaatcattttgtttgagtgcttggttcccttggttgtcgatttcctgcatcggtgaaatcgtcgatcaaggcttcacagagtggtgctgtatctgcttcatctacctcattgccgcttatttcggcgtgtggtgggcgtacgcggggtggtaccgcggaaagctcagggcgcagtatggcttgccggaatcgcccctgccggactgcctcacccatctcttctgccactggtgcgcgctggctcaggagcacagggagctcgccgcccgtggatacaacgtgctgaatggaacttactccctccgtttcaaaatatttgacaccgttaactttttagcacatgtttaa

SEQ ID NO: 39750 - DNA, 321 bp, Oryza sativa
  Clone ID: PAT_MRT4530_43259C.1
atggggtataggagcctcctgaatcctgatacagatgaggatgttagatggggtgactcagctagactgatcctcaccggagacaggacccatttgttagcttatactactctcttcttcttccttctctttctccctccctttctatcttccctggggcgggaggcgacaataggaacacatggcggcaagggcgaggtggggactgaaggtggcggcaagggcatggcgggcaatggcgatagagcaacgggggatgggagccacgccaatgacacggggtggcagcggccaccgtggatggtggcgagtctttggtga

SEQ ID NO: 39751 - DNA, 1185 bp, Oryza sativa
  Clone ID: PAT_MRT4530_4325C.1
atggacggtgcgaaatcggggaagcaatgccatgtctgccagatctgcggcgacggcgtgggcacggcggcggacggcgagctcttcaccgcctgcgacgtctgcgggttcccggtgtgccggccatgctacgagtacgagcgcaaggacggcagccaggcgtgcccgcagtgcaagaccaagtacaagcgccacaaggggagcccgccgatacttggggatgaaagcgatgatgttgatgcggatgatgctagtgatgtgaactatccaacatccggcaaccaggaccataagcacaagattgccgagaggatgctcacctggcgcatgaactctgggaggaatgatgatattgtccattctaagtatgatagtggtgagattggtcatcccaagtatgacagtggtgaaatccctcgcatatatatcccatcgctcactcacagccagatctcaggtgaaattcctggagcgtcccctgatcatatgatgtctcccgttgggaacattggcagacgtgggcatccatttccctatgtgaaccattcaccaaacccatcaagggagttttctggtagccttggcaatgttgcatggaaagagagagtagatggctggaaaatgaaggataaaggtgcaattcccatggctaatggtactagcattgctccttcagaaggtcgtggggttggtgacattgatgcatctactgactataacatggaggacgccttactgtatgaccgggaaggtgaaccatctcaattggctcctgttgacatttttgtcagtactgtggatcctatgaaagaacctcctcttgtcactgccaatactgtgctctccatccttgctgtggattaccctgttgataaggtatcttgctatgtgtctgatgatggagctgcaatgttaacatttgatgcgcttgctgagacttcagaatttgctagaaaatgggtaccgttctgtaaaaagtacagcatagaacccagagctccagagtggtactttgcacagaaaattgattacttgaaagacaaagttcaggcttcttttgttaaagatcgtcgtgccatgaagagggaatatgaagaatttaaagttcgtgttaatgctctcgtcgccaaggcacagaaagtcctgaggaaggatggattatgcaagatggcacaccttggcctg

SEQ ID NO: 39752 - DNA, 1816 bp, Oryza sativa
  Clone ID: PAT_MRT4530_43260C.1
atggcggttcgccgccggcgacccggccccgtggcggccgccgtgctgctgctactcgcggtggcgacccaggcggcggcgagcccgataaagacggtggtggtggtggtgatggagaaccggtcgttcgaccacatgctggggtggatgaagcggctgaacccggagatcgacggcgtgaccggcggcgagtggaacccgacgaacgccagcgacccgtcgtcggggcgcgtctacttcggcgagggcgccgagtacgtggacccagacccgggccactcgttccaggagatccggcagcagatattcgggtcggacgacgcgtcggggccggcgaggatggacggcttcgtgcagcaggcgcggtcgctgggggacaacatgacggcggccgtcatgaacggcttctcgccggacagcgtcgccgtgtaccgggagctcgtcggggagttcgcggtgttcgaccggtggttcgcgtccgtgccgtcgtcgacgcagcccaaccgactgttcgtgcactccgccacatccggcggcgccaccagcaacaacccagagctgctggcgaagggctacccgcagcgtacaatcttcgacaacgtgcacgacgccgggctgtcgttcggggtctactaccaggacgtgccggcggtgctcttctaccgcaacctgcggaagctcaagtacctgaccaagttccacccgttccacggcgcgttccgcgaccacgccgcccgcggctccctcccaaactacgccgtggtggagcagcactacatggactccaagtcccacccggccaacgacgaccacccgtcgcacgacgtcttccagggccagatgctcgtcaaggaggtgtacgagacgctccgcgccagcccgcagtggaaccagacgctcatggtcgtcacctacgacgagcacggcggcttctacgaccatgtccccacccccgtcaccggcgtccccagccccgacggcatcgtcggcccgccgccgtataacttcgcctttgatcgcctcggcgtccgtgtcccagccatcgtcatctccccctggatcaacaagggtacagttgttcatgggccaaacgggagcccaaccgcgacgtcggagtacgagcactcgtccatccccgcgaccgtgaagaaactcttcgatctgccacaggatttcctgactaaaagggacgcctgggctggaacgtttgagagtgtcgtgcaaggcagaactgagccaaggacggattgcccagagcaactcccaatgccgatgaggatacggctgacggaggcgaacgaggaggcgaagctgagtgagttccagcaggagctggttcagctggcgtcggtgctcaacggggaccaccagctgagcagcctgcaggacacgatcagggacaggatgaacgtcagggaaggcatcgcgtacatgcggggcgctgtaaagcgcttcttcgagaccggcatgtcagccaagaggatgggcgtcgacgacgagcagatcgtcaagatgaggccatcgctcaccaccaggacatcccctgcgatcgagcaaccatagaaatagaaacaagagcaatagaagcaaataaggatacaggtttattttatatgctgaaaaagaaaaaaaatcatggtgcttgcatatatgtagcagagccagcaaggagtgctttgttctagaattagttgagatctctcatggatcgatctatatacatggccgggctgtactgtacaaattgatgaaacgttaattattggcttagtatacagatcgatcgattgcagtgcacttggcattttagcaatat

SEQ ID NO: 39753 - DNA, 152 bp, Oryza sativa
  Clone ID: PAT_MRT4530_43261C.1
aaagtacatttccgcattaagtttttacgatattattaaggagtaggaacagacgcgccacctagcaaggaaaaagaatataactacaataagaagtgaaggtgccaattcacagtttcgatgatgaaatggtgaacaaactagatgttttt

SEQ ID NO: 39754 - DNA, 732 bp, Oryza sativa
  Clone ID: PAT_MRT4530_43262C.1
attgtgacttatttcatcagaaaagatacatttgctttttacactacagctcttatttatataaggtgaaactacataattcaccaaataaatttaggtttcaacatacacatgttaattaaagaaatatcaaagctttaagacaagctagcttgcctaatctacaaattcagacagtcatgtgacatctcaacagatgaagcagctacatatatttcatcttaatatatctatcagcagaccaaagcaacaaattcttccatagatcaataattcaatatcgaatcagtcaagatgatgggtggctgctgtttgtcgccttgcagttaatacttgagtgtagatccttggcaattgttagatactggtaaggagacagatagcaacacatgtgtaaaacactgtgcgattggtagaaacagaatggatatgaaattctagatttgacagatgtttccgataattggggcatatgaaagggttactggggcggtcacaaattggtgagggactttggagaactactaaggtgtgttcggctgagagcgttcccagcgcgcacagtaaacacgggaaaaggagcggtcattagcggcgtgattaattaagtatagctaatttttttcaaaagggttatttggttttttaacaacttgctgaaagaaaaataatctagcacaagataaagttccatgggcataccgtttactttaactaaaaacaatttcaaat

SEQ ID NO: 39755 - DNA, 2411 bp, Oryza sativa
  unsure (1)..(2411): unsure at all n locations
  Clone ID: PAT_MRT4530_43263C.1
atgccgcctccccgccgccgcccgcccgcgcccgggcttctcatcctcctcatcttcctggcgctcgcctcccccggcgaagtcgccggtgatgacgccgcccccggcaatgtcaccgcctcggcgccgctcccctgctccgagctctcgcgcgtctgcacggcgttcgtcgcgttcccggcggccggcgaggccgcgaacgcctccgtgctggagtccatgttcgacgccgcgccgggggacatcacggccgacgcggccgccagccccgggtacgcgttcgtccgcaagaactgctcctgcctcgcctcccgcacatacctcgccaatacgacctacactgtcccctccgccgccgccggggcgacggcgaacgccacggcggccgacgtggctgccgcggcgtacgcggggctagccgtgccgccgccgggcggaccggctctgcggccgccgcgccccggcgccgtggtggctctccacctgctctgtggctgctcatccggcccctggaactatctcctcagctacgtcggcgtcgacggagacacggtgcaatcgctatcaagtcggttcggggccagcatggacgccatcgaggccgccaatggcatggccggccctgatcctataaccacgggaaaggtgtactacatcccactcaactcaggtgaacaaatgtttagcgatcattcactccggcaatttgatcaatcaaacttccctatttacacacgttcctggacaaccatatcccgtgatatctccttcctctcctactcctgcgccagcacccgcacaaaatacattctcaggtatggagatgtatcagaacatcattccacaaaattcccttatggatgggttattggcagcatgggagttgcacttgctttgattgctattgctctccttgcacttgttctgtgcaagctctcccaatacaatccccaagctccaaataaccagggaaagagcccagaccagtctatatcacacaagtttcaacttcttaagagtggtagtttttgttatggttctggaagatacttatgttgccaatttggaaatgtgaaacaatcaagaacggatggcagtgatcatcatatgaataccccaaaaggtgttgtagtggacgtgtttgatagggagaagcccattgtgtttacctatcaagaaatacttgcatcaaccgattcattttctgatgcaaatcttctgggtcatggtacatatggctctgtttattatggtgttcttcgagaccaggaggtcgctataaagagaatgacagcaactaaaactaaagagtttatagtggagatgaaagttctttgtaaggtccatcatgccagtctggtagagttgattggctatgcagcaagcaaggatgaactataccttatttacgagtactctcaaaaaggttcactcaagaatcaccttcatgatcctcaaagcaaaggttacacatcattgtcttggatctacagggtccaaattgctcttgatgcggctagaggacttgaatacattcatgagcatacaaaggatcattatgttcacagggacatcaaatcgagtaacatcttgctcgatgaatccttcagagcaaagatttcagattttggtcttgcaaaactggtagtgaagtcaactgatgcagaggcttctgtcacaaaagttgtgggtacatttggttacttggcccctgaatacttgcgcgatggcctggcaactacgaaaaatgatgtttatgcttttggagtagtactttttgagttaatatctggaaaggaggcaattacaaggactgatggattgaacgaaggatcaaactcagaaaggcgttccttggcatcagttatgttgagtgcactaaagaattgtcgtaactcaatgtatatggggagcctgaaagactgcattgaccctaatctaatggacctgtatccacatgactgtgtatacaagatggccatgctagcgaaacagtgcgtggaggaagatcctgttcttcggccagacatgaagcaggcagtaatcacgctatcgcaaatactgctgtcgtcgatcgagtgggaagcgacgctagctgggaacagccaagtgttcagtggtcttgtggctgggaggtgatcctgtaagattggcctggttgctacggtgctatcccatgcgctcttcggtgatctccttccctgctccactagaggcgttttcccctgtaaccttctcctgcattttgctggtttcttgcccagttgagcagttttctgcatcttcttttcaaagtatctaccacagtgcaatatatttcttggtgggtgatatgtaaccatgtatgtataccaaatgtgccttgcaagttctaatgcaatgatcttgcnccaaaaaaaaaaaaaaaaaaa

SEQ ID NO: 39756 - DNA, 200 bp, Oryza sativa
  Clone ID: PAT_MRT4530_43264C.1
cggacgcgtgggcggacgcgaggactgaatactaaaacaagcggctagcaacaagggaagcgaacttgagttgctcgccaaatgacactcctggctcgcagatacgtcgacactggcagaccgctaccaagaacaggcggtttacacttccgagacactgtgtaagccaggaatgatgtacacgacgtacaacgtggcga

SEQ ID NO: 39757 - DNA, 724 bp, Oryza sativa
  Clone ID: PAT_MRT4530_43265C.1
tttgttttttttttattttcgtcgttccttctttttttttttttttttttttttgaacaataccgatatattaacaacaacattttggagatatcagctaggagaatcacactctagcaacaattctacatgacattttccatcttgttttcaaccttttttcccctcttctcgatacagagcaagcaatgcaaaatgcaagaaccaatcaacagagctacgtagtcagttaagaagatgatgatgatgacgatgaagatggtgcagccatggcagccttgttttcagtggccgaggatggtcatgtgggtgtcgaacgacggcagctcgtcgtcgtcgccgtcgtctccggtgagggacgggaaggacggcagccggacgccgaaccccccttcctcctcctggttctccggatcgtggcggtcgtcgtgccggcacgtcttgtccttgagcgggttgcacccgtgccccttcgacggcgccggcgccgcggcggcggcgtcctcctcgtcggcggcggcggcgtggccgctggcgtggccggcgcgggcagagcggacggcgatcgcgcacgccacgagcaccgcggcgagcacccacacgcgcgtcgacgctgccatggcggccctagcttcgcaacaatatataccaaagctttcctcggagatgtcaatgcgatgcgcggcgcgatcgaaccggacgcgtgggtcgacccgggaattcc

SEQ ID NO: 39758 - DNA, 563 bp, Oryza sativa
  unsure (1)..(563): unsure at all n locations
  Clone ID: PAT_MRT4530_43266C.1
gaaatntttttttttccnaaagggggaatattaaagattggggggtaaaaaacccccaggggggttttttttcccctttaaaaaaaaggtttgttaaaaaaggggggggcccagtgggaattttttaaaaaggaaattcactttttgggggggaattgggggaaccgggctcccctttttttttttttttagttttttgtccctcgtaaataggattctcccaattccataaatttcatgttatgtattttataaaagatttaatttaaatttcgataaagatggatgagcttcaggatgctccattattccaataacaaacagaagcaatagctgcgtttcactggaataaaacattgcgggagtggggaattaactcagttatcagtatcagtatgtactacttggaattggaaagccactgttagagcaaaattgcagaaaccaattcgccccaagaaaatgcttcaggccttctttgtcaccaagcgacaaggtcgcaggtagttttatgctatgtacaccatcacaaacttgactcatgcttccacaagtccttgact

SEQ ID NO: 39759 - DNA, 369 bp, Oryza sativa
  Clone ID: PAT_MRT4530_43267C.1
atggaacgtgacggttgcgcgccgcgtggtgactcggagatgatcgtgggcagtggtgtggccgtgaacgacgagcggaggtcgacggcgaggaagcaggatcaggcggtgatgtggtcttcgagatgggcggcgattagtggcggctcgagatggggatcggcgccgaccaaacgcggtggtggtcccggtgatgtgagagggggaatcagtgacgacgagctggggacaggggttcggcgacctggatttggggcagaggaatcggctaccccttcatgtggaggcgaaggaatcggcgatgaatggcggcataagcgcggtgacgtttgcgagaggaaaaagatgggggcgcgcgattttttttga

SEQ ID NO: 39760 - DNA, 804 bp, Oryza sativa
  Clone ID: PAT_MRT4530_43268C.1
ccggccggggggcgtgacggaaggacgagggaaatttacatagttcttctctgcgcaatccaaacttactttattttttgcaacttacatctctcaaagcttgctctgtaacaaccccgcacccttgaagcaacacaagatacgagtcggtacacgacaaaacctatttatttccgttcattcgagtatcgaggaacaaacgcgaaacctgaaccgaagttatcaatctcgaagccatcatgaatttcctctactcaacagttaacacactgcgggatcgctacacgcctgtatcccataagtcaaccttccgccagaccggccaaatcacccccgaagagttcgttgctgctggcgactacctggtctacaagttcccgacctggtcctggggcgatgccgactctcccgaacgccgagtcagccacctgcctcccggcaagcagttcctcgttacacgcaacgttccctgccatcgccgtctgaacgacgactttgctggcgacgctgggcacgaggaagctctcgtcaacgacggtgacgatttcaagggtaacgcaggcgatgacgaagatggctggttgaggactggtgggctggctagctcacagccgctcaaggtcaaggaggtgaggacggtagacgattcgggaaatgtcggtgacagagaggttgtggaggatgatgagattcccgacatggaggacgaagacgacgacgaggccatcattcgagattctggcgccgattcaagaacagcgctcaccgacatacaccttgtacatcatgtactctccatactat

SEQ ID NO: 39761 - DNA, 1326 bp, Oryza sativa
  Clone ID: PAT_MRT4530_43269C.1
agaagcagccaccttatcttctcctcccggcagcgaattactggcgccaatggccttgagcttcctgaacactcctccctccaaactcgcgcccaaaccgtcgttcccgccaccatctcggcagttcgcgccaccgcagcggcagcgatctcttctccatctctcgctgctcctccgcgagcagcagccgccgcgacccgtccgctcctcgtcgtccacgcaggcgggcgcggccccctcgccgccgtcgtcgagggaggaggccgtgtcccaggcgaggtcctgcctcgccgccgcgctgcgcaagccgctcggcaagcagaggaagcagcagcggcagccgcggttccgcgccgagataccagtcgtcgacgactcgccgggctccctcgcgcgcctcgcctccgacgtgttctcgtcgggcctcggcttgtcgaggaagggcggcggcggcggcgcgccggcgaggctgctgctcgtgtggccgtcctccgaggagatgggtgtggctctacgggagccccatgattggggggaatccacggcgcacgcgcagctcgacgcggtggcgcccgacgcgctgagcagctgcgacgccgccgtgttcctggcgcccgggcggtcgcaggtggagaagatgaaggccgccgccgacgcgctggacaccaagccggtggtcatgttcaacccggcgtggagcttcgacgaggaggaggaggggttcgccggcggcgcgaggggattcgtgggctccttcagcgtggtgtactccttcacggggctggaggtgaggggccttctgagcaagaagaagggtgtgctgctccggtgcgtcgacggcggcaggttcggcggcgagagctgggtgctcatggtggaggacgacgccgccgcgccggcgtcggagcagttcaaggtggtgtcgcggctgaagcggcggccgacgatcggcgaggtggagaccatgctgtacaacgtcatggccgcaaactcgccggtgaccaagtcggcaagattcctccgggggctcgtgtccaatgtcaccggaggaaggaaggagaagaagcaatgactttctcgaggccacttgttgcagtgaattcatcagtactagatttttttttcttttctgaatgaattcgacagtagcagatgttttcatgtaattttacgatttcgagaattcgttcagactgcatatgagcgaattcgccagtagaagtttgcagtgaaccgtaacgagtttgatgagttcatatgcttccatgtgaattaaatttgaaaatatattgttcatttaattttttatccaaaaaaaaaaaaaaa

SEQ ID NO: 39762 - DNA, 4264 bp, Oryza sativa
  Clone ID: PAT_MRT4530_4326C.1
acagagcaacattgatttcatattcccattaagtgcagcagaatgttgtcaggcatttttcagcaaagtagttctactaacttaattatcaacagatgaacagcaaggtaccacttactactccttaatacataacaagcattccggcagctaagatcttacagtagactatatagagtcatccactaataacttacacaacagaatggatagcaaactggcgattctttgcctactatcttgctcactcctagcagttgataccacatttttgggtatcagggcctgtgacacgggtggtgaatggatcgatacgaacccacagcaaggagaagatcgatgcaaggaggatggcccaaacaacaacaatggtcggtgtacggttctgccgacccatgagacccttaaggaaggggtacaggtggacaatcacccagaaggcaaagaagagcttcccaaagagcggaccccatgactggtagccactgttgatagcgtaggagataccagcaacaacaccgaccaggttgatgatcaaaatagtggtcggtgggatcagaagggttgtccacttgaacatgtagagctcagcgaaatcgccttcttcatcagaggcctttgaggtgacagtgaagctggtatcaattccagcaagcaccttcagcagaccctggaagaccgcaaatagatgagcggaaatacctccaataacccaaaactgctcattcctccaccattcatcgatgccaacaccactccacctcatctcaaggataccagtagcaaagattgacagaaagagagagataaaccaaatactcgcaaagttgctaatctctggtatgatgaacttcccagtgagaagacagatagctggcaatatgcagtacaagaggagtggaatcgatgtgagtggataaatagtggtgttgatgtaagcaaatctctccaggaacttaagccgtcctccgtacccataccatatgggacaatgcctgctaaaaagaatttccacagaaccaagagcccaccgaagcacctggttcagacgatccgaaagattaattggggcagaccccttgaatgctggtcgcttaggcatgcagtagattgaccgccagccacgtgcatgcatcttgaatccagtgagaatatcttctgtaacagaaccatagatccatccaatctcagttccccagtcacttttgtcttcatagccacagctgataacatgtatggcctctttcagaagagattctggagttgcggattgaggaacaccaccatattccatcagagtggaggctacaaaaacactagattgaccaaatcttttctctaagctcatttgagacatcagtagtgatttctcatcatcaaatccagaaccttcaatcccttcctctatatcttcaagattaaaaactggcacagaactgtccacatgtttgtgtgactttttcttttccgtgctcttctccttcgacttttttgtcttctttcgtcccccacaaagcgaagagaagtaacctggcctcttctgcttaatggggggttcataaccataaagagctgttctgttgaacacacaaccggttcccacataaactggtccttggagaccatcgagacctctcaaattaatatcgaaaaacacggtgttcctgtttgcatatcgatcatttctatcgataccgtcaaacctctgagggaattggacataacagacacgccttcctaggtttggatccataaggaagcacatagcctctcggagagctttgctattgttgatgtagtgatcacagtcaagattcaacaagtattgtccattagtaaggacagctgatacacgaacaagtgcattcatagcaccagcctttttatggtgttggaatccaggacgtttctcacgagacacatagactaaacgaggaagctcattgccttcggtatcaaggcctccactatgaccaaggaaaacctgaatcattccaggatggtctctggtattgttaccaggccaaggtgtgccatcttgcataatccatccttcctcaggaactttctgtgccttggcgacgagagcattaacacgaactttaaattcttcatattccctcttcatggcacgacgatctttaacaaaagaagcctgaactttgtctttcaagtaatcaattttctgtgcaaagtaccactctggagctctgggttctatgctgtactttttacagaacggtacccattttctagcaaattctgaagtctcagcaagcgcatcaaatgttaacattgcagctccatcatcagacacatagcaagataccttatcaacagggtaatccacagcaaggatggagagcacagtattggcagtgacaagaggaggttctttcataggatccacagtactgacaaaaatgtcaacaggagccaattgagatggttcaccttcccggtcataccttaaagccagcctatccaggtaagtttcacggttgattggggaccacttggggaactgatccagaatccaggatagagcaaaccaaatctcacatatgacagagagcaaccatagcgggtatgcattacgcacaggatttgtgatacggtagtgcaagaatatacataggacaatcaatcggagcacaataaccatcctgtacggatttattctggatgacgaaattggcacttttctcgatagaggttggcgtgtttcatcattcagtaaggcgtcctccatgttatagtcagtagatgcatcaatgtcaccaaccccacgaccttctgaaggagcaatgctagtaccattagccatgggaattgcacctttatccttcattttccagccatctactctctctttccatgcaacattgccaaggctaccagaaaactcccttgatgggtttggtgaatggttcacatagggaaatggatgcccacgtctgccaatgttcccaacgggagacatcatatgatcaggggacgctccaggaatttcacctgagatctggctgtgagtgagcgatgggatatatatgcgagggatttcaccactgtcatacttgggatgaccaatctcaccactatcatacttagaatggacaatatcatcattcctcccagagttcatgcgccaggtgagcatcctctcggcaatcttgtgcttatggtcctggttgccggatgttggatagttcacatcactagcatcatccgcatcaacatcatcgctttcatccccaagtatcggcgggctccccttgtggcgcttgtacttggtcttgcactgcgggcacgcctggctgccgtccttgcgctcgtactcgtagcatggccggcacaccgggaacccgcagacgtcgccctccgtcacctaagatctggcacgcctgcccgctcccgtgcctccccgacttttgcggaacagatcacccacaaaacctaaaatcaaaatctggactctcctccgcaagatccacccacgagttgcggtgcatttcgggcggccattcaccacggcatccgcgtcgccatccatggcgcacgccgcagcagcagcaaaccagttctcagctcaccgaatcacgcccaggatccgtacaccgggatcagcaccgccgcatcccgcgcaggaatcctcccggcgaagaaggcttccagcagaggacgcgggagtggacgggaacttcatcctcctcagcgccgcccgatctgtcatcgacgagcccggtgccgctaaatcaagcgaccaagaactcaccatcaactgattcgacagcctaaagccaacctggatcactctgaaggaacggccgacgtcgacacttgcaatgaacctcaatgtgctagccctcgcctccggatgaccggatctgccggcgaggagctcgtggctgccagatccggtgaccacggcctgccctccaccggatttagtcccacggcgttaaggaggaaccagatgcctctcccttctccttttttttttctttctccgagaaagctcggctggtcaactcaatgcagcacacaagaggtggtggttggtctccgccatggcgagctcatcatccgacccccacaagctcaccacgacggcgagaagaaggcacggcgatccagctgggtgtgagaggagcaggcgacggcgacgcagcgaggagagcgggtggcggcggcggcgctgcgaggaggccgggcaacggcggcgacgcagcgagggcgcgaggaggaggagccacgaagcgtc

SEQ ID NO: 39763 - DNA, 1407 bp, Oryza sativa
  Clone ID: PAT_MRT4530_43270C.1
atggccaccgtcgaccacctgaagcgcctctgcatcgaccactacttccaggacgaggtcgacggcgccatggatgcccacctcgaggagctcgcccatggcggcgacctgctcgatgccaccctcgcgttccggctgatgagagaagcaggacaccatgtatcaccagatgaggttcttggaagattcacagatggaaatggcgatttcagcatggcttacagcaaggacatcagagggctactcagcctgcaagacatatcacacatgaacataggagcagaggcctcactctacaaggcaaaggagttcacaagcagaaaccttcaatctgccatcgattacttagagccaggccttgcaagatatgtgaggcagtcactggaacatccctaccatgtcagcttgatgcagtacaaggccaggcaccacctcagctacctgcagaccttgcccaccaggtgcactgcaatggaagagcttgctcttgcaaacttcaagctgaacaagctgctgcatcagatggaaatgcaggagatcaaaagatggtggatgaacttgggattggctcaggaaataccagttgccagggaccaggtgcagaaatggtacgtctggataatgacggccttccagggtgcttccttctccagataccggattgagctcacaaagatcgcctcctttgtctacattatggatgacatctttgatcttgtcagcacacaagaggagcgctcctgcttcacacaggcaatcaaaatgtgggactttgcagctgctgattccttgcctagctgcatgaggtcatgctacagggctatttacactgttacaaatgatatcgcagatatggtcgagagagaacacggagtaaaccctatcaatcatttgaagaaagcttgggcagtgctgtttgatggattaatgactgaggcaaaatggttgaccgatagtcatgttccctcctcagaggattacctaagaaatggtgttatcacttcaggagtaccacttatgtttttacacttattattcatgctagggcatgatgcagcagagctcattgacaacatccctcctgtcatctcctgcccagcaaaaatcttcagactctgggatgacataggcaacgccaaggaagggttggatggatcatacaaggagttgtacctcagggagaacccggggctcgccgccagcgaagcggaggagcacatgcgcggcatgatcgccagggagtgggagaagctcaaccgtgagagcttcttctccgggagggccttccccgccggcttcacgcaggcggcgctcaatgccgccaggatggtcggcgtcatgcacggccacgacggcgagcagaggctccccgtcctcgaggactacctgaggatggtgcttttctga

SEQ ID NO: 39764 - DNA, 2043 bp, Oryza sativa
  Clone ID: PAT_MRT4530_43271C.1
atggcacgagggcccttggatctgtggaatgcatggggaacgcagatcctggtgctcttgagtctcacgctgcagatcctgctcctcctgttcgcagggatccgccggcgcaagtcatccgcggtggtggcggtgctgaggttcatcctctggctggcctaccagctggccgactcgaccgcgatctatactgttggccacctctcccttagcagcgcgccacgcgagcacaagctggtggcattctgggcgccgttcctgctgctccacttagggggcccagacaatatcaccgcctactccctcgaggacaacaagctgtggaagcgccacctcgtgactctggtggtgcaggtccttggagccgagtatgtcctctataagaatattttggaaagtggtggctcgattgtggtcgcctctattctcatgttcattgttggcactgcaaagtatggtgagagaacatgggcgctttacagggccaacttcagtagtattcaggctgcgctcaagaagctcccccgtactcaactgagagggtaccaaggctacctatgggaggaggatgggcacattggtacaggcagcgaagagttcctcctacagcgtgcccactcccttttccatatctgtgagcgtgggattgtcgactccgtgattgatgtagacaaaaccgaaaccgagagcaaaaaagtaatcaatcggctccagaagagcaagcccgagtggatgtggagggtgatggagatggagctgtcgctgatgtatgacaccctctacactaaggcaagagtgatacactcaatgtttgggtacttggtgcgaactgcctccccgttagccgtcgtcgcttccttcctgttgttccatttcagtgggaagcgtggtcacagcagagtcgacatcaccatcacctacaccctacttgctggtgccctgctcattgagactgcatctacactgaacgcagtgggatcgagctgggcactctcctacctgtgcaaaacagagtggagctggctccggcacgcagccctatgcgccagaagatggcaccggctgcggcgtgcagtggtgactgttcgccagtttatcaaaaccatgacgggaggatcatcaagcctctacggaagatcaaggaggtcgtcagggaacataggtcagtacaacctgctctacgtccgcagcagcctggagatggacaagacggacagaaagctcaaccgcttcgccacgaagctgagtttcggtgaccggtgggacaatacttactactcatggaccatcaagatcccagacaaggtgagggatcgtgttgtgagtatgctctctcggcatgatctcaacactatgggcatgctcaggcataaatggggcgagataggactaaacgatctgaagtatcctgggttgttcaaagagctcgatcatttcgatgacaacaatagctggcatggcgtagaattccacgagagcatcatatcctggcacatcgccactgagcttgtcctttttaaactcaatgccaactatgaggatgagcatgtgggcccaatcagagctctttccaactacctcatgtatcttctcgtcacccgccctgacatgctgcctggccttccccaaaactggttgtacgaaatgacctgcgaaaacctcgacgacatatgccatggccagcttgatccttcagacaagagtggtgtcagcgcggtgctcaagaagctgattggacgacatggtggcaccagaccatataagctagaccagacaaaccagctcgcagacatcatattacactgggagagtcggggtcaccagcctgaaattcctcgcctcaagtatgcacgcgaaatcgctaaaatagtattggagcgtgaggaagataaaaaggatattttgttcgacctttggacagattttcttatctacgctgccaaccgatgcaacagggaatcgcatgctaggaatctgaacactggcggtgagttcaccaccgttgtgtggctaatgatagaacacatttaccaaacaaagtaa

SEQ ID NO: 39765 - DNA, 443 bp, Oryza sativa
  Clone ID: PAT_MRT4530_43272C.1
attcccggactgggggcggatattgctgaagatgttatccgacgcgtgttcacatccgtaaacgctcgccatcattatactcttgagaaaatggggcatgttgttcatatattaacattctccctcactacgacgtgcctactacttaattgcgcaccctgccatacatgtgtctcatcagaaaacaaacacgtctaaacatttagcttcggcaagtcaaataattaactatatctcttctctattcacagatatacaacgtgcacttatactgaaaataccacatgcactcaaacaactgttattgttctaactggataaagtgactcaggattactacattcatccatgataaacttaacgccgacctagtccatatatttcaagacagattactagcagatctgagactattacctcaaatagtggaaaattgcaatgca

SEQ ID NO: 39766 - DNA, 348 bp, Oryza sativa
  unsure (1)..(348): unsure at all n locations
  Clone ID: PAT_MRT4530_43273C.1
gtactgcgggacttgcctaagtctacatcggttagagatcgaggaaggtgccgggataggtattcgtgttttgcagctcagacaccttgacaagctgatggatattccacctggcatcgagtttcttccatccctccaacgtctatgctttgtccatatcagtgaagatttccttgcattgctaaatcggtgttctaggctcaagcacattcagtggtggtattcaacgcatgatcagcctctgacgaagaaatctcaatcttgatggctngctagggctggcagcctgtcgaaggcaatggagaagcagagttcaaacatgtgtngtgatccttgcctcattcatca

SEQ ID NO: 39767 - DNA, 1501 bp, Oryza sativa
  Clone ID: PAT_MRT4530_43274C.1
gcacgagggaccgcaaccgggtgacccctgctccgaccaggccacccccgttctcctccccgccgccgccgccgccgccgccaccggcgcctcccgctcgtccccggccggcgagtcgcgtaggagggaagcgccaccggcggcggccgcggcgagatgagcggcggcggcggcggcgccgcgagcgcggtgttctacgcggagaagtaccacccgatccaggcgggcagcatcgacggcaccgacgtcgccccccacgacaacgccgtcctccgcgccctcctctgctccaccgccggcctctatgatccgttcggggaccccaaggccaccggcgacccctactgcacggtgttcgtcgggagactctcccgctacaccgacgacgagacactccggaaggagatgagcagatatgggagggtgaagagcatgcggctggtgcgggatattgttactggtgcttctcgtggctacgcatttgttgagtatgaaactgacagggagatgcgccgtgcctatgaggatgcacaccattccattattgatggcagtgaagtgcttgtagattactacaggcaacaacttatgcctggatggataccgaggagatcaggaggagggcttggagggaagaaagaatctggccagcttcgatttggaggtcgagagaggccatttcgtgctcccttgaggccaattccgtatgatgaactgaaaaggcttgggatcccaccaccacctgaagggcgatacatgacacgttatcaggttcccccaccaccaagacgaaaaagcagtgatatctacagggaagagtcacctcccaagagaagatccaaagacagggttgatagcagtcactacagaagatattgtagcccaacccaagacgacgacagcacggtcagcacccataggcggaaaggtagccatgaccggcgagaagaaaccgagaggaggacaagagcatatatcagcagagaggccggcagctacagtaagcggagcccaaccgaagacgatggtgatcgtcgtaagaggagaagaagccgagagcctggagaattatctccatacaaggaggatgatgataacagcaaaagaggaagaagttcagtggagccaggcttcagcccttatcagtctcatcaccacaggcatcacagggagcgtcatgacagcagcagccattctcgccacggtgaacgtcggcatcaagacgaccgtggaaaccactccaggaacaggagatcagagagccgggactacagccactagaggtgtcgagtccatggtgggttcctagtgttttaacctgaatccctggctgcctgttcgctgcttcaactcatgtatatgatctagttttctcaggcgtccttgccttgggttgcctgtgtagtgagggcctactaaccctgaagtttcgactttggaatacatgaattaatagaattcatgatttagttcaaaaaaaaaaaaaaaaaaaaacccaaaa

SEQ ID NO: 39768 - DNA, 411 bp, Oryza sativa
  Clone ID: PAT_MRT4530_43275C.1
atgctggatggccgcaaggacggcggcggcggggcgttctccccacgaggatgcccggcggcgggggacaccggggtttctcggcggcggcaggtcacaggaggtggcggccgggcggtcggtgcggcggatccggccacgttggttgcggatccaccttccccgacgccggatctggcctcgccgcggccagatcgggtctgggcgaccctgacgacagcggacctcgcgatgactgcggccggaggaggcacaacgtctcatccatgccgggagcggtcgccgagcggtgacggcggaggggacgacagaggactgcggaggttggcggcggcccaactgctcctgtcgatgcaggcggcggcttccgtcggcgccggtggccctaggggctgcggtggaggacggtga

SEQ ID NO: 39769 - DNA, 1286 bp, Oryza sativa
  Clone ID: PAT_MRT4530_43276C.1
cgaggccaccgctacgcctgcccccccccccccgagcttttacccctgtgccgcccgctccctcctctcctccccgccgtcctccgccgccgccgccgccaccgcctctgccgccgccgcgctcctatcctccacgtcgccgctccccgcggcgcgcttcctccagctccacgcgcacctcctccgcacgggcctcctcctcctcccactcgccccgaccgcggcctccgccttcctctccctcgccgccgcctccctcccgtcgcaccgggcgctgccggtcctcctccaccacctcgccctcgccccggagaccctcccctccacatttcgcctcaacgccatcctccgctccctccgcggccccgacgcgctccgcttcctccgccgcgcccgcgcgctcggccgccgcgggaacgccttctccctgtccatcgtcctcggccactgccgcgccctcgcccacgcgcgccagcttcacgccaacgtcgtcgccgaggggcactccccggacgccctcctggccacctccgccgccggcgagcgcttcgtcgactgccccgcctcccccggcggccgcccctccttcgccgcaaccactagggccaccggcgccgacgatagccgtcgcaacccctagggccgccagcgccaacgggagctgtcaccgtcctccaccgcagcccctagggccaccggcgccgacggaagccgccgcctgcatcgacaggagcagttgggccgccgccaacctccgcagtcctctgtcgtcccctccgccgtctgaagggactccgttgacgacgcctttccacctcccctcttctgccgtcctagccgccgggagctggggggagaagaagagacgagctggggccagcctcctgccgcctaccaccgctcggcgaccgctcccggcatggatgagacgttgtgcctcctccggccgcagtcatcgcgaggtccgctgtcgtcagggtcgcccagacccgatctggccgcggcgaggccagatccggcgtcggggaaggtggatccgcaaccaacgtggccggatccgccgcaccgaccgcccggccgccacctcctgtgacctgccgccgccgagaaaccccggtgtcccccgccgccgggcatcctcgtggggagaacgccccgccgccgccgtccttgcggccatccagcattgccgatcaacgagccgctcgggcctatcctctctccctcgttttccgcgcgcatgtttttcaaactgttaaacagtgtgtttcttgcaaaaagtttct

SEQ ID NO: 39770 - DNA, 639 bp, Oryza sativa
  Clone ID: PAT_MRT4530_43277C.1
tggcatgacggatctgtcaggagatctctcggcacacggtatatggggaggtggatggagtttgttcgtaccggcatgaggccagttgcgttgagcttgaggtcacaggagagccacacgtaccgcatgccacgcacctgccgatcgatcgagccgcacgcaacgcaggcacgggggctcgcgcgatccgcaaagtcgcgatcgatcgatggtggccgcgcgcgcgcggttaggtacgccgtgagccggcgaaacggccggagccgaacacatggcgcgcgcgcgtgcgcgatgcgagattgcgaggaaataatcgtattctcatgccgaggctaccacgggagacggagttggtcgtacgtgcgcccggtgcgccatgcggaatctcctggctcggcacgagggcggacggggcgtggcatgctcgcccgttcacctacgaccgcgactgtgcgtgcgtgtgtgtgttgtgtgaaggagacacggcttcgcatggaggggaaagggggcgtgagtgaaggggacacgtgtggtggactgggggctgggactgacggccgtgtgggtgagtggcgtggcgccatgtcgtttttgcctttttgtgtccgtgttgggccgatgagtgaaaagcaggagtag

SEQ ID NO: 39771 - DNA, 1493 bp, Oryza sativa
  Clone ID: PAT_MRT4530_43278C.1
tattttttttttttattttttttaaactatatgcaacaaattactttggttcttccattatcacataggcatttgacattgtacacctcttaccaattcttgatgaggcgacaggttagcactggaaccaccacacagccatagccatggaggatcagaattgagaagcttcagaagcttccaattcaagatcccttgaggccggacacctcgggaagcatgccctggatcctcctcagctcggccagcgcctcccgggcgtcgggccggtcgtccttgtccggcgccacgcaccggaacgccagctccgccaccgcctccacgctggccatcacgccggcgccctcgccgagcaccggctggtccaccacctcccgcagctcgcccacctgaatcttggccaccacccagtccgccagcgtcacgtccctccgctccctgcccacgtccaccggccgcagcccggtgacgagctccagcaccaccacgccgaagctgtacacgtcgctcttctccgtcagctggaacgaccggtggtagtccgggtcgaggtaccccggcgtgccctgcggcgccgtgcagcacaccagctccctcccggcccccgtggcgcatgcgtccggcggggacaggaggcgcgagagcccgaagtcgccgaggcgggcgcgcatgtcggcctccacgaagatgttcgacgaggtgacgtcgcggtgcacgacggcgggcttcaccccgaaatggaggtactcgagcgccgacgcgatctggaccgccatggcgaggcgcgtccgccaggggagcggtggcggcgggggcgccgccgcggtgacgccgcatcggcggtggaggtggtgggagagggtcccgttggggacgaagtcgtagacgaggagcagagcgcgcgggtcggcgcagaagccgtggaggcggacgaggtgcgggtggcgcagcgccgagaggatgagcacctcgttgcagaacgacttggtgatggtggcggatgcggaggggaacgacggcgacggcgacggcgggacgtggaggcgcttgacggcggcggggcggccgccgggcgggaggtaggcgaggaacaccgtcccaaacccgccatccccgagcttgcggcttggatcgaacccagcggtggcggcgcggagctgctcgtaggtgaacgaggggcgatgctggtggagcccgttccggcgaaggaacgccgcggcgcgggcggccgcgttggtcggccccgcggccggggccgggccccgcccgcggtagcggcggacggcgatggcgacgcagaggtagagcaggagcaccacgagcagcaccgcggcggcgacgagcgcggtggtgagcacgccgttgccgccgccggccttgtccggatgctgcggctgcggcggcgggggcgaggcgtggcgtctcgccgcggccggcgggggcagcgccgcggcggcgacggcggcggcgaggaggagaggcggtgggggcat

SEQ ID NO: 39772 - DNA, 386 bp, Oryza sativa
  unsure (1)..(386): unsure at all n locations
  Clone ID: PAT_MRT4530_43279C.1
tcgctttttttctttcttctttttgtgggggggtgggaccgtatgataaatacctcactagtggtatgttaaaaaaaaaaaaaatagaaataaaaaaaaaaaaaaaataaaaaaaaacaaaaagaacaacaaataacaaatgaaaaaatttaatggtgtaatactttaaacaaactcaaactgggggggagttgggggaccttcaacttcccatccatatntcntatctacggtaggactatagtgctcccaggagcattggcactgttggtggtgtctggtactgaattgtaacattgtaatagttcgtttgttaaaaataaagtcatacatcatcatgtgtgactgttgaaacttaggggggtgtgnatctaaataaaattttt

SEQ ID NO: 39773 - DNA, 346 bp, Oryza sativa
  Clone ID: PAT_MRT4530_4327C.1
acctctgtgccctcccttctcgcctcattccccaaagccgcacgcctccttcctctagtagacctgcctattcggaggattctcgtccctcatacgctccgaccgctaccatgtgggcctagtgcggccagtacgaggacgaggctcatcaagaacgctgcctacattgtcactcctggcaagggtatgattgctggagattagtccactggcaccattggaaagcgcgttcccagcatcaacgttgagaacgtagaggaaaaccgccgctccattcgcgagctctctcttctgcacccctggcaccctccacaacctcaccgaagtgatcctcttgaaggagacc

SEQ ID NO: 39774 - DNA, 1449 bp, Oryza sativa
  Clone ID: PAT_MRT4530_43280C.1
atggcgaagccctcgtcggcggcggcggcgtcgggcggcggccgaggcccggcccaccaccacaggacccgcctcctcctcctgctcctcctcgccgtcgccgcctgcgcatccaccgcgggcttcctcctctgcggcgccatgctggacccctgtgacgtcgacgcgcgcaggggctcgggctcgtcggcggcggccgtcgcgaccacccgcaccggcgccgtcgcagggaaccccctcgagttcatgaggtccaagctcatgctgctcgtctcccacgagctctccctctccgggggaccattgttactgatggagttggcatttcttctgcggcaggttggttcgcaagtggtgtggataacaaaccagagatcggaagaaacaaatgatgttacatatagcttggagcataagatgttgagccatggagtgcaggtattacctgctaggggacatgaggcgattgatactgccctaaaggctgatcttgttatcttgaacactgctgttgctggcaagtggcttgatgctgtcctaaatgaccatgttccccaagttcttcccaagattttgtggtggatccatgaaatgcgagggcattactttaagcttgaatatgtcaaacatcttcctctggttgctggagccatgattgattctcatacaacggctgaatattggaagaccaggactcatgaccgtttgaaaatacagatgccacaaacttatgttgttcacctcgggaatagtaaggagttaatggaagttgctgaagataatgttgcaagaagagtcctacgggagcatatccgtgagttccttggagtacggagtgaagatcttgtgtttgcaataataaacagtgtttcacgtggaaaagggcaggacttatttcttcaagcgttttatcagggtgtccagctcatcgaacagaagaagttaaaagtgcccacaatgcatgctgtagttgtgggaagtgacataaatgctcagaccaagtttgagacacaattacgtgattttgcggtgaagaatgggattcaggaccgggttcactttgtaaacaagacattagcagtggctccttatttggctgcaactgatgtgcttgttcagaactctcaggcccgtggagaatgctttggaaggataacgattgaagcaatggcattcaagttgccagtgttgggcacggcggccggagggaccacggagatcgtcgtggacggctcaaccggcctcctgcaccccgccgggaaggaaggcgtcgcgcccctcgcgaagaacatggtaaggctcgcgagccacgaagaggacagggtctccatgggtaggaaaggctatggcagggtgaaggaaatgttcatggagcaccacatggctggtaggatcgcggccgtgttgcaggaagttctgaagaaatcgcgggaacattctcactcttga

SEQ ID NO: 39775 - DNA, 597 bp, Oryza sativa
  Clone ID: PAT_MRT4530_43281C.1
atgccgacggtgcggcggcgccacccggacgtgcacgtgaaggcgctggagggcatcgtgtcggccaacaccttcttcacggtggccgtcttcatcggcatcaccggcaccatcacgccgtcgtcctcgatcccccccaactgcgtcgccggcgacgacatcgcccgcaacttcttcctcttcgagatcctctccttcggcttctacctgctctccagcctggtggcgcagggcatgaagctggccgtcaccctcctcgccaccgacgacttctacggcgacggcgagcagaagcccccgccgtccgacgactgcgaggagatgcccgcgtggcgcgccgccgcgccgcgggagcgccgccgcgccgtgctccggttcgcgcggccgatgatgctgctcgcggcgggctgctccatcatgggcaccttcttcctgctgctgtccatggtggacgccatccagctcaagttcggcctcgtctcctgcaacatccccctcgccgtcggcaccaccttcgcgctcgccgtgctcgtcgtcgccggcctcgtcttctacggcgccaccgtcgcctacgcgctcacgcactacctgccctga

SEQ ID NO: 39776 - DNA, 606 bp, Oryza sativa
  Clone ID: PAT_MRT4530_43282C.1
atggctgacatgtggggtctaaggtgcttgactctagtcaaaatcggcctgaggtcgtcttcaacctctggactgggaagtagacgcatgagcgttggctggtgcgaggcggactcggccggggatggctcggctacgaccaagggaggtgcgaacgggttccgacggccctccacctgtggtggcggcgcaaggcggagcaggggcgagcgttgcggcatggcaacgccatggccgagctcaaggaggttcggggctttggcgatagtcggggactccggccaatttattgaatggaggagtgtacagagcgtcttggggttcgattttgctaataaggggatgaccagaatatatgaaaatgccgtttggaactctggagcatctgcacccataatctgcaccgttggatgcgcttcaggatgtgtgctgcttaatgtgcctggctctcagcaaatgaaggttgctacagagaaaagaggtggggaaggacatccagttccacaaggtcaagatttgcatatgacattttacaggactgttcagttccataaggccacgatttggatgggcaaaaaccctgcctatccacatgtatgggcatga

SEQ ID NO: 39777 - DNA, 405 bp, Oryza sativa
  Clone ID: PAT_MRT4530_43283C.1
atggaggggagcgtcgccggccctgccctcctccgaccagatctgggagggaggggggaggggccgggagttgccgccgcccgccgctgggagccgccaccgcctccggctggtgaccggggagaggaggagaggaaaacctcaaaagagatcttgacaaccattgccaagataaaagtagttgaaggttattgttacttgtcattgccatccccgctctctgccagctatgtctatgaccgtgccccacctgccaaccatgtgtccatgccgactccaccctactccagttccactcctccgcagccaccttgtgtcgacgccacctgcaccgccaccttaccacgcctacatagccatacttgtgccactttcgcccccatcgctgccacacctgacgcatag

SEQ ID NO: 39778 - DNA, 352 bp, Oryza sativa
  Clone ID: PAT_MRT4530_43284C.1
caacgttgtgcttttttcccttagtgtgtagcgcactatgataagatgttactattagggattaccatgtacctgcaggactgcaagatcttttgaatgtgacttaattatctaatgcttgctttcattacaacctgtttacatttttcaggtatgtgatgcgatgctgaatctaatattgcaaagtccagccctttgttcttcaattgtcctatttgcaaagattatgagctttaaatttggcatcaattatttatgacaccaatgcattctcttggtgtatgtaccaaaccaatttgtacgcgtaattacttatattttttatataatgaaacattgtgttcatgtttcg

SEQ ID NO: 39779 - DNA, 1527 bp, Oryza sativa
  Clone ID: PAT_MRT4530_43285C.1
atggtggtagagtggtggaacccttatgttggtgcacatgttgagtttgaggatatgtcattgaagaccattttgtttcccatccgcccaactctagatgaactaaggtcacgagtgaaagaagttcttggatggaccaaggataatgtggagattcgtttttatgggagatacgatgttggtcaagggcataagtatatattgaatgtgctagccagggagatgaaaaggaagttagtacaagaggggcttgatctaagtgaacatttgttggaagatatagaaggaaaccgccttcaggtgttcaacttgatgccgcgccggtgcaaagtagatgttcgtttgagagtaatgccactgcacatgctcaccgggatgtcgcatacaagtagtacatcaacgagatggactgcctacagcctacacatgcagttgagtaccaccttccgcaccgtgtcatgcgacagttcgggaagagacaagaatggccggttgaggacatctcaactggagttgatttacacaaataatattttttatctctacttgctttcattgtcaatgttcaattttatatcatttgacccttatttgacacatcatcaccttccacttgtcaagcattgcagcaagccagcaacaagcagtacaataaatttgtgcccaggcaacaagcagacgacagcggtgcttcggcctgctgcggcggcgccaagacctgctgtagtggcgtcgggacctgctgcggcggtgctgggagcctgggacctggcggcgtggtggccctgcgcgggagtggccgagggcgcgggggcgtccagagagcacctcgggagtgtgaatgaaatggggcatgccctacgatctccgaagggtggtgaggatacggagaacacacttcgcaatgtcttagaggcgtgcatgggggcggccggcggatggcagcgtcgcggtgacggccaaacggaggcggctgcgggcgcggcgcatgggggcgggcggtacggtagaccgcggcgtcgcggcgatggccaagcggaggcgactgcggcttttctgccatccgcgcaacgagccaagaatgccgcgtcgatggctttatggacgtcgtgcgcgagctccctggcgtggccggaccaggccttgaaagttcgccaaaggtgccgcaaacttgctgtaagcttaggctgcaggtcagttggattagatgacgtgtatcaaccgcggagagtaccaccaccactacttcaatccgcacctatctccacgtgtccaagtaccgctcgacactccatcaggatagaagagcgtgaagaagttggtggttcgtcgttgtcacgcattccacagggaaggagaaaggggcaggtgcaggctccacctagcgacgacgacgaggaggaggatgaggattacatcataccatatgccgaggtgataggcatgtcgcagctccccgatgcgcctcaggcatcgcagcccacccaatacaacttgcgatccactcgagcagcgaaaaagaggtag

SEQ ID NO: 39780 - DNA, 1848 bp, Oryza sativa
  Clone ID: PAT_MRT4530_43286C.1
atggtggtagagtggtggaacccttatgttggtgcacatgttgagtttgaggatatgtcattgaagaccattttgtttcccatccgcccaactctagatgaactaaggtcacgagtgaaagaagttcttggatggaccaaggataatgtggagattcgtttttatgggagatacgatgttggtcaagggcataagtatatattgaatgtgctagccagggagatgaaaaggaagttagtacaagaggggcttgatctaagtgaacatttgttggaagatatagaaggaaaccgccttcaggtgttcaacttgatgccgcgccggtgcaaagtagatgttcgtttgagagtaatgccactgcacatgctcaccgggatgtcgcatacaagtagtacatcaacgagatggactgcctacagcctacacatgcagttgagtaccaccttccgcaccgtgtcatgcgacagttcgggaagagacaagaatggccggttgaggacatctcaactggagttgatttacacaaataatattttttatctctacttgctttcattgtcaatgttcaattttatatcatttgacccttatttgacacatcatcaccttccacttgtcaagcattgcagcaagccagcaacaagcagtacaataaatttgtgcccaggcaacaagcagacgacagcggtgcttcggcctgctgcggcggcgccaagacctgctgtagtggcgtcgggacctgctgcggcggtgctgggagcctgggacctggcggcgtggtggccctgcgcgggagtggccgagggcgcgggggcgtccagagagcacctcgggagtgtgaatgaaatggggcatgccctacgatctccgaagggtggtgaggatacggagaacacacttcgcaatgtcttagaggcgtgcatgggggcgggcggcggatggcagcgtcgcggtgacggccaaacggaggcggctgcgggcgcggcgcatgggggcgggcggtacggtagaccgcggcgtcgcggcgatggccaagcggaggcgactgcggcttttctgccatccgcgcaacgagccaagaatgccgcgtcgatggctttatggacgtcgtgcgcgagctccctggcgtggccggaccaggccttgcttccacaatccacccagcctctcggcgatctccttcatcgccggcctgttggctccgcacatctgcaggcactcgagagccagccacgtgatctcctccagcgactcgccgctcgcctcgctcttcacctgctcgtacagcatctcgtccaccttcctctcccccatgtagacggtgggcacgatgcccatgtagacggtggcgtggctgccgcggccgaggatgttgccgtcgtcgaagccgttggtcgcttgctcgagctgctcctccgtgtagatggtgaatgtgttgcccgaccttgtgctcagctcgtcgtagagaaagttcgccaaaggtgccgcaaacttgctgtaagcttaggctgcaggtcagttggattagatgacgtgtatcaaccgcggagagtaccaccaccactacttcaatccgcacctatctccacgtgtccaagtaccgctcgacactccatcaggatagaagagcgtgaagaagttggtggttcgtcgttgtcacgcattccacagggaaggagaaaggggcaggtgcaggctccacctagcgacgacgacgaggaggaggatgaggattacatcataccatatgccgaggtgataggcatgtcgcagctccccgatgcgcctcaggcatcgcagcccacccaatacaacttgcgatccactcgagcagcgaaaaagaggtag

SEQ ID NO: 39781 - DNA, 1246 bp, Oryza sativa
  Clone ID: PAT_MRT4530_43287C.1
gcggcggcggcggcggcggaggagaagaagcccgccgcggtgcccacattgctgccctcgctcagtgtgccggcagggatgcgcaggcaggagctgctgctgcgctcggggctgtcgctcgacgcgtcgtgctcgtcggacgcatccacggactcgttctgcagccgggcgtccacggggcggattgggaggccgacgtttggggctaggaagaagaagactctctgtcagactgatcacaagattgtttccatgctggaaagggaggttggattggcttctgctaatgatgtgcctggtctgaagaggaggtgttcatgggtgacagctaatactgaaccctgttatgctgcatttcatgacgaagaatggggagttccagttcatgatgacaaggtgttgtttgagttgctggtgctctcaggtgcattggctgaacttacatggccaacaattctgaacaagagacctatattcagggaggttttcatggattttgaccctgtattggtctctaaactaagtgaaaagaagattattgcacctggaagtcctagcagtaccttgttatctgaacaaaaactgcggggtgtcattgaaaatgcacgccaaatactcaagattgtagaggagtttggaacgtttgattagtattgttggagctttgtgaacaacaaacctattttgagcagattcaggtatccccgcaggttcctgtcaaaacatctaaagcggatgcgataagcaaagatttggttcgcagggggttccgtagcgtaggcccaacagttgtctacacgtttatgcaagtttcaggcatgaccaatgaccacttgatctcctgctaccggtttgctgaatgcgctgctgcagcaactggttctaacacaactgttgggagcgaaacgaattcagacagtagcaatcgtgccacggaacagcagatgaatggaaccaatggactagctgctgatattgcacgtacaatagatgaacttagcatttcatagcgaatagggggaaatgctcaaatgatgtataagcatgtgtgtattttgtttatcgtagcgtttaggtgtggcctgatcgttgttacttgtcacgttgtagcgtaggacattttagactttagcatttcaagacaaatgaaacggcggcatgtaatgatgtatattctttctttgtgatgcttgtttccaaacctgcagtactgagttggcatgtgaagttcaccctcgcttttgtc

SEQ ID NO: 39782 - DNA, 360 bp, Oryza sativa
  Clone ID: PAT_MRT4530_43288C.1
atggagtgcgcgtttggctgcgttttctgtatattcatggctcttatgatacctgtttttggcaacggcgacggcagccgcacgcagtgccagaaggacatcgtcggcggcgtcaatatccatggcggcgccgcttactatagagaaaggaggagagggtgcctggccgggagcgcctcccctcccgtcggccaccgcccgccaaggccggcgcgctgccacccgccacggtcgctgcttgatgctgcttgccacggccggcacctgccgcggcgccgggcgcggccctgccggccgctggccacctgcccgctgccgtcggccgccggatgggagggtaggaggaggaaggggatctga

SEQ ID NO: 39783 - DNA, 688 bp, Oryza sativa
  unsure (1)..(688): unsure at all n locations
  Clone ID: PAT_MRT4530_43289C.1
gtttgtgttgctggtgctctcaggtgcattggctgaacttacatggccaacaattctgaacaagagacctatattcagggaggttttcatggattttgaccctgtattggtctctaaactaagtgaaaagaagattattgcacctggaagtcctagcagtaccttgttatctgaacaaaaactgcgtggtgtcattgaaaatgctcgccaaatactcaaggttggccctttacactcttgaaccttttaattgcataaagaggtctctagttcatttcttggaataagaatgatacaaatcacgctttaagttctttggtaaccccctcctgatataacattatctcctgtaaagtcttcataaaatttggtaaccccatcccgaagcaaagttttttggctttaccttggcgtttcagtgtccgattcagttttcatcatgcttttcttanagcaaaaaaacgtaggatggttacccaaagacattcctgagctacacagtggcttatctaatccattgtgcttatcattgcagattgtagaggagtttggaacgtttgataagtattggtggagctttgtgaacaacaaacctattttgagcagattcaggtatccccgccaggttcctgtcaaaacatctaaagcggatgcgataagcaaagatttggtttcgcagggggttccc

SEQ ID NO: 39784 - DNA, 690 bp, Oryza sativa
  Clone ID: PAT_MRT4530_4328C.1
atggcttctctccgcctccgccacctctctccctccggcgccactgcaccaccctcctccttcgcccaactccgccgcccttcctcctgcctcgccggaccacgacctctccgctctcgtctcacccgggtgtacgcgctgtccagcaacgacatcagggtgggctccaacctcgaggtcgacggagctccctggaaggttcttgaatttctccatgtcaagcctggaaaaggtgctgcttttgtaaggacaaaaatgcgtaattatatcactggcaacacagttgacaaaacctttcgagctggaagtacgatcccagaggcatccatttcaaaggaaactaagcaatttacctacaaggatggagcccagtttgtgttcatggatctgactacctttgaagaaagtcgcttaaatgagtcagatgttggcgacaggcagaaatggttgaaagaaggaatggactgcaatttgttatactggaatggacggatcattgattttgatctccccatcaccgttaggctgactgtaactgatactgacccagggcaaggtgacagtgcacaaggaggaacaaaaccagcaaccgtggaaacaggagctgttgtcacagtgccctcgtttgtgaacgtaggcgatgatatcctgattgattcaagaactggccagtatatgaacagagcatag

SEQ ID NO: 39785 - DNA, 2630 bp, Oryza sativa
  Clone ID: PAT_MRT4530_43290C.1
cttttttttttttttttgctcataaaatggtgtgtttatatatatttatttattttaagaatcaaatgtataagcgattcgaaagaagctaacaaactatgaggttcaatatatacttgcacaactgcactaactgaataattaacaatttattgtacatatagcctttgtactcttcgcaacttttatcttcgtcgccttcttggatttatgcttcagcggctgcgtatgtaggaggtgtttgattgatcggaaacataattggtatgcaagcacttgaacaagacaatcctttgaagttcatggcaggaaaaaaaaaggcaaatcttcttcacaacaaaacaaaaactcctagttacaattcaaatcactgttcccatattttcagcctcttgcaagcaaatatgttgttcttgatactgcagtaactttgcaaactgagatgctttgaggtcaagctcatcccattcaaaggatggatttgtaccttcaacaattccggcaccagcataaactaaagtgctatgaccttttcctagtagtgctgatctaatcccaacagcgaactcactttcagctcctccaaaccaaccaacaggtccagcatacattccacggtcaaaaatttcataatcttgtatgaattggcgtgcctcttcagtgggcagaccacaaacggctgggctcggatgaagagtatttaggatgtcaaactcatcgtcttcattcctcattcttgcagctaactgagctgacaggtgttgtactcttggaagtttccgaagggccttgctgggatggacaaccacatcatcgcagatcatactatttccaacaaatgcaggagcatcaggtggctgtatacagaactgataagcattttggccctcaacctttaaacatgccaacagttcaacagggtcaatgcaagtatcagtaatatatctgctacaccttgccagtacgacctttactaattctctttgcttccctttaatcatctggagagctttagtaacggcaagatcccaggatgcctttgtggggacatgattaagatttagtatggttgtttgcagggtggaattgttcactttaattggactggatgatatcttctgcaaagttgattggagctccttcacagcattttgccatgtccaagaaagtgaatcatcccatgcaatcgtcgttgcgagaaccgagctctcttcaagctcattgtactcaacttgaggaacaatgaagtaaaatgatccaaattcctcccattcaactgaatgatcgctcgtggcatcgaagcggatagcaccataagcacgaatcagtgggcaatcccttggaagaaatctcttgatggcgcgccagtcgcggagggagaacggctcggtcccgcggaagaacacggcggacccgacgccggcgacgctcaccggccgctgccgctgctcccctccgacgccgcctgctccgttgccgttgccgttgccggcggaggcgatggcgagggccgggcactcgggcaagggagcggcggcacgcgcggagaagaagcagcgcgcgcgcaggtcgccctgcgcgtgcagccactccacggcgtcccctcgctgccggacgggcacctcgatgcggatgatgccggagggcgacgccggcgggtcggcggcctccagcgccgccaccgcctccctgagctgccccacggcgtcccccgccgcgcccgccgccggcaacgcccgcgtctcccgcaccgccaccgcccccgcccccgccaccgccgcgccgcacccattcatcgacagcgagcacgacggccgctgcacccatcttcccacctttgagctcttgtcaatggccttggtgtcaacttctgctgagatggtccacacagactttggcctccactcgtgctggagcagcgcgctggccttgccggaattgttgaagcgggccttcacgacggtaagcgggtcgagagtgtgctgggtaccgaaggtgagggagttctcgttgctcgagaagctgtgggtcagctcagctccaacagctgtggccgaatggttcacaatgtggtaataagatgcagtgagactatctcccttgttgttcaggttcaatgacgcgataagatcatcattactgaagctcaatccagcattatatttggtcaagttccccgtggcggtatcaagtgagacatcagcaccaacagcaagagccttggttccaaaaacactggagagattgactacaggactggcagtcaaaccaatacttgcactaacaccagcataatcatgcgagtattgaagctcaaactttccagatctttgatccggaacagcaaagctcaagatggacttcaatcctggtgttagctcatcaacggttacagtagtaacaacatttgagtctgagtttgctttcacatctacagtgatgttcttgttctttatctgtgattggatctcaccaaaaatcagatcagccttctttgtactggtagcagtgattgcgacgccattgctggtgtaggtggtgagggtgaacttgtggtcggtctggtagtccctgtacagcagatccctggccttcttgccgatctccgggtacaggcctggccccaccat

SEQ ID NO: 39786 - DNA, 1197 bp, Oryza sativa
  Clone ID: PAT_MRT4530_43291C.1
cgccgcatcgcgtcgtcgacgaggagatggtggggccaggcctgtacccggagatcggcaagaaggccagggatctgctgtacagggactaccagaccgaccacaagttcaccctcaccacctacaccagcaatggcgtcgcaatcactgctaccagtacaaagaaggctgatctgatttttggtgagatccaatcacagataaagaacaagaacatcactgtagatgtgaaagcaaactcagactcaaatgttgttactactgtaaccgttgatgagctaacaccaggattgaagtccatcttgagctttgctgttccggatcaaagatctggaaagtttgagcttcaatactcgcatgattatgctggtgttagtgcaagtattggtttgactgccagtcctgtagtcaatctctccagtgtttttggaaccaaggctcttgctgttggtgctgatgtctcacttgataccgccacggggaacttgaccaaatataatgctggattgagcttcagtaatgatgatcttatcgcgtcattgaacctgaacaacaagggagatagtctcactgcatcttattaccacattgtgaaccattcggccacagctgttggagctgagctgacccacagcttctcgagcaacgagaactccctcaccttcggtacccagcacactctcgacccgcttaccgtcgtgaaggcccgcttcaacaattccggcaaggccagcgcgctgctccagcacgagtggaggccaaagtctgtgtggaccatctcagcagaagttgacaccaaggccattgacaagagctcaaaggtcggcattgcggtggccctcaagccttgatttttctcagggtgtacttacatttcaaagatgaaattgagatgagttgaaaaacatcttggcgcatgcgcatcttttggttgttgcagtctattagattccaagaactgccatgtttaatttgaggattttttttttctgttatcggtgttagcacttgttcaatgagcaacccttgcaccccaataattcaagctcggcaaaattatgaacttgcttataggtaacaattttttgttactattttcacactgtcattgtccacactgtgcttgtggttatggtgctccaattaaactaactgtttatatgcttgtcaaggtgtctagtaaagtggttttcgtgc

SEQ ID NO: 39787 - DNA, 669 bp, Oryza sativa
  Clone ID: PAT_MRT4530_43292C.1
tcattcctcattcctgcaggtaactgagctgacaggtgttgtactcttggaagtttccgaagggccttgctgggatggacaaccacatcatcgcagatcatctccagcttcttctttatgctgttccggactatagtaaattcattatcctctttgctacttagtagcaaatcttgaccaatttgaaagtcatcagccccttgttttcccctttgctcttgtcccagctaaagcctcgctggaaatgtttaagtatttccgatgaaataattgctctggactatttccaacaaatgcaggagcatcaggtggctgtatacagaactgataagcattttggccctcaacctttaaacatgccaacagttcaacagggtcaatgcaagtatcagtaatatatctgctacaccttgccagtacgacctttactaattctctttgcttccctttaatcatctggagagctttagtaacggcaagatcccaggatgcctttgtggggacatgattaagatttagtatggttgtttgcagggtggaattgttcactttaattggactggatgatatcttctgcaaagttgattggagctccttcacagcattttgccatgtccaagaaagtgaatcatcccatgcaatcgtcgttgcgagaaccggacgcgtggg

SEQ ID NO: 39788 - DNA, 2159 bp, Oryza sativa
  Clone ID: PAT_MRT4530_43293C.1
cctcctttttttttttttttttttttttttttttttttttttttttttttggaaggcctgaagaatcataagatacagaacacaacacatgtacatctagtaggacacatacaacgaagagaaagcagcatatcatagatgcaacccagcagaacagctgcaaaacttggcttaaaatatattggctagtctgttattctctagccaatggtccccagttggctgataaatctggcttaatgctgccttgaccattatctctgtggccatcgatatggcgagcttcttccaatgccaaggcatgtttcagctgctccaccacttctgtcattgttggtctatcatcagacacctcccttgtgcacagcagtgctatgtccacgaccttccagaccgaacctatgtcatatgcatcttcaagacgtgggtcaacaatcgcactgatgtcgccatcgctaaccttctgtttcacacgctgcacgacatgcccaacgcctggcacaatgggtggttcacctgttacagtctctagcaaaaccactccaaagctgaacacgtcacttctcatggtgagcctgctgctgaagtagtactctggatcaatgtagcctatggtgccagcagcagtgactgatatatgagtttgtgcttcattaatgtaagacttggacaagccaaaatcagagatcttggcatgcatatcttcacccagtagaatgttgtgtgacttcacatctctgtgtattataggcagtacacaccctgaatgcaggtagttcagaccttgtgcagcttcatgcacaattcttgcgcgctgtagccaactcattgtttgaacattagcctttttacctcttatatgatcaaacagacttccattcggcatgtactcgtaaatgagggctaaatgattcttgtttgtgcagtatccaatcaacattactagatatttgtagtgtactgttttcaagctgtcaacctctgctaaaaattcttttattccttgcccatgtaccgattttcgtgaacacatcttgacagcaacctgaatactgcgttgtagctgaccaaggtagacaggcccaaaacctccttcaccaatgcactccgagaaattgtttgttatcttcaccagctcctcatatgtgaattcatggtcatcggacatcagtacgtgaccttttatgtcaacatggcttactgaatttgatattccagtaggctgcacactatattggtctagagtcatttgttgctttcttttcttgtggcagaaacaaaagatcagtatggcagataccaataacactgccgctatgggagtcactatagctactgttaggacagaaatatttttcttctttggtgatttcccattgcatagatcaccatcgttggtgtcatatctgaaaacaatgtagcaattagagcttgttaaagaatgaggtactgatccattcaaattgttgtatgacaaattcaagtatcggagtgactgtaacaaagaaaaatcagcagatattgcaccatgtaaattactgtaagacaggtctaaggatattattttggattcaaccccgtcttgcctacattgcaatccagtccatatagattccttgggtagacatgggtcacccatccagttcttcttcacttgatattgagttttaatggccattatggcatcaacatcgtctggagaggtgatggtatcatcatgtgggatactgtagtagatctcgatggcgttgagcaatggtggcagcacggagtcgttggtggcgacgagcgagacgtgctgctgctgctcgaagctggcgaagtgcaggaagtggaagtacgcccgctcggttggaggcggcaactgaccgacagaagctgcatgaacagtgatgttcagatgtacagaagtggcagacgtcgtgatcgcggtccggaggacgtctctcggaacccggatgtggtcatcggagtagtaacccatgaaagtgccgtttgtagagatgttgagccactccgtgctgtacactggtgtccaccagaagcggtcaaacacatcgtttgggtacataatatccaagacatcgtgtgagataagtagcattaaatttaagtatggattagttgtgtttgcatcgaaagagtagtatctagttcta

SEQ ID NO: 39789 - DNA, 611 bp, Oryza sativa
  unsure (1)..(611): unsure at all n locations
  Clone ID: PAT_MRT4530_43294C.1
ctagccgctgatctgatctgatctaatctggtcgacgtccatggatgccgtctcgtccagctgcggctggcccaacctcccgccggacttgctccgggaaatctccggccaactccatgacgccgtcgacttgtcccgcttccacaccgtgtgcacggcatggcgtgacatggtccggttgccggcggcggagccccaatgccccgcgctgctgccgtggctcgtcgcccgtggctggcccggctgcttctcccgctcgcacctccgctccatcttctccaacgcgacgcccgcctggcactccccgaggacgaccacccgcgacatgtggctggcgtccacggacggcgccggggtatgggtcctcaccgccgacggcgacaggctcgtcgaccccctcaccggagccaccgtccgccggctccctcgcctccctcgcaccagcaacaatgaccacgtctgctacatcgacggcgtcgtctgcggcgacggcaccatcgtggcgtacgccacttcagaagggttcaagcacacctnccagatcgaggcagccatcctccgccccggcgacacggcatggacgacggtagagtcgaaggggatgaattact

SEQ ID NO: 39790 - DNA, 217 bp, Oryza sativa
  Clone ID: PAT_MRT4530_43295C.1
aatcactcagaatgtcacataggcaagacaaaccagtcacgaaccatggcgcttgtagtagcagtagtagtgacctacacgtacatccaagatgcatcacgcgtactctatacagtgatgtactatacggaccaacaactctacatacgttatacgtatcacagtaaccctacgcaaaaccgtacacaaaatacatgatgcctccatggtatatata

SEQ ID NO: 39791 - DNA, 1453 bp, Oryza sativa
  Clone ID: PAT_MRT4530_43296C.1
ggggtactcacaccgatgcgcgccgccgtcgccgccgccgagctgccaccgccggatcgtcgctaggtgttccgcgccgcgccgcgccgccatgttgtacccggagcggccgagccgcgtcaacgggacggccaccgtcgactgctcggcctacccgctcgactgccacccggtctgcccaggcggcagctgctacgagatcgccgagcccccgccgccgtcgccggtggtcccgcgcgtcgacgtggccgtcgacgaccaccacctccccgtacgcctcctcctcaccgtctcactcctctccgccttcctgttcatctcgctctctgtctccacgatcctgctctaccgccgccgcgtcgtcctgcgccgccggcgccgggccgcgaccgcgccgctccccggcgacgacgggttcggcgacggggatgaggaggcggggggcggcggcggggatgtgcaccacgtgtggtacatccgcacggtggggctggacgaggccaccatcacgtccatagccaccgcggagtaccgcgccggagttgggtggggaggggactgcgcggtgtgcctcggcgagttccgcgacggggagttggtccgcctcctcccgcgctgctcgcatccgttccatgcgccttgcatcgacacctggctccgcgcacacgtcaactgcccgctctgcagatccccagtcgtcgttccctccgatctccccgccacggctaccgaaggtgaggcggagggtggtgggcaagcggaagagcaccaggtgtttgatgaaatctcgctatcggaatcacgtgccgatgtctccgaggattctgacacctcttcggacactcaaagtgaggacacagcagcttcaccagaggatggtgggagggtgatgcccaagccaatacggcgctcggcgtccatggactcaccgttattcctggtggttgtgcctgaagcgcaggacgatgccatgcggggtgatcgaaaatttccgaatggtcaagagatgaagttattcagcgtgaaagagaaggatgcaacagggacgtcttcttcctcttgtcaggcagggcggtttgggattggcagatcgatgtcgagcagtgggcaggggttcttcttctcacggaatgggcgctccagtagtgctgtgttaccactatttaggaaggattcaccagatcaaggtacctcatatcagctcttccactttcctcgcttctttataagtatcagttttggagcccaaagcaagatatgggatcactatatcaacattctgatgtgtcttctcttaaagctctattccaccttccaaattctgttgtccactgactactttggttgattgagttgatgagctcgtgtaaatttgtacctcccaggttgcctgtatcatagttttgagcttgggatctagtgaatttgaaggaacaaaaaaaaaaaaaaaaaa

SEQ ID NO: 39792 - DNA, 2835 bp, Oryza sativa
  Clone ID: PAT_MRT4530_43297C.1
atggcatcccgtttttggggacagggagacagcgactccgaggaggaggagcaggagattgagtcagaagcaggaagtgaaagcgaagatgaaggtggtgatgccggggggcgttcaaaccagaaccgctatttgaggaccaccaacgcaagcgacagtgacgagtctgattctggtcagcgtgtggtccgctccttgaaggataagcgcaatgaggagttgaaaattacggttgatcagatgcgcaatgcaatgaagatcaatgactgggtgaatttacaagagagtttcgagaagctcaacaagcagcttgagaaggtggttcgtgtcaatgaatccaccacagttccaaatatgtacgtcaaggctcttgtattactggaggacttccttgctgaggccctagcaaacaaagaggccaagaagaagatgagcagcagcaatgcaaaggcactcaatgcaatgaaacagaaactaaagaagaacaacaagcagtatgagaacctgatccaagagtgcagagagcatccagagcgctttgaagatgacgatgtggaagacaaggatgacgatgatgagacagatgatgatgctagtgatgcagacattgaggatcctgaaaagatggttatgtctgaatcagaggaggaaggagatgatgatgaggagggtgaccaggatggtggagcctgggaaaagaagataagcaagaaagataagcttatggacaagcagtttttgaaagatcccagtgagattacttgggatattgttgataaaaagctcaaggagattgtggcgtcaaggggtaaaaaaggcacagggaggattgagcgtgttgagcagctaacctttttgacccgtgtggcgaaaacacctgctcagaagcttgaaattctctttcatgtgatttctgcccaatttgatgtcaaccctagcttacttggtcacatgccagtcaacatgtggaagaagtgtgttaataacatgcttcttgtgcttgatatactgcaacagtatcccaatattgtagtagacacctccgtggagcctgatgagaaggaaactcagaagggtgctgactatgatggacaaatccatgtgacgggtgacctggttgcattcctggagagattggattctgagtttttcaaaagtttgcagtgcactgatccatacacgaaagattatgttcagaggctcagggatgaacctttgtttttggttgttgcacagaatgtccaagattacctggaacgtgtcggtaactttaaggctgaagctaaggttgcactgcgtcgtgttgaattggtctactacaaacctcaggaggtatatgatgcaatgagaaagcttgcagagcaggatgaagatagtagggaggatgatgatgcagacgctgacgaggagcgtcaagtagttgatgacaataggggccctccaccatttgttgtgatccctgaggtcgtgcctaggaagcctactttcccagagagtggcagagctttgatggatgcgctgatgtctgtgatttacaaatatggtgatgaaaggaccaaagcccgggcaatgctgtgtgacatttatcaccatgctatctctgataaattttctgtggcacgtgacttgcttttaatgagccatttacaagacggggttcaactcatggacatatcgtcacagatattgttcaacagagtcatggcccagctggggctgtgtgcttttagggctggtttgataatcgaagcgcatggttgcttgtctgagttatattcaactgggagagtgaaggagttgcttgcacaaggtgtccaacaaagccgataccatgagaaaactcctgaacaggaaaggcttgagaggagaaggcaaatgccttaccatatgcatataaaccttgaacttttggaagccactcacttgatttgtgccatgctgattgaggtccccaatatggctgccagtacttatgacaggaggaagtctatgaacagaacattccgtaggcttcttgagatcagtgagaggcagacttttgtcgggccaccagaaaatgtgagggaccatgtaatggctgcaacaagagccctccgcaagggtgactaccagaaggctttcgatgtcattaattcgctggagatctggaagcttttgaggaacaaggagcatgttcttgagatgctgaaacttaagatcaaagaagaagctcttagaacctatctcttgtcatactcttcttgctacgagtccctgagccttgaccagctcactacaatgtttgaccttagtgagcaacaagctcatagcattgttagcaagatgatgatgcatgaagagcttcatgccagctgggatcaaccaaccaagtgcattattttccacaatgttgatcaaactaggcttcagggactactcttccagatgtctgataagctctctgtccttgtggagagcaatgagagggcatatgaggccaaaactggtggtacccttgagggagcaccacccaggcgtaggggtggtgatggtcaggactcatccaacttgggcaagtggcaggagaacttcgtatcatcacaagggcggcaaggcggcgggaggtctggatactcaggcagagttggaggccctggaagaggtggtggtggctaccagagggacaggggtagtcagggttcccgtggaggctatggtggtggttcgcgcttccaagatgggggaaggtctcgcaaccagtctggttctatggcaagaggaggtgatggtggtgcacgcatgaaattccactttctagtgatcgatgagaagaatgctgttgatcaacgtccataa

SEQ ID NO: 39793 - DNA, 519 bp, Oryza sativa
  Clone ID: PAT_MRT4530_43298C.1
ggggggaacaaaaaatcgggggggtttatatccgggaaaaaaacaataccctacaaaggggagggggggaggaactatatgctccctactttttacccaaaattttctttttaaaaagctccccttatcaacaattaggattttaggggggccctgcataaaggcccgggggattccagggggcatatgaaccaataattttactttaacttacaggggtgggccaaaaaggggtttttttttaaccttgcagggggaatctccactgttcaccagggcctaagccaaatttacaggcctttactttttgggggagagcctttagtccaggcgggggacatcatttagttctgcacttgcttgcaattattcagctttttgcaattgggagccgccaaatggatttcattcttccgggacggggggggccttacgattatggcccgcagaagttccctatctcactaaaaccaccgccccttttttgcattggctggttggagccccattactaatttt

SEQ ID NO: 39794 - DNA, 620 bp, Oryza sativa
  unsure (1)..(620): unsure at all n locations
  Clone ID: PAT_MRT4530_43299C.1
atctggcnccttcggattagtttgtttgatgctaaatagtgctgattttgatctggaggggatatagacaagaaagaaaaaactgagaactttgtattcaagggtgtatacctcatcgtgatcaagcccaagagcatcttatagatgaacagagattttgtgcacaatttgcatttcatgcaacgagaagacatggtagtcagagaggacttgtcctttttctcctgggaattggcaacgatagaactgactagcttctagctagctgtatcagcaagctgaagcacaaggaaacatacaagggaactcatttcccaatcccacctagtacgtttttccagcttatgaaattgtgatttgtacaataggtttcatttacacagcacttcccattgttagatagcagcttgttccatcaacagttaatgaaatatgttgcttgatcttcgaacatctggagaggtctggtccctaacaacgttgagtttagcctaatctagcttatgaaattgtgatttgcacaaataggtttcatttacacagcactttccattattagattgctgcctgttctatcaacagttaatgaaatgtgttgcttgatcaaaaaaaaaaaaaaa

SEQ ID NO: 39795 - DNA, 222 bp, Oryza sativa
  Clone ID: PAT_MRT4530_4329C.1
cccaggtttatcacactacatcttcttcgttctcaacctctacaccagcgtcactgctgtcgagagcttgatctatgggcttgcgatgtgtagatccctaatttcctcacggggaccattataagcgctctgattcagggaatatttatagctatgatgtcggtagtttagacatcttcacaacatatcacaaacctgtttggagataccccacctcacctc

SEQ ID NO: 39796 - DNA, 2301 bp, Oryza sativa
  Clone ID: PAT_MRT4530_432C.1
atgacgtccgtgacctcagatttgctgcagtcgtgttcggaaaccatgatttcattcgtccacaacatgacggcttcctacgccgacaagagcaacgagtcctccgtggtgtccacctccgtcgtcatgttcatcctcgccgccgtcttcttcaacctcaacctcttcagcggcgtctccgacgtcagcgccgtgctcaaccccaccgtccgcatcttcctctccagcgcgctcaacctcttcctccccgtcatgtcctacctcttctccgaggccaagcaagcgccgctcggagtcggcgactccactaccaccaccagagacgcccactccgatgacctctcgctgctggcgcgtgtcatcctcacatggatgctcctcgtcgagctcctccgcaagaaggtggaggccatcctcatcaccaccggcatgcacgtctactccagcctcatcagtcacgccaccagcgtcgcctggctgggcaacctcgtcttcttcaacctccaggccgccggcaagaaggcgctgttcggcgtcctctgggtgctctgcgcggccaagctggtgcagcgcgtcgccatcaccgagatcgggaagcgctccttcgcccatggcaagaacgcccgcctcatctcctcctacatggcgcagctgccaaagctgctcgaggtggatgagcatgtcgccgccgacggcagcaggatggagcggtgcaacttcgccgtgatgggggaagagaacatggtgctcaaggccggaccacacggctacgagctcgacctcggcctcgccgccgccgtcgtcaccgtcgggaaaatctggcagaccaaacaacacccaaggctcaagaggctctgcctctccttcgctctcttcaagcttctgcgccgccggttcgagaacctgccgccggcgaccatgaaggagaccgacgagtgccgggacctcatcttggacggcatgtgcaaggatgctcaggccaccggcgacgtcccggcggaggtggcgctgttccaggtgctcaacgacgaggtgaacttcctggccgagtactaccactccgtcctccccgtggtgctcgcgagcccctacttcttcgtcgtcaactacctctgcttccccgtcgtcgtgttcggcctctgcgtcatgaccatcgtcctctgcggcaatggcaacgtcttgtacgccttcaagagcctaaccaacgacaactatgccgtctcatccggcatactctcgctgacgaaatgcctctggaaaaacgtcgtcaggtctccgctggtgttcttctccatcgtcgacgtctccatctgctacctcctcttcatcgtcgtcgtctacgaggaggtgtgggagttcgtcgtcttcctcctctccaactggttcatcgtctctctgctctgcaccttctccgccaagccccgccgccgcgagagccccaccttccgtggctccgtccgctgcatcctctggctccgccgaaacctcagccactaccctagcctcatcaccatcaagcagttcaccgtcctgagcacatgctgcctgtcgccgaggttgcccaccgccacgctgcccaggcatgcgaagctcgccatcctagaacgcttccgcggcggcgatcctctcagcaacggcggcgccgtgctgacgtcgatgggcggtaggcaccggcggttctcgcggctctcgtgggcgtgccagagcggagccgtcgcggaggtgatcctcacctggcacatcgccaccagcctcctggagacgaagcagcagcagcagcttccgacaagtgccagccggagccggaggacggcggcgaggctgtccagatactgcgcctacctcgtcgccttccggccggagctgctgccggacgaccgggaaggcacggagcgcatctacaaggacctgaagaagggcatcaaggcggcgctcggcggcgcacggggatactacctctcgtcggagcggagccggcacgagacgatccgtgcgctccgggtggacgcctccgccgccgccgacatgacggtgctcgagaggggcgccgtgctggggaagcagctggtggaggacgacgaagccggcgacggcgcggtgtgggagatgctggccgacgtgtgggttgagctcgtcgtgtacgtgtcgccgtcgcgcgcggaggagcacgccagggggcacgaggcggcgctggcgcagggcagcgaactcgtgacgctgctctgggtgctcgccacgcacaccggcatcgcccgcccggaccacgacggcgaaatcgaccagccggcggcgccggcatag

SEQ ID NO: 39797 - DNA, 406 bp, Oryza sativa
  Clone ID: PAT_MRT4530_43300C.1
aaccaatgccaggagcctgccgcatccaaggccttgcaagcaaaagatgccttccaaccaccaatctgcaaggacaagatttcgagaaatgcctcgcaaggcaagagaccgactagtggagcatagaaagacttgggaggtgcacagaaaggtttcacacaaaagagttttggcgaggaggttgacaagatttgatggcgcactcacttatgggcatgagctgctcccacagaaatggtatattgttaatgactctccgattggtgtgctgggttgggaagttggatgtgccacacgatgttgtgacaattgggatgagcctgaacctgatggattgaatgtgacaacctggtgtgtgatgtggccgttgacggctatcattgcgcctctgtcgtcaacttatttc

SEQ ID NO: 39798 - DNA, 1094 bp, Oryza sativa
  Clone ID: PAT_MRT4530_43301C.1
gcgccccgggcgaccagaagccagataggcatctcttcccagagagaagaaaacgaactctcccgcagccgatccccaaatccccacgcatctcatggcggcgagcctgtggcgggcggtgatgggcgccggcgcctcgtcggcggacaccgataccaacgggcggggtggaggtctggcgttcgtgggagcgcgcggggtggctgaccaagcagggcgagtacatcaagacgtggcggcggcggtggttcgtgctcaagcaagggaggctcttctggttcaaggactcgggcgtcacgcgcgcgtcggtgccccgcggcgtcatccccgtcgccacctgcctcaccgtcaagggcgccggggagccgctcaaccggcagttcgccttcgagctctccaccccggcggagaccatgtacttcatcgccgactccgagaaggagaaggaggagtggatcaactccatcggccgctccatcgtccagcactcccgctccgtcaccgacgccgagatcgtcgactacgacagcggccgtcctgccgcctcagtcgccgcagacggcgacaagtgatcgatttcatcgattgattggtgagcaaaaggacctgtggttcctgtaatactgcagcatatccatggtacttacttaggttttgcgattatggttcatgtttcttgacttaggatcgtaagtgtgcatttgtatattactgatgcttatcgggatatcaatttgggagtttagtgtagaggaagagctctgataatgtccgcctgctcgctccgcctgaccttcctccttgtcggccgcgtccggcgctcggccgctcggtgaataaatttgggagtttagtgtataggatgcgctctgatactatccaccagttcactccatgtaactttctttaataaggtacgatttgtttggtcaattggtctgtgtttagttgtctaaattcttagatcaagtgtgttggtgaaaccgtagcaaatctttcaaggttagtcctgactaactctgcactcttgcccgtaaatagccaactggctttgatctatggaattataattcaattgtatatctttattcatg

SEQ ID NO: 39799 - DNA, 242 bp, Oryza sativa
  Clone ID: PAT_MRT4530_43302C.1
gcacacacatacagacgggcagtgcactattagagacgtacccttctctcgatgagaaccctgctgtcccggtgtacaagggcgcaaatgactgtcaatcaactctctgcgtcgactgaggcatgtggtggccacagaggggtaacctgtcaaatgacgctgcgctcacacaggactacgatgacaagatgcttcattcagcacggcattacacttgctgacattcacttaatgtgacgggt

SEQ ID NO: 39800 - DNA, 684 bp, Oryza sativa
  Clone ID: PAT_MRT4530_43303C.1
atgacactagaggcgccatcgtcacccatccactggactttcacctgcagcacccttaccaaaacctatcatcgcccccccaaagcttcaccacagcaccagtgtcccaccgtggaccagcccgcactagccttcgtcgggtcttccatgcggccaacgacgcctcccacaccggttgctagctcggccatcgtcgccaccgccgacctccctaccattgccggtcacgccgatctcccgcattgcccgtgccatcctcccgctatcatccacgccatcctctctccgtcgtcgctggtcgcgtcgatctcccacgcctactgctcgagactgtcaccgcgcgctggccgctcgaggctatcgcctcatgaaaaccttcagatccggcaaggacacaccgtgggggctccagatccggtcgtggcggcgccggccactgccccttgccatgggtgctccagatctgaacacggtggcaccaggtccaccgcctctctccccgcctgcactatcacgttgccttctctacgccacgcacgctgtcgcgccgcctttcctgtgtcaaaggcggagctccaccgggggatggcccgctgccatcccggctcaccgctcgactttcctacggcatgctccggtggcgacgaggtggaggggaggggagaggagtgcggcggtggctga

SEQ ID NO: 39801 - DNA, 396 bp, Oryza sativa
  Clone ID: PAT_MRT4530_43304C.1
ataaccaaacggaggtaatacaatataataaacttattttaagcaaacatatttttagtggcatggagcctataattcgatgaagtaggtttatactccactgctaatgctaaccctgtgtgtggttcactgatctctgtaactgtaggtgctcacaccattgggcagacggactgcatctttttccggtaccggctctacaacttcacggtgacggggaacgcggacccgacgatcagcccgtcggcgctgccgaagcttgcgggcgctgtgcccgcccgccgggcaacggttcccggcgcgtggcgcttgacctgggcagcccgggggcgttcgacgtgagcttctttaagaacgtcagggacggcggggcctttctggaatccgtccagtggc

SEQ ID NO: 39802 - DNA, 282 bp, Oryza sativa
  Clone ID: PAT_MRT4530_43305C.1
cccaaccattggcttgtgttacaccgattgcccaatgcgtaatgtatatatcggcatccacgccaacatcaaggggaggaactgtattgtatgcctgccctgactcttgtctctgacggttgttttacaaaggggtgatttgctaaatggccacagttacccatgttattggtgttgtagtacattacactttccccagctggggtaataaccaagaggagcgaacctatcgccctttccaacagttgctcactcttatatggcgaatgggacccgcccttt

SEQ ID NO: 39803 - DNA, 255 bp, Oryza sativa
  Clone ID: PAT_MRT4530_43306C.1
gctttaggagatgaaaaagcagcgcagacgcctggcatatgatcgtttcggtggcgggttgcggtaggaccgaaaattcctacaggaaagcgaccgcatatcgaccaaaaactgtctctgcgcatttcacccaacagctaagctaagtgtagtagtagcagcgatagctccagcttccggccagttacgctgataagatggctggttgttgtagtcctaactcaaagtaagtaaaacaatgagcgccactgtttg

SEQ ID NO: 39804 - DNA, 424 bp, Oryza sativa
  Clone ID: PAT_MRT4530_43307C.1
cccacgcgtccgcccacgcgtccggttgttgagtccgttcaggagctggaccgacgagagccgacggaggagaaggaggcgcctggccatgaatgctcgcagacgagactaagcattttaatgacgcctaatctacatattaactgaaccagtcaatataatttaccctaattgtgcatcatactccagtaagcattacacacctacgcagttgtatcttgttgccaaatatgcattgctttattgcttgccaataaacatataggactattccctcgcgtagacagtgcattgttagtatttcaagtattgctgttaatcgattctaataaacttgaggtgatatttttcaaattgttataattaatgtggcatttgtcgtttttggtatgaacaaatattttttttacatatttaatttttt

SEQ ID NO: 39805 - DNA, 574 bp, Oryza sativa
  Clone ID: PAT_MRT4530_43308C.1
atcacgatagaatatcacgatggtctgaattttgattgatgtaatcgtaccataatttttttataatcaatgttacactaacaatgggtatctcggtgcatagtacaattacaacaacgtgagtaaaataaacaacatttgtatttcaatacctagctgtacccaggaagaccaatggggcgatgattaattagaaggatagtcaatcaaaactgtgtcagcacatcacaggtagtaattgcaacttatattgtacatattttacaatctatactaagacggccatgaaaaaaaaacaaatagaaatcaaggtttacttctccatgatccagaacctatgaatttgtagccagttctgcagatatgagagttcaatattcttgccagcttgtcaataattagcatcaatctactttagccaccaataaaagaaaaagggaagtagatccaccttttaaccttgatgaagagcatcaatatgttcttagtacatgatatataaaataatgaacaccatgcatatcccacgtaactgttaaaaatatattttcaacggaatgaaacagtttctaat

SEQ ID NO: 39806 - DNA, 222 bp, Oryza sativa
  Clone ID: PAT_MRT4530_43309C.1
ccacgggtgacggcacagagctgcctaacccgtggaacatcgaacaccttcgtcgcttctacccctaatggggttcgggtgtcaggttttgggctcgggccaaccccgcaccccccttgggcgtgcagggtcactcgtgctcaatcctgccctcgggggctcgggccggctaaaatcgccaaaaaggggcccagaaccgagccgtgccccgggacgtggtga

SEQ ID NO: 39807 - DNA, 435 bp, Oryza sativa
  Clone ID: PAT_MRT4530_4330C.1
gaggatataatcgcgcattattgtaccagaaagcgataaatcggctatgcaacagagtgtggatccaaacaaaatgctgaaggcacacaaaataccaactgccgatgatatgtaatactgatggaaacaaagggcagacatgtggccaacgaacgcggagccaaaattagagaaaatgctttctgtaaaagctgcaagagtatatgaggaacaacatactgaccagggctgaacttcgtcagatctcaataacacatggagagggcggactggatctgatcaaccagatggggcaggaccctgatactgtcatcaatagatatgcttacgcatgcacatagctactcagccgcatgggcccacaaccagtggcgcatggccgaaccaaacatatctgggcacaccatgcaagatcgggtcaaccgctcctggaat

SEQ ID NO: 39808 - DNA, 1076 bp, Oryza sativa
  Clone ID: PAT_MRT4530_43310C.1
aggtctacaatttagattattttgcctcgaaatctcaatgtatactgatgatgcagtagtcttcatcaacccaaagaaggatgatgtacaagcattccctgcgctccttgaatgcttctgacaggcaacaaggctttgcaccaacatacataaatctcaggtgatgctaatcaggtatgcctgcttagacctcgacgatgtgctagaaggcacgccggtgactagagcgagcttccctatgaaatacctggggctacccgtagccatgacaagactacgtaaggcagacctccatccattatttgacaaatccgttggacgcctagtgaggaagaaacattgggatagtagggcaaacaactctagtcaactcaatcctcacatcgcaacttgtctacttcccgatacccctaaaatttacaaaggaatccctagaggtgcttgagaaatagaggaaacggttcctctgggcaggggcctgatagcatcacggacgaaaaatgcaaggtcaactaggcaagaacttgtatgccaacaacttatggaggactggggatgctcaacctggaaaatttcatgagagcgctgagggtaagatggatatggcacgagtggaagtaacaaaaaaaaggcatgggtcatctagacactccatgcaaaatatcttataggctactatttacgacagcgacagcaataacaactggagatggggaagtgatcctttcctagaactcggcatagatgcaaggaagacgcccaaaagacatggcgccaaaagtctacgcgatctccaagaaaaaataggcccctccgagaggccatcgaggacaacacatggttacgggatctcaacttatctcaacttatcaactagtacggacatgacggtggaactcctagaacaaccagtcaccatctagatagcagtgcaaaacatcaaactcaactttaaggaaaagaatgagatcaaatggaagctcatatgccaaggagaatacacagctctttcaacctacgaggcacaattctttggcttagtcaatacgaattatgagatgttgatctggaaacca

SEQ ID NO: 39809 - DNA, 228 bp, Oryza sativa
  Clone ID: PAT_MRT4530_43311C.1
cgggctgcaggaattcggcacgagggtcaaagtcttcgcttctcttcttagatttctttcttttttatttcttttttttgttgtgctggctcttgttgaagtatttggaactgtatttgccataggccccaaaaaatctggtggttaactacttctgatgaatggtgttggtgtaattggatggtggattcttttgttggaattaagctgtaatttaattggatcaag

SEQ ID NO: 39810 - DNA, 156 bp, Oryza sativa
  Clone ID: PAT_MRT4530_43312C.1
atggcaacccctgatggcatcctccgtcgacctggttttgttatgaccagttgcatagccggcaacatcatcggcaatcgcaggagctcgccgcgcgcgccggtaaaatcgagcggagtgacgaaatggctgtcatcacagaaggtgggtcactaa

SEQ ID NO: 39811 - DNA, 505 bp, Oryza sativa
  Clone ID: PAT_MRT4530_43313C.1
cacggggtcgggccccccaacaacccccaggggggggggggcaacccaatggaaggcaagccaaaacaaagaattgaccgccgaccccatggtttgaggagggacccaaacccccacccccggccgggggcccacccccccacaaaccaaccaacccccccccccacaaattaaacaaccccccaccggacccaaaaacgcttgcccgtacgcggccaccctggtctggatttccaacccgcgcgtcggagtttttaccgcagagccaaacccctaggcgcggaacaaaaggtttccggcaggcccaaaacaatgtgggggagggtttcccaggggggccgggcaatgcgtgggggggggccccaatgggccggaattcgttaaatggggcccgccaaaattgcctgggcggggcagggggtggggggcccctccccttggggatcataggttccggtcaaaaagaccccggggagtttggccccgctgtcctgacctatcccgg

SEQ ID NO: 39812 - DNA, 220 bp, Oryza sativa
  Clone ID: PAT_MRT4530_43314C.1
ggggggagggttttttttggggtgtataaacccttattttattatttaatactccatccgttttgaaatgttttacacccttttctttttatcacaagtttgactcgccacaataaacaaaatgattaagagttttgttccttttttatcgatctcgggttgaaaaaaaattcgctctataatgcggcttctaaaatatctgggagaccaaaagaggatg

SEQ ID NO: 39813 - DNA, 244 bp, Oryza sativa
  Clone ID: PAT_MRT4530_43315C.1
agctcttattggaactttgcacgtacccgatcaactggataattgtaattcgtaaaacagagtctatttaagctggcttgtgtgctgaacaaataccataaagacaaacaggcatggtgtaattgaatgctcacatatggggagaattcgcttaagcaatgctggctgccaaaccataaaccaacgtaaatatttataaaaacaaggtatgctccgtgacaaatagcggttgaggaattaatca

SEQ ID NO: 39814 - DNA, 320 bp, Oryza sativa
  unsure (1)..(320): unsure at all n locations
  Clone ID: PAT_MRT4530_43316C.1
ccgccttagatcnaattatgctcgccgtnccnctgggaatgaatgaaccatcccatattggtcctgaacttccccccngtgtctaggtcngtngancttcnnaaatcacatgttttgtcgcgcgtcctcccaaaaaaaagancatggcccccncngggctgttaccganacntgtgatattgtggctatgcntgngantcntggtgatggtgttatttgggggaagcatttacacctttggttgctnnanananttngctgggcagcccatanngaacagtatgataatcccattgntggtgtttaatgcttggtttccc

SEQ ID NO: 39815 - DNA, 1829 bp, Oryza sativa
  Clone ID: PAT_MRT4530_43317C.1
gcgatgctgctgctggtgctggtggtggtgcgacggtcgcgtccggcgcacggaaagacgccgccggtgggcggtggcttcctcctcactcactcgctgcgctgccgagcccatgccgcggcagcagcagatgcactcattcatttacgccgctgcctgcctgcctgccatcctgcccccaaattggcaaatttctacctcctcccaccccgcttcgccgccgtcgccgtcgccgccgtcttctccgaccggttcaccttggccctctccaccgacgctggccgagttcttgccggggccgcggcctttcttcgtcctcaacccccacgccttgtccttgctcgctgacgccgacacggagaccttcttctcgccgtcgtcgctcccctccccttcctcggcggcctcacccttctccgcgctctcctccttcttcgccgccgccgcggccttcgcgatgggagctccgcttccggcaaacgatgagcggtttccctcctttctcgatcagcgacccgacgatgccagcgccgccgccgccgccaccggccggcgacgcgtccagcctccgccgcaccatctcgatgtccacctccttggacgcggccaccgactcgccggaggcctgctgcttcgccgccgccgcgtcctcgtcttcctcctccgcctccctcctccgcctcctcgtcgtcgtcgtcctcctccgccgcccccacctccatggcgacggagtcccagctccccgtgccgtgcctgctcacggcgcaggccaagagcagctcctccaacgtcccccagatctcacctccacctcctcctcccgccgccgccgccgccgccggagacacgtcggggccgtccgatccgtccgccacctccagtgccttcttcaactcctcgctcgcctcattcgacaccggcttcggtccactgtccaccatctccttgcccgcagcccccactggaaccgcaggctcgccttgctccacagcggcagcacgctcctggtcgtgaggcgcatcccggacagcagcgcgccgaccccgccgccgctcttccccgcggcggccaccgccgccgccgccggccgagacgccgccgccaacgacgacgacgccaccgccgccgccgccgccccggcgctccagaccacgccctcctccgccttccacaccccgtcgtcaaagttgcgcgcgtagctgtccgagtcgtactcgtacctcgccggcgcggcgagcctcctcctcgctgcgcgccgccgccgccccgccgcgcagtacagccccgcggccgccgcccgcctcaccgccgcccaccacgccctcgccgcggcggcggccgccgccaccgccaccgccaccgccaccgccgtgccgtcccctcctcctcgccgccggctctcgcacgccgtcagcctccggtacgcgatcgcacccatctccaaaaacgcgcctctcctcttccgactcctcggccttccaggcggcctcccgctcggcgacctcgcgctcccgctcctggatgtagctctgcatctcccgctccttcatgacgcgatcctggatgtccgcgtccagcgcctcctgcagctccttcacgaacctgtccaccaccgccttgatccgcaccgacatctccctcccccgcacttcgccgcctcgccgccgctggcgccggactccggcggctgggctagggctccgatgcggccgcggcgcggcgaaattttcgtgggccgctcgtttcgtcccagccccgacacccgccaacacccgctgacgcgaaccccttgcggccgcatcgaatataacttcgtataatgtatgcta

SEQ ID NO: 39816 - DNA, 574 bp, Oryza sativa
  Clone ID: PAT_MRT4530_43318C.1
aacagtttattatcgatcgatcggacaattaattaagggagagcaacggcggtggaggaggatctcccaaggaggcagcggtggtggtgccgtcctccggcgacgccaccctgggcgggcacctggctcggcgcctcgtgcaggtgggcgtgagcgacgtgttcgccgtgccgggggacttcaacctgacgcttctggaccacctgatcgccgagcccgggctccgcgtggtgggctgctgcaacgagctgaacgccggatacgcggccgacgggtacgcgcgggcccgtggcgtgggcgcctgcgccgtgaccttcaccgtgggcgggctgagcgtgctgaacgccatcggcggggcgtacagcgagaacctgccgctgatctgcatcgtggggggccccaactccaacgactacggcaccaaccgcatgctccaccacaccatcggcctcccggacttctcccaggagctccgctgcttacaacccctcacctgctaccaggccgtcgtcacaacctcgacgacgcccacgaccagatcgaccgcgccatctccaccgtcatcagggagagc

SEQ ID NO: 39817 - DNA, 685 bp, Oryza sativa
  Clone ID: PAT_MRT4530_43319C.1
ggttgtcctttttttttttttttttttttttttttttttttttttttttttttttttttttttttttttttttttttttttttttttttggaagaaccaaaaaaggggggaggggggattacaaaaacgggggggaagggaaaacttgggatacaataatcccttacaggggttggtaaaggggaacccccaataccggggggggaagaagattttaaaaaaagtttacacaaaaaagccaaaatggaaacctttggggccggccaaaaagggggggttttgaaggtgccggggggggccatgcataaaaaagggccaaaaactagtttggagccccccacttaaaaggaaaaggcctggataatgccccaaaaatgggtgaaaaaacccccaaattgggacctttttttccccaaccaaaagaaacccccaaattttgtgaaggtttccccccctcaccaccggataaaccttgggaataaaacccctagaggggggccaatagtaaaacgggcgagactgcttaatggaaaaggggggctttgggcaacacaaggtgcccacaatggggggttaactcgggaaaaaaacacacccttttttcaaaaaggggggcccccccgaatgtgggcccctccccccccccccgtggggggtgcaaacggggcacccccccctttttttg

SEQ ID NO: 39818 - DNA, 391 bp, Oryza sativa
  Clone ID: PAT_MRT4530_4331C.1
gggccacaaaagaattgaacaatagctcccaggagtagtttacaggaaagaaaaataaaatactatgcataaaaggtcaagaaaggtattgaggagacggggaatccaggcttaaccatctgttctttattttgggacgtgggcgacaaccattttaagggggggatagctaatggattatcacatctggatagtaaagaaatccttaaatccatatacttcccattgaagaaaatccctaaaatttgcaaatgctttagcggtgggcaaaattttcaaccggaagggaggggacctgcatgaatcaaccaaatgaggttaactggacagcagcaaagtaatcctaattccatataaaccccattaaagaaaatccccaaaaattgcaaat

SEQ ID NO: 39819 - DNA, 402 bp, Oryza sativa
  Clone ID: PAT_MRT4530_43320C.1
atgggtgcgatcgcgtaccggaggctgacggcgtgcgagagccggcggcgaggaggaggggacggcacggcggtggcggtggcggtggcggtggcggcggccgccgccgcggcgagggcgtggtgggcggcggtgaggcgggcggcggccgcggggctgtactgcgcggcggggcggcggcggcgcgcagcgaggaggaggctcgccgcgccggcgaggtacgagtacgactcggacagctacgcgcgcaacttcgacgacggggtgtggaaggcggaggagggcgtggtctggagcgccggggcggcggcggcggcggtggcgtcgtcgtcgttggcggcgtgcaggcacgccgcgatcgtgccatgcccagtgaactctgaattgttgatccctctgtaa

SEQ ID NO: 39820 - DNA, 1913 bp, Oryza sativa
  Clone ID: PAT_MRT4530_43321C.1
atggcggacggatcggacggccccgacgtgtctccggcggcggcggcggcggcgggaggaggaggtggaggtgagatctgggggacgttggaggagctgctcttggcctgcgccgtgagcaggcacggcacggggagctgggactccgtcgccatggaggtgcagacgcggagccccctcgccgcgcgcccgggcctcacgcccaccagctgccgcctccggttctgccacctccaccgcctcttctccgtcgtcgggggggcggagctggacgacgacgacgaggaggcggaggagggtggccccgacgcctccgccgcggacgggtggatggacgagctccgccgccacctcggcgacgagctccgccgcgtggtcgagcgacgtggtcgctccatcggaacgctacggaggaaagtgaagcggctgagagaggagagagaacaaagcatccgcggcggcggcggtggcgaggggaagccggaaacggcgaacggcggtgagcggctgtcgggcgaggagcccggcctgccgtgcagggagtccaaatccccagatcgggagcccgcagcgcgcgccggtgaccatagcgtcggggcggaggaggcacgcgaggctgcagcgcccacaagtctgcacccgtccagagagtatggtgccgcgatgagcgggacggggccaatgagcccgccatccaaggggcacattgagtgaatcatcgggcggcccggggagcccgctgaaccaaggtgtcacgggccagcaaccatggccagccagggctacccagcttatcctggaagtgagctcctcctcctcatcatcatcagtgaccagaccttggtcccgtctgaccgccgtagaacttgcgaaaggaaatgtcgtggcggtggtactcgaggtactccggtgcgacgccatggatcctaactagcccccctatctagtgtaatgtctgaacctgaatcagggaagaaaactgtagccgttgcatctctagctagctcttctggtgtaggtgctgttactattggagactagactcaatgtgttatttaggtggttaaattgtttttttatcttccagacaccgatgaaaaagctcattgcttctatgtaactatgttggcatgttgcggttagcttgtgcctcagttcttttgcggagagctgagggcgtcgtctccgtcggcggcggcggcggcggcgctggcatcgtcgggtcgctgatcgagaagggagggaagccgctcatcgtttgccggaagcggagctccatcgcgaaggccgcggcggcggcgaagaaggaggagagcgcggagaagggtgaggccgccgaggaaggggaggggagcgacgacggcgagaagaaggtctccgtgtcggcgtcagcgagcaaggacaaggcgtgggggttgaggacgaagaaaggccgcggccccggcaagaactcggccagcgtcggtggccggaaaatggccaagctctcggaagcgacggaggcagcgaccgacggaagcaagaagcccgacaagaagatcgccgccgacgcagccacgcccgccaagaagcggaacgccgtggacttcctcaaacggctaaaccagggctcgtcgccgtcgaagaagaagaagaaaggctcaccaatggggacacggaagcgtgctgcggcggcgacgtcgccggagcagccgcagaagacgcgtaaggggcccggcaggaaggatgccggccgcggcggctccaagaagggcggcaagagcgccacgccgaagagaagcgtggggcggccaccgtcgaagcgaggtgccgccgccgcaacgacgccgccgccgtcgaagagggccaaggtgaaccggtcggagaagacggcggcgacggcgacggcggcgaagcggggtgggaggaggtag

SEQ ID NO: 39821 - DNA, 2163 bp, Oryza sativa
  Clone ID: PAT_MRT4530_43322C.1
atgaatatgtcgccgcgcattccggtggtggacctcgaggacgggtggcgcgacgtgctcgccggcgtcgccaagctcaagtgcatcctcgatggctccaacgtcgtgcacttcgtccccgacgagtacatgcacctctacacgacggtttacaacatgtgcacgcagaagccgccgaacgactactcgcaggtgctctacgatcgctacaagcaggccctggacgatcacatcgaatccgtcgtgttgccctccttgaatgagaagcatggcgtgttccttctgagggaaatagtgcagaggtgggagaaacacaagctaatggtaaggtggctgaggaggttctttgactacctcgatcgttactatgttacacggaggtcccttgattcactcaaagatctgggctggagtagcttccgggatttggttttcgataagctcaaaagtactgtggcaacaattatgattggcatgattgatgatgagagggaaggcaatctaatagaccgtccactcctgaagaatgcccttgatatctatgttgaaattggggatagtcaactgaattattacagtgatgattttgaacaatcatttctcaacggaacaacagattactattctaagaaggcacaaacatggattcttgagaattcttgccctgaatacatgctcaaggctgcactcttcgagttgatagataggcgtgcagaagaaattctgaacaaggagaactccggatgcaaagtgttgctttgtgatgaaaagaccgaggatctagcaaggatgtttaggctcttctctaggataactgacgggctgcttccagtatcgaaaatatttaaggagcatgtcattgctgagggtatgtctctgctgaaacatgcaacagatgctgccaacagcagaaaggatgagaagaagggggtggtggtgggattgccggagcaggattttgtgaggagtgtcatagagctccatgacaaatatatggcatatgtcaccaactgtttccagagcaactcagtatttcacaaggcacttaaggaggcctttgaagttatttgcaacaaagatgttgttggttgcagtagtgctgaactgtttgcggcatactgtgatagtatcttaaaaagaggtggaagtgaaaagctaagtgatgaagctatagatgaaagtcttgagaaggttgtcaagcttctaacatatctcagcgacaaggacctctttgtagagtttcataggaagaaacttggaaggagattgctgtttgataagaatacaaatgacgaacatgagagaatcctactctccaagctgaagcaattcttcgggggacagtttacatcaaaaatggaggggatgctcaaagatattacattggcaaaagaacatcagtcaagttttgaggagtacgtaagcaacaatccagagtcaaatcctctgatagacttgaatgtgactgtcttgacaacaggatactggccaacatacaagaactcagatataaatcttccattggagatggttaaatgcgtggaggttttcaaggaatattatcggtccgacaagcaacacagaaagcttacctggatcttttccttgggaaactgcgtcgtcattggaaattttgatgctaaacctgttgagttcgttctcaacacttatcaggctgcattgttgctgctattcaatgaagctgataaactgagttactctgatattgtgtcacaattaaaactgtctgatgatgatgccgtgcgtttgcttcattcgctttcttgtgcaaagtataagattctcaacaaagagcctagcaacagagtgatttctccagaggacgagtttgagttcaattccaaatttaccgataggatgcgaaggattaaggtaccacttcctcaaatcgatgagaagaaaaaggttgtcgatgatgtcaacaaggacaggaggttcgcaattgatgcatctcttgtgcgcatcatgaaaagccgcaaagttctgggccatcagcaacttgtagcggaatgcgtggagcagctcagccgcatgtttaagcctgacatcaagatcatcaagaggaggatcgaggatcttatcagcagggagtacttggagcgtgattcggagaatgcccagacctacaaatacttggcttga

SEQ ID NO: 39822 - DNA, 557 bp, Oryza sativa
  Clone ID: PAT_MRT4530_43323C.1
ggtgtgacaccgcggagctcgccccctctcctgccggccgcccctacgagctcgcctcatccctcgcgccgctcccatcggccgccctctcaccggcgcggcgcgcaccgccgcccttcttcctcccacccgtcggccggctcgatgagctcgtctcatccctcgcgccgctcccatgggccgccctctcgccagcgcggcgcgcgccgccacccttcttcttcccactcgtcggccggctcgacgagctcgccccctccctctcggcgctcgcgtcggcctccctctccgccggcgcggcgctcgcgtcagtcgccctcttcgccgggacggcgctcccgccggccgcctctcggctcaccgacgtgatcacgaggagggaggctccgccgccgctcccgcggcatcagccgccaaggccgcgagggagagggatggaggcggtggggagttcccatgcgcatcggcggcggcggtgctgggggcgtcctcttggtggtgcgcgttgtggcgacgatagggaagatgggagtgagccgagaggagagatgggatga

SEQ ID NO: 39823 - DNA, 867 bp, Oryza sativa
  Clone ID: PAT_MRT4530_43324C.1
gacgatgcccactccacatactatttcgggtacttccccttttccacgcaacagcagcaccgcggcggagatgatcgtgacggagcaggagcacctgcagccgcggcaccggaggtctaggaagagggaccggccgccgccaacgccgccgtcgggtaacatcaaggcggcgccggcgccgctaccggaggggggtggccatggccacgaagaggaggcgcgggacgaagacgtggacaggttctacgcgctgctcgacgaggtcagggagatgagggagctgtggcggcggaacggtgattgtgtcgcgaccaagcggacgagcgtggatggtggccagaagaagcaggatcgccagcagctgtggcggccgacgtttgtaatggaggacttcgcgttcgagttgaagggaagccaagtagtccaaccggagaagaaggtggacagcgcgcctaatctcgatcttagcttgtcaatgtgattttttcttttctttttttttgtttttgtgggttcccgtgcaaatagcccctttacgtggcacggaaagaatgcagctttcatccacatcttgcaaaaaaaaaaaggaggattaatgtcgccgccgccgtttcttctcctcaactgtgtcaccgccgccaatctactccagttccccgccgctccgcgcctccgcctccgtagcaagctcgccacctccgcctcttcatactgctgctggcctgccgcagtccaccgcctcctcaccatggtctccctcagcctgcccgccgtcctcctcaccttcgccactgcccagtctgagagaggaacgatggtgagggctctcaagcgagagcatgaacgcagcgactggccaccgccact

SEQ ID NO: 39824 - DNA, 261 bp, Oryza sativa
  Clone ID: PAT_MRT4530_43325C.1
atgacggcgaccaccgtggccaagagtagcgaggaggtgcccccggcgagagggcttcctctgtatcttcacccgccgtttccacatggcccagagcgcaaaggagagggggccgggctagggtgcggaggcagggcggcgcacgacgatagttcggctcccgatgtggtgttcggtcggggtgcttcatcgatggaccgccacccgccgcttgccatctccccgtggaggctccgtccacgctcgctgctcgccgtttag

SEQ ID NO: 39825 - DNA, 201 bp, Oryza sativa
  Clone ID: PAT_MRT4530_43326C.1
atggcccctcaggacccaaacgcaccgagagagaacgcctcggaccgtgatcccaggaccgagcccaactcccatggaaaggggcacctgggaggcccaaatcgggcgaacggcttcggctggtctacgaattggctcagggcgtggactgttgttgactgcgccggcggccaaagcctgggggcctcgcgcctccgatag

SEQ ID NO: 39826 - DNA, 855 bp, Oryza sativa
  Clone ID: PAT_MRT4530_43327C.1
cggacgcgtgggcggacgcgtgggcggacgcgtgggcggacgcgtgggcggcgacggcgggcggcgggcgcgcgctcctcctccgcatccctctcgctcctaccttacccctcgccgccactccccctcctactcctcctctccctggcggcgccacccgtttctctaatgccgtcttctcctcctccccccttccctccgtcctcgatgacgacggatgacggcgaccaccgtggccaagagtagcgaggaggtgcccccggcgagagggcttcctctgtatcttcacccgccgtttccacatggcccagagcgcaaaggagagggggccgggctagggtgcggaggcaaggcggccgcacgacgataggtacattgtcttctctcctatactacgtctcatcttgtcagtcgtcacgttcttgttctcgatccgagtttttggttcgcaggattttgcatttttcttttcagttcggctcccgatgtggtgttcggtcggggtgcttcatcgatggaccgccacccgccgcttgccatctccccgtggaggctccgtccacgctcgctgctcgccgtttaggaatttggttgagatgagcggatccatgtttcttttcttccctagcggttgttcttgatgtgctagttttttcttgtataaatcctaaggaattacctaaggaatggttgattatattggttgttgtgcgatgcatcgatgcatatctttttaggtatttagggatggattgtttggtccgatacaagcagcaaaaaaaaaacaatgaaaaaaagaaataaaaagacctttagtttcggattgaatgttccggtttaaaaaaaaaaaaaaaa

SEQ ID NO: 39827 - DNA, 802 bp, Oryza sativa
  unsure (1)..(802): unsure at all n locations
  Clone ID: PAT_MRT4530_43328C.1
ccacgcgtccgaggcaaaccttcgcaaagccagggaagaaacaagtcagaggaacgcagctccctatcctgttccgctccagacgcacgcacgcacgcgctgcactgactgaggccgacgcggcggcggcggcggcagcggcggcggcgaaagcgaccccgatgacgaagcccaagaacggctgcctcaagatcctcgcctgcgccggcggcggatccgacccgtccgccggctccgacggcgacgcggatgaccacgtcgacgagaacaaggccatatcagataaaagtaggtggagctttcgtaggaggtctacaaggcatcgtgttttgaagaattctgatatatctgaacctgaaactcttagttcgagcaaagcaaaagctgaaattgctccaagcaacatctattcttcaacttactcctatgcctcagaaaaacctctacagcaagagaaaccagatgagaaaattctgcagcaagagaaatcagatgagaaaattctgcagcaagacgaaccagctgagaaaattctgcagcaagagaaaccggacgagaaaattttgcagcaagataaaccagatgaggggcctttgaatgaagagatgcctgatgaaaaactgatagagaagccaattgatcagccaggtgatgaatcaattgaaaagccagctgatgaaccaattgaaagtcagctgaccagatacttganaaggtcaattgagcagccagctgaaagagtaacctggaagtgccaatccaagaaccaactggaaaggggtaactggaactcccatagtaa

SEQ ID NO: 39828 - DNA, 273 bp, Oryza sativa
  Clone ID: PAT_MRT4530_43329C.1
atgtgtaaatttatattattaggatacgtcccatcgctatatcgtgggatgggagtacattttgatcatgcacatgtcaaagtgtcaaaaactacaccatacaatctgccacttctgtatgccgtgaagctaagcctgaaaaatcagacacaaaaagggaaaaaaaaaagagaaaaccttttggcatagctacagttgatgaattgagccccaaaaaaatcttgctcatggatcgagaagcctatcattgatccccgatcctcctccggcatt

SEQ ID NO: 39829 - DNA, 634 bp, Oryza sativa
  unsure (1)..(634): unsure at all n locations
  Clone ID: PAT_MRT4530_4332C.1
ccgggctgcaggctcacgcatcgtcgccgccctccggccagcagcgacgcgccgacacgtttgagtccccgccgtcgtacgtgtgggccccctccccggcctctcgtctcatcggaggtctggatcgaccgcttcctccgctcgtcgcggcgaatccaaccaacgccggcgtccctccgccgccgcagcttcctgtgctgaatcgcgaatctctcgccgctccccgagtccgggaacgcacggagcgggcgcggcgagcggctggcaccttggttcaaatctcgccgcgaaacttctagcaggcagcggtttaaatctcgaatttatttattttgggtgttcggctgagcccccatggccgacgctaggtccacccctgaatcgctgccgcccgcgtttctcgagttcctccaggagaatggcttggacccaatgatgtattccatggccgacaccatcccacgatacataaggctaaaaccaggcatggaggcccagattccagagattcagagcgagctgaagtgccatctcgacaaggtttcgtggctgccagatntctacgcaattccgcctcaagttcagattgctagctccaaagcctatcagcaaggaaagatctatggaattgatg

SEQ ID NO: 39830 - DNA, 3267 bp, Oryza sativa
  Clone ID: PAT_MRT4530_43330C.1
atgacgaagcccaagaacggctgcctcaagatcctcgcctgcgccggcggcggatccgacccgtccgccggctccgacggcgacgcggatgaccacgtcgacgagctgcagcagctggaatattatggctgctactcttgccgccctgagtccatgcaagatgtcaggaagggatctggtgtttatctgctgctcaaagtgctactcactgtgtatgaaaaatcctctaatcgtaggagacagccgcaccatagtgttggtgaaatgggatctggaattttcacgggacagcctagaggatctgtaccaactataaacaaggccatatcagataaaagtaggtggagctttcgtaggaggtctacaaggcatcgtgttttgaagaattctgatatatctgaacctgaaactcttagttcgagcaaagcaaaagctgaaattgctccaagcaacatctattcttcaacttactcctatgcctcagaaaaacctctacagcaagagaaaccagatgagaaaattctgcagcaagagaaatcagatgagaaaattctgcagcaagacgaaccagctgagaaaattctgcagcaagagaaaccggacgagaaaattttgcagcaagataaaccagatgaggggcctttgaatgaagagatgcctgatgaaaaactgatagagaagccaattgatcagccaggtgatgaatcaattgaaaagccagctgatgaaccaattgaaaagtcagctgaccagataactgaaaggtcaattgagcagccagctgaaagagtaactgaagtgccaatccaagaaccaactgaaagggtaactgaaactccaatagtaaagccaaatgataatgatgttgaggaacacactgataagacggatgaaagtatttttgtttcatcaactgaggtgaagcaggaggaaaccgtctctctctttgatggaagcagtgaagaccatcaggaagattgtgcggagactgctgctgctgtcattcagtctggcatcagagtgcacactgaagagcaagaactaccaaatgataaggaccttgtgaaactgcaagctgtgatacgtgggcatcttgttaggaggcaggctgcagaatcattacaatgcttgcttgctattgttaaaatgcaaggacttgtccgggttcatcaagcacagcaatatggaggaaagtttcaggactctttgatctgttcttcaagtgagaaattactcaataatggatttgctctgaagctcatggacagcatgtcgacttcaaaatccattcacataaaatgtgatccttctgaacctgatgttgcatggaaatggatggagagatggacatccatgattccaccaaacactgggggacacttgctagaggatagagagaataacgagtcggtggatgagaaaataaaaggagatgctcaacatgaggaaaatacccttcctttggattctgacatctctttcctgaagttggtgcctgatgatgcggaagagacactaaggccatctgattctcatcccctggaggtttctgcatgcattccagatagaacttctggaatggaaattgaagatgttcctgaaccagatttgattgaaaagttcaaggaagatgttgaaaaattgactgaaccggagactgagaatgttgcggaacaacctttggaggtctcagttgaacaatctactcaaactgatacatcaagggaacccattcctcttcctgaaaaacctgaatcttcctttgatgatactatggatgcatataaaactgagcagacttcggagatggaaggtaaaaagtttatggctagaaagtcatgcaatcctgcatttgctgctgcacagttaaaatttgaagagttgacttccaatttgacggtcagtaggtccaacagtctggatggggcaaacaaaccaaaggtacatactcctcgttcacaagacaatgtctcacccaagcaaagtaatgacacaagcataccagagagctcagtggggcatgatcctaaaatcgtagttgctgcttcagaatgtggaactgagatatcaatctcctctacacttgactcaccggatagatcagaagctgatggtggcgagattgtactggagattggatccctggaagataggaaccatgttggtgataatgctgaaaaggataacagtgttttgcattctgaagtgaacacttctggaggagctatcgagccagaaaaggaagtacaaactgatgacactgctatcgctgccaatgcaattgatcctgtgcctgttgaacaaccacatctgggacaggaaaagcctgatttacatgatgaactggaaaaatctgtaggatcttatgtgaagacacctgaaggtactcccttgagccgaactacctttgctgaatctcatgggacaccatcaagtgaggtctctgttaacaccaaaaaaagcaagagcaaaaggcccaagtctcatgtaagcaagagatcactaactagtccaagcagcgattctgtgggacggagcagcatggataatctgtcaaaggattacagacttgggaggcgagagagctcaggcaaggttaaatctgatcatgttgatcaagaacctcgcataagcaacagcactccattgccaagttatatgcagtttacagaatctgcaagggcaaaggcatctgctagtgtatcaccaaagttaagcccggatgtgcaagacaacaatccaaggaaaaggcactctttgcccatgactaacggtaagcaagattcatctcctcgcatgcaacgatcatcatcccaagctcagcagaatgtgaaaagcaatggtgctgttcctgttcctcccaattcatctgataggagatggcatatatgatgagtgcgcctagcaagagtttttagcgaggtgccatagaagcatttgatgagatgactcagatttgtgcttgttttcccaccgcacaccaccatctaattcgtcagtttttttattctttgttggaatactcggtatggttggaacttgggagaagaacagcaacagctttcctataatgtacatttgttggttcttggtttgttgttatttgactggtaatgaatgaatgaatgatttgtgtgtgtaatatatcttgacttgtaatgcaacagcggtctgttatatttgccaatattgatgttcatgttggtatggagtgagaaatgcctgccccctgtatgaggttctgtcgccaaaaaattgccttgctct

SEQ ID NO: 39831 - DNA, 411 bp, Oryza sativa
  Clone ID: PAT_MRT4530_43331C.1
tggaaacggacatcttgattattctcatggatcctgattactcttacaggttcgtgctttcaagtttcaacttcctgcttcgtgttaagatggttttatattgtgctttctgttgattcctctaaaaaaactaatcgcgtcatggcagaatttacttctgcttaacgttgacagtctacagtttgaaacgcaggaataagctgcaattcctaccagaactgtagataaattccttgttattatattatgttaataaccagttttttttttttgcggggaatgttaataaccagttaatcctagaaaaggttttcttttggtttgcaaagcttcgataggtagactgtaaaaacacatctaataaaatacaagacacaaaaaaaaaaaaaaaaaactcgagactagttctct

SEQ ID NO: 39832 - DNA, 166 bp, Oryza sativa
  Clone ID: PAT_MRT4530_43332C.1
cgcattttcttcggcttcgggattcaaacttccggaacaaattccaaatccggttccccaaggttaaaccttactttaaacccgcggattccaaccaatcccggggcggtttccggccttttggggcacttggggcagggattggttctggggcgggcttttttag

SEQ ID NO: 39833 - DNA, 972 bp, Oryza sativa
  Clone ID: PAT_MRT4530_43333C.1
atggaggaggggttgccgccggggttccggttccacccgacggacgaggagctggtgacgtactacctcgcccgcaaggtctccgacttcggcttcgccacccgcgccatcgccgacgtcgacctcaacaagtgcgagccatgggacctccccagcaaggcaagcatgggggagaaggagtggtacttcttcagcatgcgcgaccgcaagtacccgacggggatccgcaccaaccgcgccacggactccggctactggaagaccaccggcaaggacaaggagatcttccacggcggcgcgctcgccggcatgaagaagacgctggtgttctaccgcgggagggcgcccaagggcgccaagaccagctgggtgatgcacgagtacaggctccagtccaagttcccctacaagcccgccaaggacgagtgggtcgtctgccgcgtcttcaagaagctccagtgccacctcgccaagccccgcccgccgcacgacgacgtcgacggagacggcgcctcgccgccggagatggtggacgcctcgtcgctcggcgagcttggcgagctcgacgtctcctccatcctcctcggcggcttcgcgccgccgtcgggcgagctctgccatggcggcggcggcggagacggtttcggcgcgcacaggcttcatgtcggcgcgtacatgagctggctgcaggcggcggcggcggccaaccagggcatgttccagtggccggcggccacgcaggcggggctggtcggaggcaccgtgttcgcggcggcgcacaaggcggcggggacgatgccgttcggcggcgggtgcagccagcagcaagcgcgggacgtgggcgtttctctggcgaacgtaggaggaggcgatgcgttgttcggcggggcgccgctggcgaaggtggacatggaatgcggcgagcaggcgccgcagctggacatggacgactccacatggagagccttctga

SEQ ID NO: 39834 - DNA, 464 bp, Oryza sativa
  Clone ID: PAT_MRT4530_43334C.1
cagctacgaaataacttatatagttaacataacagtatcatatccttggagattactaattctctcttcagcaacagcattgttacggatcagacatacatcctatcctatggcttatggaatatacgagtattgtataccttcacgtacacgggttgttttcgtatgcgttgtaggaatccatcatgaattatggaaaatatctctacgggtcgagtgattaatttacaaagtctccaagtcttacttggagatcaagatgatccacgatataaaaaggacccctgggagggatgcaaggcattgaatctcatgccaacacacccaccatagtctacgaagccaaagcccacagagccaaatcgtcgggagatttcatcgagtctatcgactatgatctcatcctcgttccaacgtaccccaataccctaatcatctgttctacaagtatcactcgtcgaagg

SEQ ID NO: 39835 - DNA, 1178 bp, Oryza sativa
  Clone ID: PAT_MRT4530_43335C.1
ccgccgcggctcacctggaaactgggcagattggacaatcgctcgagcgagctagcgagagagagcgcgagagagcgaggcggcgcgcgcggtggttgcggatttgtagcttagagcgcggggccatggggaggtcgccgtgctgcgagaaggcgcacacgaacaagggggcgtggacgaaggaggaggaccagcggctcatcgcgtacatcagggcgcatggcgaaggctgctggcgctcgctgcccaaggcggcgggcctccttcgctgcggcaagagctgccgcctccggtggatgaactacctccgccccgacctcaagcgcggcaacttcaccgacgacgaggacgagctcatcatccgcctccacagcctcctcggcaacaagtggtctctgatcgccgggcagctgccggggaggacggacaacgagatcaagaactactggaacacgcacatcaagcgcaagctcctcgcccgcggcatcgacccgcagacgcaccgcccgctgctcagcggcggtgacggcatcgcggcgagcaacaaggcggcaccaccgccgccgcatcccatatccgtcccggcgaaggcggcggccgcggcgatcttcgccgtggcgaagccgccgccgccgccgcgcccggtcgactcctcggacgacggctgccgcagcagcagcggcacaacgagcacgggggagccacgcgtccgcgacctcaacctcgagctctcggtcgggccgacgccgagctcgccgccggcggagacgcccaccagcgcgcggccggtctgcctctgctaccacctcggcttccgcggcggggaggcgtgcagctgtcaggctgacagcaagggcccacacgagtttagatatttcaggccgttggaacaaggccagtacatatgagatatgaccatgagatgtgagatggcttaatcagcttcaattcccaacatgtgtaacacagggagtttttctagtggacgacaatactgtttaatttcagaaaaaaaagggaaagaaaaaggttctaatctgttcatatttcttactattatccaatcttcatgatctcaatctctctctctctttattatttttctttgtagtaattaacttcatgttggttcctctaaaaaagattggtcgatgttattcagtgataaatattcctag

SEQ ID NO: 39836 - DNA, 1674 bp, Oryza sativa
  Clone ID: PAT_MRT4530_43336C.1
atggcgtcgcgcccccgtggaaggcgccttcctcctcctcatccgccgctcatccaggagatcctcgacgacgacctcttcgatgtagaggttaactacagcgacgaggaagaagaggaggaggaggaggaaagcgatgaagaggagtcggagtcggaggacaacgaaccggaggaggtggtgccggggcaggagagtatcggggagggatgcgggccggccatacaagctagggtttccggcgccgccgcggagaagaacgcctgccccgtttgtatggaggcctgggcctcccaaggcgctcatcgaatctgttgtattccttgtgggcatatctatggaagatcttgcctggagaggtggttgaggcacaagggcaacactagcgcaacctgccctcagtgtgggaaaaggttcagacctaaggacattaccaatctctatgcaccagaggttgcagttccaaataatgatctggaaaaggaagtattgtatctaagggggaaagctgaatcccttggggaaacggtgatgaaacatgagaaattgatagaggagatgaatgagagattggttgagttgacaagtgctcagaagaggcagattctgtcagagcagagattaatgaacgttggtagctcaaagagacagaaagaattcttcatggatggacttcgagtcatggccatagatgcatttaaccaaacaattcttgcttctggaaaagcaccaggcataggacaagaacatgttctttataagtttagcatggtttcccatcacgaagctcggaatatacaacttcctctggatactaaaactgtcagggacatatgtatcttacctagtggctctgctatttttacatcactgggcaggaaactatcgtcatttagcatgacggctgaccgtgtcgttcttcagtgtgatttgccgtgtcctggctggtcatgttctgcggatgaatcttcgcgtcagatttgtgctggattgcagaatggcaatcttatcatctttgatatccgtcaaacctcaagaccgttgcattctatggtgggtttatctacacacccggttcatactctccatacggtcattgataacaacggttctagaaagtttctctctgcctcttctataggcccctgcatgtgggatactgatggtattcaaggcaggccaaagttgctattggggacagataatcaacgggtgtgcatttctcttgcatgtgccccttcatcaagtgatctattggtagcttcctttcggccaaaggttgaaacgtccgaggatgctacagcatctcaagtgtatctatcacaaacaccaacaccctctggtggagggaaattagggtatcattccttcatcaggagggcggggaactcgtcatccttcaccgaagataggacatgcagcacacttgtgagcgaaattcgcatgtcgaaatccgcaattataccttatggaaacaaccaacatctgtttgcttatggagatgagtcgctgcgtggggtccggacctggcgactaccatcgtttgagatgcattctgatctcagctccctccagcaaccggtcctggatctaaggtatgcagaaagttcatccggagggaggtatctcgggtacctgagcacggaaaagttgcaggttttcagaattaggtag

SEQ ID NO: 39837 - DNA, 277 bp, Oryza sativa
  Clone ID: PAT_MRT4530_43337C.1
tatagtggaagctggtgcgccggctggcaccgccccgccggaatcggcgggaccgaccacgccgtcgttgagctacaacaagcagagctgcaggtgagtgcaaacaaacaagaactggctaccgccacgaacgctgctgagatcacccacacgctagggctgcactcctagaccccgtcggcactggtacatccagagcacatgtgcgacctgagccgaggggtcgcatgaggggctagacatggctaaccaacaccattgccaacacggctggaag

SEQ ID NO: 39838 - DNA, 195 bp, Oryza sativa
  unsure (1)..(195): unsure at all n locations
  Clone ID: PAT_MRT4530_43338C.1
cttcgtcttcgtcttcctctcgccggtgattgaattcgatccaatccgatccaagggggangggaancaatggcngacgacnaggagcgtcaggacgctgnactactccgacgcggaggacaaccccaacctcctcttctgcaccaccatctacgaggtcgacctcctttgctcctggggggggggcctccccct

SEQ ID NO: 39839 - DNA, 394 bp, Oryza sativa
  unsure (1)..(394): unsure at all n locations
  Clone ID: PAT_MRT4530_43339C.1
taagaggattgcccnacttctgcatcaaattgctttaatgagtgacatgagaagtggaggggaagcaattaaaattatcaggaccccgtgattattttttcactgcagaagaggtttcgttgcattgtcgtaccaaatgtgtcatgtagttacagaacagtgtacacttttaagtctggaggatcatcacttgtagcttgataatagtttagctgcatcgcataggcctgatgtttacacggttagacagcaaaacctcctactagacaaactgaccttaagggttcaatatgtatgttatgtatatagttcgtagataatttattaaactatgaatacatccaaagtgttgtttatgtcggttaaaaaaaaaaaaaaaaaaaaaaaaaaaaaa

SEQ ID NO: 39840 - DNA, 210 bp, Oryza sativa
  Clone ID: PAT_MRT4530_4333C.1
atgtggaccgccgccgccgttgctcatggagaggtggggatgaggggagaatgctgtcattgctgccgaggagaggtgtcgccactcgccgtggttgacgtcgagcaccagggaggactagatccagcggtccctaaactcaaacctgccgaatgtggcattagtgccaccgccatcaccgttgctgacgaatctaactgtggagcctga

SEQ ID NO: 39841 - DNA, 672 bp, Oryza sativa
  Clone ID: PAT_MRT4530_43340C.1
atgccccacacggatacggggctgcagttgcaagcaagaaatgaatacgcgctgaacttaatgactcagacctttgcacactttgtccttactcgtgtccactccccggtcggtcacccatcccgaaattgctccaagccaagcctaaactacggcccgtcacggataggtgtcatccatgacgggcctgagttttatgcccatctaacatgtttgtgcgactatatctcaatcggcccgtcgctgccgccttcgtccgtgtccacatccagcaccgccgtgtccaccaccggccacatccggtgccgccgcgtccaccaccgcctcggtgcccaaccacagccggcgcggccacctccgtccctaaccaagtctggcgttgcagcgtccactaccgccttcgtccccagctacaaccgttgccaccgcctccgtccccgtccacatccggcgccgccgcatccaccacctcctccgtccccaacaccaactggcgtcgtcgcctccgtccctgaccaagtccagcgctactgcatccaccgtcgcatccgtccccagccacaaccggcagcgccgcctccgtccccgaccaagtccgacgctgctgcatcgtccaccgcctccgtcaccagccacatccggcgccactgtctccattcccggagctgtagc

SEQ ID NO: 39842 - DNA, 367 bp, Oryza sativa
  Clone ID: PAT_MRT4530_43341C.1
tggtggcggcgatctgtatctaccccaatctggtgtgtccttaggggtaatgcgggttgcatccgacctccgcggagcattccgaagatagaaggtggatcgggttaaccttagagcgagaggactctgtcgccggatgcaatggcgagagagctggtgctggacacagcgatccgggactgggggctcgcaccgctatcggaggagatggtaggtattgacgtgccaccgctagttggctctccaagttgatgaggctgcccggcgaggtcatcctggctggaccccaagctggtgaaggcggggaaggtgcaaaataaggccaggaccctgaggaccaattgagagtacatgcccaggcaaggtg

SEQ ID NO: 39843 - DNA, 444 bp, Oryza sativa
  Clone ID: PAT_MRT4530_43342C.1
atggagacagtggcgccggatgtggctggtgacggaggcggtggacgatgcagcagcgtcggacttggtcggggacggaggcggcgctgccggttgtggctggggacggatgcgacggtggatgcagtagcgctggacttgctggggacgaaggcggtagtggacgctgcaacgccagacttggttagggacggaggtggccgcgccggctgtggttgggcaccgaggcggtggtggacgcggcggcaccggatgtggccggtggtggacacggcggtgctggatgtggacacggacgaaggcggcagcgacgggctgtgcgggagtcgagagcgaaggaagagccgaagaggggagcgagacgtgtgggagagggatagtgcgtggggcccgcagttggctagcggagagctatttggccattctgtgttggatatgctctaa

SEQ ID NO: 39844 - DNA, 567 bp, Oryza sativa
  Clone ID: PAT_MRT4530_43343C.1
atgcaagaaaagaacggcggcggcgactcctgcttctgctcctcttcttcgtggcggcggcggctgccgcgctcgccgcggcggcctgtgtcgcgtggcttcgccgctcccctgggtccggcggcgctgctcgaggtccccctcggcaaggtcgccacggtggaggcgtgccccgctcgagcctttcccctcctccgccggccgctcgtccgctcccgccaccggctgcttgtccgctcctgccgccggccgtccgttggcgccacatcgtccactcccaccgctcccgagtccgcgcgggaggagaagcgagcggcgcggtcaacggcaaggcgcacggcggcggcgtccccggcgtccgccgcgagggaggagagcacgacgagggaggagaagggaggagaaggcgaggcgaaggggaggagaagccgagaaggcgatttgctgagggtgggggggtacgggccccatagcttgcactgtgagaggccttactacaccgcgatgcgcgatcttgttctggctggcagcttttttgcctctggtgctctacatgataatggttga

SEQ ID NO: 39845 - DNA, 476 bp, Oryza sativa
  Clone ID: PAT_MRT4530_43344C.1
cagactttggtcatggcctcatcatggagacaaaaacatacctgaaccataaccattttcagttttcagatgtactactagtagtataaattcagaggaagagatggatcggcttcgatctactgcaagtgcagctaactagtgtacttgagattagtttcagtcgatcatattgctcgttgatctgatgctcgtacgtatgttcaggcttgagaggtggtgggttcagataagcttaatctctgcatgggcacttgtttgtgtttcgatggggacatatcacatatacaatgcatgatgctgccatgatagattaggttaggtagatctatgagatttctttaatggaccatgaattatctaattacacgcattagtacaatcacagtagggatttacctatatatctgactgacagggctagcagctataccttgttccagatccgtgcggaaacatgttgatgtgtctgatac

SEQ ID NO: 39846 - DNA, 1374 bp, Oryza sativa
  Clone ID: PAT_MRT4530_43345C.1
atgccggccgccgcggaccccgcgcctccgacgccaccgccgcctcctcccccgagcctggacctgcggacgggcgggcggatcctgcggcgggcggcggcgcactccctccgcccgcgctccctcccgccgctcctcctcgcggcgctcctcctcgtcctcttccgcctggcgctcgtcgccggcacgctccgcctcgcctccttcgccgaccacgacccggcgctccggtccctcctctcccgcctctccccgcccgcgccgcacgccccgccgcacccgcccccgcgccacctcccgcgccgccgctccccgttcacctcctcctcctcgtcccccccttccctctctgacgacgacttcctcgtcgggaccctcgatcccgcctcctccgccccctcccgacgccgcaacgcctcctattacgagtttctcttcactccctcctcctcctcctcatcgcccaaaccctaccccttgtcgctcccccaccgcctcccttccaccgcgatcccgttcaccttcgttgtccgtaacgagacctcgccgccgaagcccgccgcggggcgagacggcggcagtgagctccggttgctcgacctgaccaggcgtgacgccgtggccatcatcaacctcctcgcgatgctttcgtccgtgcacgtgctcgcgatcctcggctacatcaccgttcactccgtagctctgggcaccgtgttcgcgtctgtcgccgggcagcacttgcaggggcggccgcggcggtggttccatttctctggtatggctttcagggtgagacggctcactgggtttgcgttcctgcggtgggcgacgcgggacgcgatcgtgcagatgctctgcctctggttcttctccgaggtgcacgaccaggcgcagctgttcaggctctttgtcgtcgccaagctcatgcccttttcagcatctgtcaacccgtggctcgctgcgaccgttggagggccagagcttgatgggttcttcattgcgtgggctctccttgatgcggtcgtctcggtgcttttcaccgtggtgccatgggtgattgttatggaccgtgatccacgaccgcctggtcgcaatgctgtgaaggaaggatgctaccttgtgtcattgatggcaactgatgccactttgatcaaatgctggcaaacagtggtatgcggcagcatgggacagcttgccatggttacacttggtgggaaggttcttggcggatttctccactcaatcggagaggtgtacttcatggtggtgtggctgatgttctacttttcagcaaggtgtaaggaggttcggttggggggccgccattttggattggaggatgtggcagctgctcttgatgggttcaggcaatag

SEQ ID NO: 39847 - DNA, 524 bp, Oryza sativa
  Clone ID: PAT_MRT4530_43346C.1
agcaatggcgggcaacgcagcgctcgttctagcgatgagcctactggtgatggtctgatgcgagcagcctgcacctactgcctcgagagccgcgacgccgataacgaagccgtcagcaccgaggccactgacgcccagcatcatagccgcctcgagactcagcgactagctgaagatgaactggtgcgcatacgaactcgatctggttaaggccaaaagcggtactgatacgcacacataacgaaactagttactgctagactgtcttttttagccaacaaacgaagaataaagttgaacaccaatctcatacattgtgactacgacgatcatctttagagacatgtcacgcatgcataatctgaacatcatgtgactgaattgaacacacagatgctaggttcgtgcattagatctggacaaatcatactgtggttcgatatatcaatctactatgatatagacggctggacatggaaactgtgtgcagaaagatgaaaggatggataactactggatgttgt

SEQ ID NO: 39848 - DNA, 512 bp, Oryza sativa
  Clone ID: PAT_MRT4530_43347C.1
cgtacctacccattccgttcccttccgtccgtccgtccgtccttgccaattcactcgtcatctggaccaagtacgtgcagcagaagcatcataacatacggggagtttttacccgtcctctactctcaaaattcacaaggcgcgcgcgcgaggtccagtccagtcccgggcggtggtagacgcagacgcagacaggcagccatccgcccggcgagccaacgcaatcattcgcgctcaaataatgcgcgcaagagaagaagaacaactaataagtctggaaggagcaaagttggttgttgctacattcttttcgttcgcccaccattcttttctcttttttttttcttgatgagattcctatcttgctgcccgcctgcagtttcttctgcctttcctcttttccttctcttttctttcattccgtgcctgtggaatgtgcgtgtatattctcatctatccctttggtcgtctctgtggagaaattgaacattctgccaaaaaaaaaaaaaaaa

SEQ ID NO: 39849 - DNA, 351 bp, Oryza sativa
  Clone ID: PAT_MRT4530_43348C.1
agatttttagggacagccggcggcagtgggatggcacagcctgcaaacggcccgtccgccccgcgccgacccccccgagtcgggcagcagagggcgcatggccggggagcactcgcgcgcggcggcggacagcgtgcgccagacgctgatggagaagatcgccgacaagccgcacctggtggggggggggggcggcgccgactccagcgctgacgcgcgcaagcaggcgacaccgtcggcgccgacgcccccggcgagccgccgccgccggcgccctgcccagtctcgagtcctggaggcggatccaaggccagaggcaggccgacccggggctgccggcgcgaggagccg

SEQ ID NO: 39850 - DNA, 521 bp, Oryza sativa
  Clone ID: PAT_MRT4530_43349C.1
tttttttttttttttttttttttttttttttttttttttttttttttttttttttttttttttttttttttttttttttttttttttttttggggaaagggggaactttaatctggggttgccccaaaaaacaaacatttttttttttatgaaccccaaaattttttcccgcccccccacagggaaaaacctttttttcccccccaacaaaaaagggtttttttcaacttaaaaaatttggccccaacccaaaaagaactttggcggggcgggaaacatgcgaaaagttccccgctttctttgaaacccaaaaccgcaaagtctccgggggaaaaaaaataaccctttggcccctattaaaccccggggagcccccccccctccctggggaccccctttttttttgggggggcccccttgggaggcccccgggattcgaacattttaacgggggccctgcctttaaaaacccggccaaaaaagaagggccccccattcaaccaaggggttttgaccgggcc

SEQ ID NO: 39851 - DNA, 1212 bp, Oryza sativa
  Clone ID: PAT_MRT4530_4334C.1
atggaggcgccatcggcgtcggcgtcggcggaggagaggcagcggatcgagcgggtggcgcggttcgtggcgcgtgaccgggacggcgacatggcggaggcgctgctgctccggctgttgaagatcacccgcaacgcccgccgctggggattcctcgaccgcgaccaccccctccacccgtattacctccagcagaaggtctccgagcagtgccgcatcctccgcccccgccccgccgccgccgccgccgattctaagtttacgcaacaggagcttccagcatgcaagccactactaactcctggaattgtggttgctaccttcttgctgattggtatcatatttgtcccaattgggctcgcgtctctatctgcatcgcaagagatcgtcgaactggtggatcgatatgacacaaattgtgtgtccacgcttgacaaggttgggttcattcagaacaccgatactgacaagacatgcacaagaacactgactgtgcctaaacatatgaagagcccaatccagatatattaccagatcggcgacttctatcaaaaccatcgacggtatgtgaaaagtcgaagtgataaacaattgcggtataagaatgctgtgcacttgacaaaggattgtgatcctgaaggtaatactgttgatggtgctccaattattccatgtggccttattgcttggagcttgttcaatgatacatatacaatttcggtgaacaagaaggccattgaagtgaataaaaaggatatagcttggaagagtgacaagaccgataaatttggcagtgatatttacccaagtaattttcagaagggcagtctaataggcggtgctaaactaaatgagagcatacctttaagtgagcaagaagacctcattgtttggatgagaaccgctgccctcccaactttcagaaagctttatggcagaatcgagacagatattatggcaaatgatcaattaacagtggttatacagaataactataacacatatagttttggagggtctaaagcgttggtcctttcaactacttcttggattggaggcaaaaacaacttcattggtgttgcatatctgactatcggaggcctatgcattttccttgcagtgggcttcgtagttcttctctacatggttaaaccaagtgggtcccaccttaaggtcaagaagctaccatatactccctccatctacttttga

SEQ ID NO: 39852 - DNA, 602 bp, Oryza sativa
  unsure (1)..(602): unsure at all n locations
  Clone ID: PAT_MRT4530_43350C.1
gctgcaggaattcggcacgaggctctcttcccactctctccgttgccccttccttcgcatctcctctccctctccactgctgcgncgcggcggcgccggagctgtgcccgccgccgtcggaagcgtagcagtagggggatggcaatgcccccccgggtcaccgatccccggcggtgaatttcagcgggcggggagccgcgccgccgccgtcgacgacgacgacgacgaacgagtctggtccggcctcctcactggtcaagctactgcatttgtacagttcgctgaagatcggtagttcgtacaagctgggatgaagtcaaagactaacaggagcatacagaaggcgagaaaaacagataatgtccaaggaggaccaaactgggttcttgttgcgggaggagttttgctgagcacactctcagttaaacttgggtgcaaattgaaacaactatttgatgcgaagcaacgaaatagtaatacttccaaagcccaaagaaggccaggaacatgtttttcaggcaatggagtaggagtaaagcaggcacctgcaagtcctgcatcaaaacagatggaaccctcccttccacttgtgaagataccag

SEQ ID NO: 39853 - DNA, 1799 bp, Oryza sativa
  Clone ID: PAT_MRT4530_43351C.1
tggatccccgggctgcaggaatcggcacgaggcctccttcccactctctccgttgcccacttccttcgcatctcctctccctctccactcgctccgccgcggcggcgccggagctgtgcccgccgccgtcggaagcgtagcagccaggggatggcaatgcccccccgggtcaccgatccccggcggtgaatttcagcgggcggggagccgcgccgccgccgtcgacgacgacgacgacgaacgactctggtccgacctcctcactggtcaagctactgcatttgtacagttcgctgaagatcggtagttcgtacaagctgggatgaagtcaaagactaacaggagcatacagaaggcgagaaaaacagataatgtccaaggaggaccaaactgggttcttgttgcgggaggagttttgctgagcacactctcagttaaacttgggtgcaaattgaaacaactatttgatgcgaagcaacgaaatagtaatacttccaaagcccaaagaaggccaggaacatgtgagttacactcaaatctctaccggtttagtgatcacctgagctgctaccattgtaattcagggttttcaggcaatggagtaggagtaaagcaggcacctgcaagtcctgcatcaaaacagatggaaccctcccttccacttgtgaagataccaggaccagaatcaagcaaagagaataatggcgtcatgtggatatcatcacctgatcgacttgaggatcctcgtaaaccatttcagtactcaaacagttctggctctccttgtgtttcagaatcaggatctgacatctatagcaagaaagaggttatacagaagctgaggcagcatctcaagaaacgtgatgagatgatcatggagatgcaagctcagattgctgatcttaaaaactctcttaacatccaggagacacattccaccaatttgcagtctcagctggattccgctaaccgtgatctcttcgaatctgagcgagagattcagcacctgaggaagatcattgcagatcattgtgttgcagaagcactctctcatgataaacctttgctggctgggcattggcagtcaggtgccaccaatgggcatgccaatggctatgctgatagcagcagtgttgatgaccctgagctgcattttattggcctcgacaaaaggaaaggagaggcagaaagggtggagatgctcaagagggaggtcggtgagctaaaggaagttatcgaagggaaggacttcctgcttcagagctacaaggagcagaaggtggagctctcttccaagataagggaattgcaggagaaattctcaagtcaagtgcccaacatcctgtaggatctaaacataatgtcacgttgctgcaacgagcagaagccagaaggtggatcatctctgctccattgaccggggagtttcaggagaagaactgtcagcacagatgctgaacattttcctaggatattttcagaatgttaggttgattgccgtctttcttttcggtcatcgtaatgttaggttgatttgcttcctttccagtttttgtcactttggtatcaaaaaggatatcttttttccccagctgctagtcctagggtagatgaattaatggagatcttgatactcaaggtgttgtacaggttttcgttctgcagacacggctgtgtaatgtcattctttctccaaactacttaagacgcattaagcattcatttagaatgcaacaatggcatctctacatttagatcaaaaaaaaaaaaaaaaaaaaaaaaaaaaaaaaaaaaaaaaa

SEQ ID NO: 39854 - DNA, 396 bp, Oryza sativa
  Clone ID: PAT_MRT4530_43352C.1
atgtcgctcagcgagaagctggaggcggcacgtgtcgcggtcggcaagcgcaaggagcgggagctcctggctcaggctccggctaataaagctctagccgagccgggtactaataagccggctccggggccggtccccaacaacaagctcctagccggtcacctggcgcacgagttcctgacccgcggcacgctccagggccgccgggtcgagccgacgaagccgagccaagccgccgccttgcatcccggcgagcccgtgcccgagccggagcccgacgccgccaagcggaggaggtacgccgaggtgtcgtggctcctcatggcgagcggggcccgcgtccccggcgtcgtcaacccgacgcagctcggccgctggctccagataaaggagtga

SEQ ID NO: 39855 - DNA, 717 bp, Oryza sativa
  Clone ID: PAT_MRT4530_43353C.1
atggccactgcctgcacgaccaccgacggcagtggcgacgtctgtctccgtccttccgcctccgacggcctccccacacaccaggcgtgcacctccaaggccgccccagacggcgagacacgccggcgtcagcatcagcggcggcggtgctgcgtcgtctgcctcgtcgtgacaatcgccacgctggcgctcctcggcgtcgccgtcctcgtcctctccctcaccgtgttccgcgtccgcgacccggccacccgcctcgtgtcggtccgcgtcgtcggcgtctcgccgaacctggcgcccccgtcgccccagatcaacgtgacgctgctgctcacggtggccgtgcacaaccccaacccggcgtccttcacctactcgtccgactccggcggccacgccgacctcacgtaccgcggcgcccacgtcggcgacgccgtcgtcgaggccggccgcatccccagcagaggggacggcgccgtgcagatggagatgacggtgctgtcgagcagcttcaccggggacgtcatggcggagctgatcagggacatcgaggccggcgccgtgccgttcgacgcgagcgcgaggatccccgggaaggtggccgtgttcggggtgctgaagctgcacgcggtggcgtactccgactgccatgtcgtcttcggcgtcccggagatggggatacgcagccaggagtgccacgaccatgccacgctctga

SEQ ID NO: 39856 - DNA, 465 bp, Oryza sativa
  Clone ID: PAT_MRT4530_43354C.1
tccgatctcccctctcctcgtcctcggcctcctccacccccacggagaggtctcctcgcgacttcacccgccgcctccgcgccgatctcatctccatccccccgcgagcagcggcggtgccggtgccggcgtcctgctgcttccgccgccggtgagcaccccgtagacctgtggtgtggtgcggtgcggggaggatggcggagccgtctaaggtgatccacatccggaacgtcgggcacgaaatcgctgaggctgatctgctgcagctattgcagccgtttggcaatgtttccaagatcgtcatgctgcgtgccaagaatcaggcacttctccaaatgcaagacttgcataattcagtgagtgcgctgcaatactacagtactgttcaacctagcgtaaggggaaggaatgtgtacatgccaatttcgtcccaccaagaacttaccactgaccaaaactcttatg

SEQ ID NO: 39857 - DNA, 1506 bp, Oryza sativa
  Clone ID: PAT_MRT4530_43355C.1
atgagacaaagcataaaggggagagcgcttagacatttcactttgagtacggggaagtccgcagggaggaattcttccgggcgtattactgtttttcaccgagggggtggatcgaagcgattgcagcgaaaaattgaccttaaacgaagcacttcgtctattggcattgtggaaaggatcgaatatgaccctaatcgttcttctcggatcgctctagtacgatggatcgaaggggtgctgcccggccgccagaggaaattcaagacgatagaagagttcgctctgccgcgtaagatcctcgaatccaccacggccactatcttttgccttttttcgttctcttccctgtcctctcccttggcccagggagagactgcatccctttccttcggcagctctttaggtttcccaaggatagcggtagctggggcaaagcccgctttcttcgcggagcgaatgagagagaagaaaatcggaaaaaagacgttttctctttgcgagatccgaaagtggagaacgcattgcgttctctgggcacataggatcaaacgtaaagcagcgctttcttggcagagtttgaggcagcaaaaaactttagaacttgttggagctgctgagcataacgaatcgaagctgaaggcggatcaaggtagcttgctcccaaggcaagtgcttgcttacgctttatgtagtggtcggccttcctaccttcatgcctctagaagcttctacaaagctttgcttccggtagaagctagtcgcttcggtagcttgcccgccaagccgcctataggcgaagggccgaaggatggagcgtacaaagtcgatcgtgcacctgtcacttatatattagccagtcatcaattggaagcgggtaatatggtgataaattgcgattgctccaaaccttctaaaagcggcttcttgcgacctgcccagaatgctcatacataccttcggttccaagagcttggacgcacagtgaataaaggtcgggttgaagggggcagtcagctggcagcttcttggccacgcccccctgcttatagacacgagatattggatctaaattcaaaagtaggaaatagcataccattagctgatatacgtatgggaacatgggtacatgatattgaatgtcatccaggtcaaggcgcaaagctggctcgggccgcaggaacttatgctaaaataattaaggagccagccccacaatgtcttgtgcggctaccatcgggtgttgaaaaactcatagattcccgatgccgagctactattggtatagtttccaatcccaaccatggtgcacgtaagcttagaaaagcaggacaaagccggtggtcaggcagacgccccattgttcgtggtgttgcaatgaatccagtggatcatcctcatggaggaggtgaggggcgcacgaaaggaggtagaccttcggtgtcaccttgggggaagcccaccaaagcaggatttcgggcaggagtgggggtggggaaacgcagaatt

SEQ ID NO: 39858 - DNA, 163 bp, Oryza sativa
  Clone ID: PAT_MRT4530_43356C.1
tgactgatgacgcatagtacataccctcccgtaagcctagggccaccggccacacatgcagtgtggggtggtgagaagacgtgtaagagtgcgtacactgacgagctgacgacgcctctaatcactaatcttagcaacgagcgtaatgaatggtcttcttcct

SEQ ID NO: 39859 - DNA, 276 bp, Oryza sativa
  unsure (1)..(276): unsure at all n locations
  Clone ID: PAT_MRT4530_43357C.1
annntnnnnnnngggtatattttaatggggggtttttgttaaaggggagaaaagtaagagaatataggtagggaatagtacataaatgaatataaaataatnaaaggatggcacaagccaagagaaacgaaaccaacactatgtagactcgaccctttaggtcacagcaacagctggaaaacatgtaaccaaacacacaaacaactacttgtgccagaccagatgatcaaaaacatgattgtgccatcaagcctcaaatagatcagcaacatcatt

SEQ ID NO: 39860 - DNA, 210 bp, Oryza sativa
  unsure (1)..(210): unsure at all n locations
  Clone ID: PAT_MRT4530_43358C.1
gggaggcaccccggcgtaccctgacccggtgacctgtggtgccccatgcctggtgggatgattgcgtgcactgcacatgtgtgccaccaactggtgggtgtgtgtgatgcattgcactgtggtgtgatgtgagtgggattgccaaccccctgtgtgatgatgaaaggtgtgtctgtggcctgggcttccnaaaaaaaaaaaaaaaaaaaa

SEQ ID NO: 39861 - DNA, 2064 bp, Oryza sativa
  Clone ID: PAT_MRT4530_43359C.1
atggagatggagatgagcagaagctggcaagagctcggcgtcgtggacaccatctacgaggacgaccacgaggaggaagaggaagaggaggaggaggaggaagaagaagaagaagaggagtgcttcgattcgcccaccatgtcgtcttctccggcggccacgtcgcggtcgtgctcgccgcctccggcggcggaggagttcgccatgccggcggcgctcaggaacgcggtgcgcgagtgtggcactggcaaatgtggctttcaatccttcatcaactggaacttgcataaatacatggattataatggcattcatcaattaaatttttctgcattaagagatcctgcaaaaggtttgcaggtagtacgcagtttggctattaaatttgacgcagttctacaggatccgatcacgtcgcagagcagctacctgaagcggcggctgtcggagtgcagcgacgtcgccgtggacctgccggcggggctcaccgtcgacgcgttcgtggacgcggtggcgtcgtgctacggcgccgaggcggcgctgtcgccggggagcctcgcggcggcgtgggcggcggcggactggctggagctgcgcggcgaggacgggctggcccggcgcgccgaggactacttcttccaggaggtggccacggaccacggccgcgccgccgcggtgctgcgcgcgtgcacggcgttcctcggcggcgaggcggccggcgccggcgccgcgctgctcgtccggtgcctcgagacgctcgcgtcgtccggcggcgccgacggcaggtggctcgacgacgtggccgcgctccccgtggaggagttcgaggtcgccgtcgaggccatgcgcgcgcgcttcgcccacgaccacgacctcatgtacaccatcgttgatcactacctgcaggatcttgaaacaaacaatttaaatctgaatcacagggggaagctgacggaggaggagaagagcagggtgtgctacaacgtgaactgcaccaagctgtcgcaccacctgttcatgcacctcgtccagaacccgcgcctcccgctccgcttcgtcgtgcaggccatgctcgtcgagcagctccactcccaccactccatgctgctcagcggcggtcaccatcaccacgccggcgccgccggcgcaccgagctccgccgcgccgcctgcttcgctcctcaagagctccctctccggcgcattcggtgcttgtggcggcttcgccgccaccgccgccgccgcgggcgacgccgccagcagcatgacgctcggcgacatcctccagcgcgacgccgtgctgcgccagtcggcgcacatcagggcgtccatgcaggccaccacccagcggatcgacagcctcgagcgcgagctcgccgggctccgcacgcgcctgcgccgctccgagcaggcggcggccgccgcggccacggcctcggccgccatagaccgcgcgtccgccaagtccgccagcttccggatcccgcgaagccggctctgggacggcgaggacctcgccgcgccggccgccgccgtcatcaccaaggacaccacgaacaccaggggcctcaagtctcggctggtgctcgggttcaagaacctgttcggccggagaccagtcaccgccgccgccgccgcgccgcccacgtccggcgaacgcgccgctgcgcgcgtgagcgtgaacgacaaagccatgtccaccgatgcgccggagctcgacgccgacgccgacgccgacgagctgacgcggcctcaccggaggaatctgtccatcgtgtgatccgagcaattgcgtgcgtgtgcatggcgactgcaatgcacgcatgcatgatccgtgtggtatatacatctatcaggagaagtgatctgatcatgttgccactatctttgcacggccatatgatatattttcgatgctaatttgttcggttttcttgcttttttttaatggcaaaaattttgttttgggccgtttgtacaactcaagagccagccttgatcaacggatgcttattagagaggttactgcatgcagagttgcaggctcaaaaaaaaaaaaaaaaaa

SEQ ID NO: 39862 - DNA, 264 bp, Oryza sativa
  Clone ID: PAT_MRT4530_4335C.1
atgtcgcctcctcttccccaccaccgcgttcttcaaaatgggagggagaagagagataggggtagagattctgacaaggcggggagcttgagtcagtggagggggctgtggagcgagccgaggacagcagtgggcggatctctgggcggtgggaggacttgcagccgccagcgcttagggctgtggaggaggcggcagagctcaagacgctcgcaaccgttgctacggtcgctgccttccacagtgccacgccccaccgcctag

SEQ ID NO: 39863 - DNA, 129 bp, Oryza sativa
  Clone ID: PAT_MRT4530_43360C.1
atggcacaaccaacaacgatggaaactcgatgcacaaagtgggttgaggcactagctgacgaagccattgaggaggttgagctcggtgttcggcgagctacagatggcggtggtaagttctcccactaa

SEQ ID NO: 39864 - DNA, 912 bp, Oryza sativa
  Clone ID: PAT_MRT4530_43361C.1
atgatcaaggagatgcgctccattgaagcaaacaagacgtggcggctcgttgatccgccggctcgccaacatccgatcgggctcaagtgggtctataaggccaagaaagacgccgccggcaacatcaccaagtacaaagcatgcctggtcgcgaaggggtacgtgcagcggcagggcatcgacttcgacgaggtgttcgcaccggtggcgcggctcaagtccgtccgcttgctgctggcgcatgcggcgtgtgagggcagggccgtgcatcacatggacgtcaaatcggcgttcttgaacgagcttctggaggaggtctatgtcgcgcagccgccgggattcgtcgtcgacgggcaagagcacaaggtgctccaccttgacaaggcgctctatgggctgcgtcaggcacagcgcgcttggtacgccaagctcgacgcgtcgctgctaatgctcggttttcaccggagcgactcggaacacgctgtgtacatgcgtggcatgggtgtgcatcggctggtggtcggggtgtacatcaacgacctcatcatcacgggcggccactccggcgagctcatgcagttcaaggaggagatgaagggcacttttcagatgagcgatctcgggctgttgaaatactatctcggcttggaggtgaaccagtctgaggacgggatcaccagattcatggagaaacccaccgtcgaacacctggcggccgtgaagcgtgtgctgcgatacatcgctagcactatcggctacggctgccactacatgaggaagaaggaggctgcaagtctcgtcggcttcagtgacagtgatctcgccggcgacctcgacactcgcaagagcacctccggcgttttcttcttcctcggcgacaacccaatcacctggcagtcgcagaaacagaag

SEQ ID NO: 39865 - DNA, 147 bp, Oryza sativa
  Clone ID: PAT_MRT4530_43362C.1
atgccggacacgcacttagctgctgactggtggaccccaccagttaggcccttcttccacctccagttgccccccgaatcgacgccattgatggcgttgtccaagccccaaggcacctccctttcttctccggtgatgaataaatag

SEQ ID NO: 39866 - DNA, 243 bp, Oryza sativa
  Clone ID: PAT_MRT4530_43363C.1
attgctcacatattaaacaacaaatcaatagcagatacatgtacagctttcctgaagaagtgggaaaggaaatacaaagaatacactagcttctcgagtaaattttggtttctacctaactggtgtatataaaataagaaaagaggattacaaagaatatactaatttgtttctcaaagccccaaagaaatgacaagaaaccaatacagaaaaaggaaaagagttagttaacttcagtccttc

SEQ ID NO: 39867 - DNA, 1678 bp, Oryza sativa
  Clone ID: PAT_MRT4530_43364C.1
attagtgccaccgctcgatctccctcaccagagcttcgcaagccaaaccctcgcgccatcgtgttcgcctcgactggttcttatctaagtcctcgcgaaggaggcaaacttatgccgcgaagggcaaatgtgatatttaccgaggcgcagttctctctaaaaacctcgggaacaccagaactcctctcgctgctgataacgttacgttcagagcgcatggggactagagtttatggaacacttgatacagttaaacatgtcggtttccgaatcattagttttgggacccgacagatgcgcgccctagctgagctcctcgccccgaagcagagccgcgtggaacctgctccctcctctctccgcggcccacgtgccgctctcttcttgtgccgccgccgtcgcaactccggccgcccctcgccggtggtcgggacctcatcggagcccggcgtcgccaccatccgcttcgccgcttcctcctcttccccgtccacccctccgtggagcatgacgaccgcgggaacgacgacgacaccgacgacccgaagttcctcgccgtttcttcctcactgccgacaacaccgtcgacctctcgccgccgtgtctgctcgtcggcccaaaaccgctctctctctcctcggcccaagtcggcccagtccaccgccgcgcgcgcgcgcatccgcccgctgacaggtggggtcgtcgtcaacctccggccgccgccgcccgaaaccctagtttcgcgccgccgccgttcctttccaaaatccggccgttccttttcgtttccggtgaaattgattgaggggaaacaatctttgggatctcctctaccttttctcctttggaaacatcggctaaatcggtttggaatgtgtttgattcgagttcgaatcggatcggtctctttcctccgaaccctaaaccttccttctcgtcgccagccgcctcgctcgggaagaccgccgtcgtggtcgtcgtcgcgtcgccgtcctcgtccgccccttcgccgtcgccgaagatcgccggagcaccatcgccgccgtcgacccgaagaccgccgccgtttcttcgtcgtcgccgtcaccgtccgttgatcttccgctgctcctttggtcaatgtgtatggtgagtcgatactaaagcaatcccggaatttttcattggatggcagtaaagagtctccttcgttacctacgtggtacgatgaatctcgccttatgctaccaaggtggtagttttcatttagttggatacagcgatgccgagggatctgctgataaagatggacgaaaaaaggcaagggtatatgtttatccttgaaggaggctcaatatcttggtgcagtaagaaagaagattgtttctctttgtctaccatgaaatcagaatatatagcatgcacggctgcagttcaagaagcaatatggctgagaaggagactctcaaccagagccgttatcacatattccacacatcaaacaatgccaaaattttacctcaaacattgcggacagtcatcatcagagtcttcagcaaattcaacatcatattgctcaacacttgcctccttgtcaacctcctctctaccactcaattcgacaacaaagtaatcatctggattcacatattggcctgctacttccgtcgggtattcagggttgcctccgtacgacaac

SEQ ID NO: 39868 - DNA, 156 bp, Oryza sativa
  unsure (1)..(156): unsure at all n locations
  Clone ID: PAT_MRT4530_43365C.1
cccacgcgtccgcgacaagagcaaggatctgcgggcgttcgcgctgatcttcccgtcgctgctgcgcggcgaatcgggccnagctcgagcgcgcgttcgagctcagcctgcacggcagcacccgcgactggtgggcgctaacctacacgccgagag

SEQ ID NO: 39869 - DNA, 156 bp, Oryza sativa
  Clone ID: PAT_MRT4530_43366C.1
atgacgtatcccagtactacgaatctagataggagcatctccagtcggtgcgaagatgctcaggcggtggccagagacgcccaggcggtggctaaagagtggagatcgacggcggccgcggtcccagcctggcggcgtggtgaagaggccgcgtga

SEQ ID NO: 39870 - DNA, 2347 bp, Oryza sativa
  Clone ID: PAT_MRT4530_43367C.1
ctacctcttcccccctccccatctcttcatgcgcttcatgcggatccagcaaggtagcagaaggatgttataccctgtgaaagtctctccgctggattgtgaggcagaattgcctccgttggtgttgtcgattggtgcgcctccagttcctggcgcaccacctcctgccgctccggaagcaccaccaccagtagacattgcgcgatgcagatggaaccgaacgacgacgaagacggagaagagatcagtctccggaatcaccaccaccagtagacattgcacgatgcagatggaaccgaacgacgacgaagacggagaagagagcagtcgtgcgaaagcactccccaataacctgatcacccgcctatcccgtgcagatctcaggcgagggtgtggtttcgaaggccttgctcgtcccaatgacttgtgcgcgcaagcgatcagaaccgccaccagtagacattgcgcgatgcagatggaaccgaacgacgacaaagacggagaagagagcagtcatgcgaaagcactccccaaaaacctgatcacccgcctatcccgtgcagatctcaggcgagggtgtggtttcgaaggccttgctcgtcccaatgacttgtgcgcgcaagcgatcagaaccgccaccagtagacattgcgcgatgcagatggaaccgaacgacgacaaagacggagaagagagcagtcatgcgaaagcactccccaaaaacctgatcacccgcctatcccgtgcagatctcaggcgagggtgtggtctcggaggccctgcttgtcccaatgaaaaacctgatcacccgcctatcccgtgcagatctcaggcgagggtgtggtttgagggtgtggtttcggaggccctgctcgtcccaatgacttgtgcgcgcaagcgatcagaaccggggagaacagagagcagcacaggcacagagagatggttaaccagcaatggagattgttcgtgtaggagatctcaggcgaggatctcaggcgagggtggcgagggtgtggtttcggaggccctgctcgtcccaatgacttgtgcgcgcaagcgatcagaactgatcacccgcctatcccgtgcagatctcaggcaagggtgtggtttgaggagagcagcacagggggagaacagggacagcactggcacagaggcacaagcgatcagaatcggggagaacagagagcagcacagggaaagaacagggacaacactggcacagaggcgcaagcgatcagaatcggggagaacagagagcagcacaggggaagaacagggacaagcgatcagaatcagggagaacagagagcaacacaggggaagaacaaggacagcactagggagaacagagagcagcacaggggagattgtctggcacagaggcgcaagcgatcagaatcggggagaacagagagcagcacaggggaagaacagaggcgcaagcgatcagaatcggggagaacagagagcagcacaggggaagaacagggacagcactggggagaacacaagggaagaacagggacaacactggggagaacagagagcacaggggaagaatagggacagcactggggagattgtctggcacagaggcgcaagcaatcagaatcgggtggcacagaggcgcaagcgatcagaagaatcgggtggcacagaggcgcaagcgatcagaatcggggagaacagagagcagcacaggggtggcacagaggcgcaagcgatcaaaagaatcgggtggcacagaggcgcaagcgatcagaatcagggagaacagagagcagcaagcgatcagaatcatcgggtggcacagaggcgcaagcgatcagaatcggggagaacagagagcagcacaatcgggtggcacagaggcgcaagcgatcagacagcactggggagattgtctggcacagaggcgcaagcgatcagaatcgggtggcacagaggcgcaagcgatcagaatcggggagaacagagagcagccacaatcgggtggcacacagagagcagcacaatcgggtggcacagaggcgcaagcgatcagaatcggggtgaacagagccgaaagcgatcagaatcggggagaacagagagcagcacagaggcgcaagcgatcagaatcatcgggtggcacagaggcgcaagcgatcagaatcggggtgaacagaggcgaaagcgatcagaatcggggagaacagagagcagcacagaggcgcaagcgatcagaatcatagaatcgaggagaacagagagcagcataggggaagaacagggacagatcagaatcgggtggcacagaggcgcaagcgatcagaatcggggagaacagagagcatag

SEQ ID NO: 39871 - DNA, 456 bp, Oryza sativa
  Clone ID: PAT_MRT4530_43368C.1
atgaaaattgcctgctactacgtcagggcaagtggtcatcagtgctctaatctgagctccgagaggtccttctcccgggatttctgtctgtttcttgggggaggcctacaggaacgcaatctgcgtgggtatcttcttgacaaggcaaggattggatgggccaacgagggaagaagaagaagacgagattttgctgcatttgcacgcctaaagaatgccgctctccgcacaaaacacggcgaagcaggattagtagcagatcgaagcagggccggccggccactcctgcctatctcctcgtggacgccgtcgcaatgccgtggcggacagcagcagcagcagcgtccatggggcgctccagctgaacaggagaagaagaagaagaagaggacactggcttggctcctgtggccctcgctctaccagtggggccgtgacatcaccgtcgtcgagtag

SEQ ID NO: 39872 - DNA, 204 bp, Oryza sativa
  Clone ID: PAT_MRT4530_43369C.1
atggacaggagcatcgcgagcggcgtcactaagctcccaagcaacatggacgtgggacgtcgacaacgctaccgggtgatagagacagagtcggtggtgggagtcggatgtggggaaggagcacgacctcccagcgagatcctccccagcgcacgactggccagcgagctccttccccatgcgcagtctcctggtgagacgtga

SEQ ID NO: 39873 - DNA, 1458 bp, Oryza sativa
  Clone ID: PAT_MRT4530_43370C.1
atggtggtgaccttcacatctcgccggagcgagccggtgctgctccggccggcgaggccgacgccgcgggagacgaagcagctctccgacctcgacgaccagcggacgctgcggtactacgagacggtggtcggcttcttccgccgatgcgacggcggcgcagctggcgccgttggcgcaccggccgacccggccaaggccatcagggcggcgctcgcggaggcgctggtgtactactaccccgtcgccggccggctgagggaggtcgccgacggcggcggcgcggggaaccggctggtggtggactgcacggccgaaggggtggtgttcgtggaggccgacgccgacgtgcggctggaggacttcggccagccgctgctgccgccgtacccgtgcgtcggcgagctgctctgcgacgccggcgacaccagggctgtcgttggcaaaccattgctcctcatgcaggtgacgcaacttaaatgcggcggattcgtcctgggcttccacatctgtcacaacatcgctgacggcttcggcatggcgcagctgatcatggccatagccgacctcgcacgtggtgagccagccccgaccattctgcccgtatggaggagggacctactcacggcagcacgcctaggtagcggcgcggtggcacgcacgccctttgcatcggcggcggcggcgtcggcctcggcgtcgagcccggcactacagaacggtgctcgccgcgccgccgccccggctgacgcgatgctgtcgaccccgccggaccggatggtggtggagtacttcctgttcgggccacgggaggtgtcctacctgcgtggccagctgccggcgcacctggcggactccaccacggtgttcgagctgctcaccgccgtcatgtggcggtgccgcacggcggcgctcgggtacgggcccgacctccgcgtccggctaatgatcaccatgaacgcgcgcgggaggtggaacgcgcacaccccgctcccgcgcggcttctacggcaacgcgcacgtctcccccgtcgccgaggccgccgccggcgacctcctcgggcggccgctcgccgacacggtggagctcgtgcggaggaccaagcgcgggatgacgcgggagcggatgagcgccatggtggagacggtggcgcagctgcgggagtggccgccgtcgagcatggacagggtgtacgaggtctccgacatcaagtggaccaccgtgaacttgctcaagttcgggtgggctgagttcgccggcggcggcataccgctcgcaggcgatctcacctccaagctcggaagcgaccacacgaggtgcaagaactcggccggcgaggtgtcgacggtggtgtcgatgctgctgcccagggtggccatggcgaggttcaagaaggagatggccgttttgttgaacaaagatgacaagaagagcttgacaattatgagttcgctgtag

SEQ ID NO: 39874 - DNA, 193 bp, Oryza sativa
  unsure (1)..(193): unsure at all n locations
  Clone ID: PAT_MRT4530_43371C.1
cacactcagctacatggagtgcctcggccaacaacncacaatcttatttctccaaacgaactcacctgaaaaatggttcataattccgtctccaggccataggagggccttttcacagagtcccatnggagtccgtatctggatcgntaagaccttataagccttcantccttctcantatttctggaaatac

SEQ ID NO: 39875 - DNA, 271 bp, Oryza sativa
  Clone ID: PAT_MRT4530_43372C.1
cccacgcgtccgtcctgatcttacatggaagattcgatcctgtaaccacagttccgttatcgggaggcaagaaatctgtgtcacgacgacgagaacgcgtcttccctgtatgtaagccatcggctcatcctggtggtcaactggtggctagtgatcgaataaaaggcatacctagggtcatgtcatctggagagctctactctatgtgatgattgctcgttatatcaagctgcagcagacacccttatgtagttgattgttaccaccacac

SEQ ID NO: 39876 - DNA, 577 bp, Oryza sativa
  Clone ID: PAT_MRT4530_43373C.1
cactcgcgcgcgtcgtcgccaccgcagcctcgccgtcctcctccactcatacacgtcgtcgtcgtcgcagtcccgccctcctccagccatcgttgccgagccaccgctgtctgaggtgcggaggtcgagtccgccagatccggcgacccaggcagatatggtgatccagcgatgactgaatcagcgcccccatcagactgcaccgccactccgcgtgttctctgtccgctggcgtttgacatgttggtgttgcatcctcgatccattgccattcctgcagctgtgaaaggtcgatgtcatcaatcaaggatccaccatcttgctttgctcccgttgagtcttaggatgtacaacatattagggagaggattggcttccatgctgctgtttgtatctgctgtcaggctgagccatccattgagttttgtccttgctgctatggctgcatgcaagattcagttgatgtcctcactgttaaggatggctgcaactctgcaagattcaaatgtatggtaagaaatcttccatgcactacggcaaggaagcctgctgggatcaagtaacagatttgttattg

SEQ ID NO: 39877 - DNA, 231 bp, Oryza sativa
  Clone ID: PAT_MRT4530_43374C.1
atggttggcggaggcggaggacgggaggaggaggaggtaggaggaggtgaggtggcgcgggcgcacggcgtaccacggggttacggggttggtattgtggggtacggtgcggcgcgtggtgtgtggcgcgaggagggccgggagagcgtgaggctcgtcaccacggcacgcgtcagcttcggcctcgggtttgaggcgaggcggaaacgaatggccaggtccaggtctgaa

SEQ ID NO: 39878 - DNA, 683 bp, Oryza sativa
  Clone ID: PAT_MRT4530_43375C.1
atggggcaggggatccaggcgacggtgcttccagcccttcaaacggacgagccaacaacatcgctgcctaagaagacaatcaatgccagcatcacttcactttttggtcctaagaagctcgaggaaccaaagattccaattcctccgaatgtcatcgagcatctcagcagggagttgtaccttgaagagaaagcgtccaaggaagttgatttctgcaagtcagctggtttgaaaagcctagacaatctagatgaacttgaagaggccccgattgaactcaagcgcattggctgcatgaatggtatttggaggaggccaaaaaagggggtcgggatgttcggtgcctactacactgatgttagatccatgaaccataagatagcttttctagacccagccgttgtaaactttgacaagcaatgcacatccgaagctgaaattgaccgctatctctttgatgccctcgccaaacttaatggataggccatcgacctctgtggattctacgtcatgcggtacatgctatattttgtagaggatggatacaatcaccgcaatgctgagaaattgggtctcgatacaagtgaaattctaccacacgtcttcaaagctctcactgacgagttttgcgggttcatccgtcatcatgtcgtggcgaatacaacatcaacaaggccccacaa

SEQ ID NO: 39879 - DNA, 115 bp, Oryza sativa
  Clone ID: PAT_MRT4530_43376C.1
acataagctggtttataaacaaccgccaagaaaaaggaagctatgttccattaaaaaacaggataatgaggggtttcgcttcatatactaaaccacggacggcatttaaagtaag

SEQ ID NO: 39880 - DNA, 732 bp, Oryza sativa
  Clone ID: PAT_MRT4530_43377C.1
atggtgcttgacacagaaattgaatccttaggaactcaagcgcattggctgcatgaatggcattgctcttatcaggttagatccatgaaccataagatagctttcctagacccaaccgttgtaaactttgacaagcaatgcacctccgaagctgaaattgaccgctatctctttgatgcccttgtcaagcttaatggatgtgaccacattttgttgccttacctttctcaccatcattggatcctcctcgtaatcaacatcgacgacagttcgatttgcatatatgatagcctgagagggatagacaagtaccaaactattttaagtgcactaaatagggcatataagaagtaccgtaggtccggaagatcgtatgggagatgcaagattgatgcaactgaatttcggattttcgaacataaatatatccttcgtcaactagaggccaccgacctctgcggattctacgtcatgcggtacatgctatattttgtagaggatggatacaatcaccgcaatgccgagaaattgggtctcgatacaagtgaaattctaccacacgtcttcaaagctctcactgacgagttttgcgggttcatctgtcatcatgttgtagacccaactggcgaatacaacatcaacaaggtcccacaacgagtgcaatcttctgtccctccccctcgggaccaagccgcgaagaaattagctcctaggaaaagaaaaaccagctag

SEQ ID NO: 39881 - DNA, 463 bp, Oryza sativa
  unsure (1)..(463): unsure at all n locations
  Clone ID: PAT_MRT4530_43378C.1
aaaaaaacacaagaaaagaagcgaggcacacgcacacacacacagnaacacaccggcacccccaaaatgcatcaacatcccaaaacgacaacaacagcaacaaaacgccgccctctgatcctaagccaagacgagaccctcgcctcttccgcgcccccaaagcgcccctccgacgcgggttcgaggatgtcgttgaagcgtctagcggaccaagacaacaagctcctctactccctgaacgagcgggacgactactgcgagtggcagggcgagaagagcgcgcagggcagagaggtcagctccgtggcccagtccaagggcctgcgaagcccattcccgccgcacactctcacaagtctggaccagctccgagtcctcagcctccgcaacaactccctctgcgggcccatccccgatctaagcccactcggcaacctcaagaccctcggccacgaccacaaca

SEQ ID NO: 39882 - DNA, 357 bp, Oryza sativa
  Clone ID: PAT_MRT4530_43379C.1
agggggctctcagcgtcagcggtctctgtcgaccggcgatggggacgaaggcttcgagggctttctcttttctttttttttccttcttttcttctttttctcgccgattaagcccgtgattaggaacgtttacttgttttctttttcttgccgattaagcacgtgattaaggaacgtgtactgctactgcgtaatttaccgtttcgatcttttattttgtgaaaattaataatacagtcctgtcatgttacaatttattgagtttctatttgttctacctaattaaatttgatactacattttgttcaaatttgaaagattatagattagataatatttatgtatggttggctaata

SEQ ID NO: 39883 - DNA, 1336 bp, Oryza sativa
  Clone ID: PAT_MRT4530_4337C.1
ttatctactacttctctctctcagtcctcatctcttcatctctctctctcaaatcctctctccacgcacggaggccagtggcgcggggctcgagaggcggcggcggcggcgggctcgagaggcggcacgcgggtgcggcggtggcggccctcccccgagcggatccagggtcggccgccctcctcccacgtggatccggcgccggtgccctcccccacggcggcgacgagctcccctcggcgacgacgagctcgggggcggtggatccggctcaggtgcggcgacgacgacagcggcgggtggcggtggcgagctcgggcgcggcggatctggctcgggtgcagcgacgatgacctcggcgacgacgacggcggtgggtggcggcggcgagctcgggcgtggcggatctggctcgggtgcggcgatgacgacctcggcgacaacgacggcggcgggcggcggcgacctcgggtgtggtgacgacgacctccccgcggcgacgacgatggcggcgggcggcggcggtgagctcgggcgcggcggagccagcgtggtggcgagcggcggcggcggtgagctcgggtgcgtggggctaggatcaggtgagggctaggcccgtcgcggcagtggtggcgcggagctcgcagcaatagggtgcagatctcgtggcaacggtggtgcggagctcgtggcaacggcagcgacaaggggtggccgacggcgacagcgggtggctggaggctgcagctcgctggttgtctgacggcaacagctggaggtgcggccaacagcggcggcgaccggcgtggtgactgcggtgcaaggaggcgcgacacgggcggtggctgcgtaggccggcgaggctcggacagcggcggcggggttggccgcggcgcaaggaggcttggccggtggcagcaatggtggtgccgcgggagtgtcgttgtggtgcggtcggtagaggcagtggcaggcgcagcgagaggcgaaatggcgcggccggtagtggcatgcggagattggccgttagggggggcggccgcacgggcgggcggcacgcacgccggcgcgtgagggcgggcggtgggcggcggcgtaggacgtcggcaaagaagctagcgaggcggaggcggagatggagaggaggataccaacgaagcgagcggcggccatcaccctgccgcgaaggccgccgcccctgcgggagctcttgacgttcctcgtggccgccgcagtgggagcgtactggccggaggcggcaggagagggctcgccggaaccgccgccgcgctcgcctcccctagggatcacaacgggccacgctgataatagaatt

SEQ ID NO: 39884 - DNA, 201 bp, Oryza sativa
  unsure (1)..(201): unsure at all n locations
  Clone ID: PAT_MRT4530_43380C.1
atgcattccttttgcttcttcttctgccattccatncatncaccgccgnctccgctctctcttcttcttcttcctaccntttgcctagttgcattcggagaggngaggactgattgattaattgatcgatcgatggccatcgaccacgagtcgnctngccgacaaggacnctcaaggacgagntgccgacgatccanggcg

SEQ ID NO: 39885 - DNA, 365 bp, Oryza sativa
  unsure (1)..(365): unsure at all n locations
  Clone ID: PAT_MRT4530_43381C.1
aattcggcacgagctccgccgcgcaccactccccacctcccgacgagatggccaccctccgtctcacctccgtcaccctccgncccgscgtctccccctcgttccggcggcgcgccgcgtcccgmcaacttcggccgcgccgcgcggcgggttcccctcgctccgcctcgssccgccgsgcgccgcggggacctcgccaggcgcagggccgccgccgacggcgngcgraggggtaagagaggcgctgtccgaggtggcctcggagaacgacaagctcgaggcgaccgtgtsgaacctggagaagctggagaagatcttcgcggaggaggacatcgccgagttyttcgaaaaccgasggtgccgcg

SEQ ID NO: 39886 - DNA, 887 bp, Oryza sativa
  unsure (1)..(887): unsure at all n locations
  Clone ID: PAT_MRT4530_43382C.1
ancgagccgcccacgaactacccaatccatccatccgccgcgcctctctctccttcatcatcaattccggtgaggatatcgccggatcgacgcgccgccggcgggagccagccgcagagtggagcttggaataggcagctttctactgtgaatcaaaagcgtgatgaacaaagataaagttcatgacaaggagactcacagaacgagcaacgatataagtcataaaacatctgtggacaaggttaaggcccccaatctgtttgaacgagccaaggaagaggttgaggctctcgttggagctgttcatgataagatggagcacaattccagtccccatggaaataatgctgacctgcataaggactcaaaggatgaaagcaaggtgtcaatgaacaaaatagagacccacaagaatgaaactcatggtacaagcgatgatataaatgagaatacaccagttgagagagttaaaggtccaaatgtgtttgagcgtgccaaggaagagattgaagctattgttgaagccttccacccaaagaagggatctgacaagtgaagattgagatgttctgttgcctctgtctgcacttgatgtgaaaacattgacatgagttattaatagatccatggatgagttgtgagatatccatcggctggtcttattattgccaaactatggagttgtaactgttgaatggttcattgtaccactgatatatatatgagcagagtgtgtatcatgtgtgacatgaaagtattactgttcttcagtgtttgattttagtgtatgttgaacttagtcctttgcatgatatggtattttacttgctaccatacatgcaaaaatcttttgaggtgcataaataaagagagagtcaattctgtac

SEQ ID NO: 39887 - DNA, 408 bp, Oryza sativa
  Clone ID: PAT_MRT4530_43383C.1
atgccggcaccgccatcgccgcggcttgagctgctcaacctccgctacttcaccgtcgacctcagcctggaccacatcgccaaggtcaagtccaccttcttcgcgtccaccggccaccgctgctactccttcgacgtctgtgtcgccaagacatggcaagcccgcacccgcgctctcgttgccgccggcgatgccgagcaggagtgcatcatgcgcgtctgcttcttcgccaacacgcgccacctgattctcaaggcggacggcgtggcggcgatggggttctacagcaactgcttctacccggtggcagcgacggggagcagaggcgaggtgaggctcaccgccaagttctctgttgtcgagctcgtggtggtggagcagcaggtgctcggcagcggcggccgatga

SEQ ID NO: 39888 - DNA, 253 bp, Oryza sativa
  Clone ID: PAT_MRT4530_43384C.1
atgaaaggtatttaggagaataaattttgggtgagagaagggcaacaaagggacataatatgaccgaactccccaaaaaagaaaaatggggggccaaaacccaaaaaaaaaactccggagcttaatccaaggggggaaaacttgatcaaaaataaagggaggtgctcccacaaaaaaacgggggggaaaaaggaaaatgtgtgttgcccccccaggaaaacaagggttcgcacaatgcctttccagcacactt

SEQ ID NO: 39889 - DNA, 267 bp, Oryza sativa
  Clone ID: PAT_MRT4530_43385C.1
atgaagccgcggcggcgcgtcgctgtgctccggtggcgtggtggtggctgcggcctgcggaacggattcaaagctttttgcaaaaatataccgttgatctcgcacaaccattacgcgaaagtgaagtggcgtgacgtcgcgggcggtatcgcgcgggggaagcgtgagaccgtgcggtcgcgcgaaatgaaagagcgagaccgtgcaatctcgctgaaccaatcagcgataccggacgacgctagagtcacttatcagggtcagtag

SEQ ID NO: 39890 - DNA, 177 bp, Oryza sativa
  Clone ID: PAT_MRT4530_43386C.1
atgacgacctcccccttcgcagcgctgcaccggctcctcggctgccgcctcgatctgcagtgcgcgatacctcctcatcaccaagaacggaaggaaatacctgcattttttagttacagttgtttggttcttctttcctttggttccaagagtgtacagggctcacaacaagcatga

SEQ ID NO: 39891 - DNA, 595 bp, Oryza sativa
  Clone ID: PAT_MRT4530_43387C.1
taaaaacgaacttcgcgtgcaatagatggattgggaggaatcgaaccctggatcgatgcctccaccgcctcctggatcttctccgccgactattggaggtgaactcagccgccgccgccgctgccgggaaagacgacatcgacgccatcgccgccaccgggaacgacgacatcgacgccgctgcagccgggaacgacgacattgacgccgccgccgccgggaacgacgagtttgacgccgccgcgcctgcttcaacgctgccgtcgggaaggactccgccaccgctgggaacaacgagttcgaggccgccgccgccgccgccgggaaccacgacatcgacgccacagcaggacgactttagcagtccacacgtttttttcttccgatcctacccatgccggaatgaacggttagatacgtactagtaccgagcgataccagtaccgagcgatacaatttgctggaccataaagacgctcatgaacattacttcctttcgctacgttggacctatttttcatttcatggtattgtgtgagacattggctcagagagagttcggttaattaatgaacatatcttcttcttcttcttc

SEQ ID NO: 39892 - DNA, 3120 bp, Oryza sativa
  Clone ID: PAT_MRT4530_43388C.1
cttgctggaccacgcgtccgttatttcgagagagatctctcccgagctcgatccggtccaccgggacacgctaaaggactggcacaaactgcacaatcaaatcaagcgttggagagaggaagaaggtaagctaagcaaagcaagcaaagctagagagaaagtgacagcagcaatggcggggggcgagcttgtgctgctggacttctgggcgagcccgttcgggcagcggtgccgcatcgcgctggcggagaagaagctcccctacgactactccgagcaggagctcctcggcgccaagagcgacctcctcctccgctccaaccccatccacgccaaggtccccgtcctcctccacggcgacggagacggccgcgccgtctgcgagtccctcgccatcctcgagtacctcgacgacgccttcccggacgccacccctcgcctcctcccctccgccgccgacgacccgtacgcgcgcgcccgggccaggttctgggccgactacgtcgacaagaaggtgtacccggtggggacgcggctgtggaaggtcaagggggaggagggcgtacgcgcggcggcgggggcgcgcggcgagctggtggaggcgctgcggacgctcgacggcgagctcggggagaaggaattcttcggcggcgagtttgggtttgtggacgtggcgctggtgccgatgatgccgtgggtgtacagcttcgcgaggtacggcgggttcagcgtggaggaggagtgcccgcgggtggcggcgtgggcgcggcggtgcatggagcgggacagcgtcgccggcagcctccgctcgccggaggagatctacgacttcatcggcctcctcaggaagcactacggcatcgacgactagctacgctattgtgtgtacaccttaatttggttgttattattactgctatttactcatttaactacttgtcgtaattaatcaaggtcgttcaaaataacttgtttaatttcgccggctggcaggttcaagtaatttgtatttgaagtttacaagcgtaaactgtactctccgatcattactttacactttaaaagaattaagaaagaagaaagatagattcaacttcctgttcccacatgtttgttaacaatctaaatgggagtacattgttgatcctcatgtcagatccaggtactcttataccttcagacggtgcgggcttgggtagagaatttgaagatagtttatttgcagatagtcaccatgttaacaaagatgactgtaacactcagttggggtcttcctttagtgaagtctcaagttctatgtatggttcttttgagaatgagtcacttgaaaaagtatccacacccagcaattttgggcattctgatccttatggcataacaactggccagactggcagccagggatcagcggtatctggttcatttggggaactatcaattagcacaagcacaagtgaaaatttgcctgttattcatgaatctagaaatacagaccataccatgagtacacagagcaaagataagtcctctgcagcgaataattcgtcatcaagttctccttcatcttctgaggtgggtggtgctccagcagtacgaaggatgaaagtgaaagatgtctcagaatatatgattagtgctgcaaaagaaaacccccagatagctgagaggatccatgctgtcttacttgaaaatggagttgtcccaccacctgatttgttttcagaagaatcaagggaacaacctaaagaccttattgtgtatgacacatctctgtttcaaactaaagatgaaatgataaagaggatgaatgagcttgaatctacaacaaacgctgatttttgtcatggtccttcggtgccacatccccctggacatgaactccaaacaaaggctgttccttatcggattcctctggatcttaaacctatccaggggctgggtacctaccatccctcagattcccggaacagtactggtagttcacatatgtatgaaccatctgcacctccccaggaggatccactacaacttataaaacaaatgcctgttgcagcagctgctgttgcaaccgctgcagtggttgcatcctcaatggttgtcgctgcagctaaatctaacagtgatatcaaactcgacgtgcctgttgctgctgcggcgactgctgctgcagttgtggctacaactgctgctcttaacaagcagtacgaatacttggaacctggttgtcaattgcttagtttgccaagttcttcaggggcaaatgaattgatcccgaagggtagacatgacttctgggataatcagcttgaaattgatcatggacaaactagtgttcccgagaaagaaaaagatttggttgaagtacctcaggaagctgaaagagtctctgacaagtcggttgggactgaaagctcaagatctgatattgccctagatggtgttgcagagtttgaaatccaatgggaagagatcactctgggagaacgtgttgggctaggatcctttggagaggtgtacaaaggggaatggcatggaacagaagtcgcagtgaagaaattcttgcagcaagatatatcaagcgatgctctggatgaatttagaactgagttccaaataatgaagagattgcgtcatccaaatgttgttctatttatgggtgctgttactcgtgtacctaatctttctatcgtgaccgagtttcttccaagaggtagtttgtttcgattgattcatcgacccaacaaccaattggatgaaagaagacgtctaagaatggcacttgatgtggctcgtggtatgaattatttgcacaattgctcccctgttgtagtgcaccgagatttgaaatctccaaaccttcttgttgacaagaattgggttgtgaaggtttgtgattttggtttatcacgtatgaagaatagtaccttcctttcctcgagatccacggctggcacatttagtcagcttgcatttgccaaatatatttgcatttttgcagatgtgatgttttcagctacggggttatattatgggaacttttcacactacttcagccatgggaagtcaaacttctttaacaactgcatatcaaagtctgttaagattgatcatgtaaactga

SEQ ID NO: 39893 - DNA, 708 bp, Oryza sativa
  Clone ID: PAT_MRT4530_43389C.1
atggggagtgggcccggcttgtcagtggctcggctgctctctttctctctctcgttcttttcctatcgtcttctacctccagaccgtgcgggagcagcaggggcggcgcagcgcgcgcggcaaggccggcggagggcgacccgacggcgaccaggggagggagcggcaaggctccggcgtccacctgccggcggtcacggcgtaggacggcgcgggggcgagcagcgccgcacggccgccatggccgggcacggatggctaggaagagctccgggatggcttgtccacggcaagctcgccggcggcataatggtggccgggccagcacggctacgggcgctagtcgccgaaattgaaggaggctcgagtttctacggaaccaggagagacctgaggagcgtggacttaccgatagacggcgggacgacgaagatcgggtgcagtggtggagcggagaagaaggtgcagcacgcccacaagatgctcgatgaaatgtatccgaggaagaagaaaaggaagagaggggaggacgagctcgtgggggctgggaggtgtggggagggaaggggaggcatgggtttatatagggggcggaggggagaggtggccggtgcagtgatggcggatgggacgcgcgcggcgtgcggggctcgaggcgagcggcgacgggacatgagcgcaggcgcagcgcggggctcggcgcgatga

SEQ ID NO: 39894 - DNA, 1208 bp, Oryza sativa
  Clone ID: PAT_MRT4530_4338C.1
ccggccaggatatttctattttattcctgtagaagcattggggattgtttgacttagagttttatatcacttctttcattggatatagctagtctacacatatttgctatgttgactagtgaggtacctagccctagagaccctgaacttgttgagcgtcttattcttgatttgctagatccagaactcaaacgacatgctccttccgagctacgcaagaaaagagagatgtttcaaaacctggctctgctgttgtggaattcttttggcatagttgcttcactgctccaggagattatagtagtctaccctgcactttcacccccaactttgtcattaggtgcttcaaaccgagtttgcaatgcactagcacttcttcagtgtattgcttcacattcggagactaggacccatttcttacaagcccgcattccgttgtacctatgtgcatttttggaaactgatgacaaggccaaacaatttgagtacttgcggtttaatagatgtctcacaaaacaaactcttgaaagagttgatgatccaaaaattatcaattttctgctggaaaatgaatttgttcctctatgcctgcataatatgacgatcggcagtcaattatccatgccggtggcaacttttatcactgaaaaaattgtcgtagatgacgccggtctagcttatgtttgtgccaatgctgatcggttctatgctgtgggagctgctttagcaaccgtggttacctcaatggttgatcagccttccaagaggttgctgaaacacgttatccgttgttacctcaggatgtcagagaatcctaggggtttcgctgcactgcagacttgccttcctcctcagctgaaagatggcacattcaacagctgtcttagggatgatccttcagggcgacatttgcaccaacaactgctggttaagatgacaagtggaaaaaagggaggaggagctggtaacagcgctggtcgtatgtcatggggataaactaacatggtggttgtaaattactgcagtgatgcattgttactgtgaattgcagctaacaattaaataaaacacttcgtttgtgtctggaatgaagtgttaaactgaagtgaaagctttgagttgtattaataagtaccgcaactgactcattcaaacgtgcgtgccattgaaattgggaaagcactcttataaaaaaaaaaaaaaaaaaa

SEQ ID NO: 39895 - DNA, 543 bp, Oryza sativa
  Clone ID: PAT_MRT4530_43390C.1
gctcgcggctcgccggcgcggcagcggatgggtctcgctgatgtgatggctggcctgtgtgcgcccgcgcagggacgagcggttcgggaaggaggagcactatgagtggttcaaggatttctcccacttccgccacctcctcgccccgctcctctccccttccatctcggttcgtctcgcctcctttcttccccccacgaatccctcctgatatcatctttgggtggggggaatttgttttttgtgggttcttgaaatttgaagtctgggggtgaaatgaaatcatctcgaattcgtgttgcgctaggttcttgaggttgggtgtggcaactcgcggctcggggaggagctgctgcgggagggcgtgcccggcggcatcacctgcgttgaccgcggacccgtcgccgtccagcggatgcgtgaccggcttccggagcagggcaccgagggtaaatttttcactattatatgttcgttatgaatcactaaaatctgaaaaaactacaacagtggcttaccaatggaaaatgcttgaaggtattt

SEQ ID NO: 39896 - DNA, 208 bp, Oryza sativa
  Clone ID: PAT_MRT4530_43391C.1
atgtatctaaagatcgggacctacttcatcatcacacgctccttgcagcgcacggcggcctgccctccctttggcagcatggcggcggcgacctcccctcgagaacatatggttgctgcgatgccccccaagctcaacgatgggatgaccagatccagccacaacgaccttggggcagtggcatccaccccctccgatgagcagtggc

SEQ ID NO: 39897 - DNA, 451 bp, Oryza sativa
  Clone ID: PAT_MRT4530_43392C.1
aggaagaaatacctgcaaaatggaggtgtctttcaatgtgggactgagggcagctctcagttctggagaggggtggtcttaaatgctagaaaatggaagaattttggctcggcgtggcaggttggagagggttcgcgtatctggttttggcatgatatatggcttggaacttgtcccctgaagattatcttagaactgtttgagatttgcaatcagcaagacataattctggctgagctgaaacaaagaggtgtgggtgaactaaccctcaggagatcttttggcttgtctgaactggaacaatggagagaaattagagatattattgaaaatctaaccctgaatactaatcctgatacattgctttggagtctgagtgccagcaaaaaaatatactacgaagattgaaacacgttattctacatttgctgacctacaggtttacaacaag

SEQ ID NO: 39898 - DNA, 951 bp, Oryza sativa
  Clone ID: PAT_MRT4530_43393C.1
atggggagggcaccttgctgtgacaaggcaacagtgaagaaggggccatggtcacctgaggaggatgcaatgctcaagaactacattgaggagcatggcaccggtggcaactggattgcactgcctcacaagattgggctgaagaggtgtggcaagagctgcaggctaaggtggctgaattacctgaggccaaacataaagcatggggacttcaccccagaggaggacagcatcatctgcagcctctacattagcatagggagcaggtggtcaatcatagcagcacagctgccagggaggacggacaacgatgtcaagaactactggaacacaaagctgaagaagagactccttggccggcgcaaggaccgcggcggcggccaccaccaccgcagccagagcaccgccgacgatcttccggccggtggtgacggcggcatgaacgacggcggcggcggcggcggagagcggtcgctgagcgcgtcggcgatggagaggatccagctctgcatgcagctgcaggagctgcagaacccactgtccatccaccacaaccccttgctctctcatcagtggccaagcaaggccaccattgatgatcagaatcacaacaatgtcactgtggctgaacatggaatgtcaagctctgtgagcgaccaccaccgcctcgatgggcagcagctggagagcggcgccggcgccgccgccatgcagcaggcgtcgccgtcgagcggcggcgagaactccaacgtcgtcgtcgccatcgaggccgagctccaggagcttctctacgccggcggcggcgcgatcgtcgacggcggcgcgccgccgcagggggatgtggactggtggagctatgatcagggaaagcagtcacctgtgacttgctgggatttcacccctgaaaccagctccatcttccaggattatgcaacagtttatgacatctga

SEQ ID NO: 39899 - DNA, 222 bp, Oryza sativa
  Clone ID: PAT_MRT4530_43394C.1
atggcggctgacagggaaggagcgcggcggagaggagggccgtgcggcgccattgtcgtggctgcgcgttgttgtcggggagggccgagggccgatgacttggacacggtgagctccgccggctgcggtggagacggctacgaccatggcctctcgctcgctttcgccggtagggcgcccttgccggtgaagaagaacaggagcaccagcatccacacctag

SEQ ID NO: 39900 - DNA, 2088 bp, Oryza sativa
  Clone ID: PAT_MRT4530_43395C.1
atgaagaagaaatcgattgatttgaagactttgtgggatagacattcaaagtctaggaaggtagggttaggttctggttctggatcaacaacacaaccagttagaattgacagtgaagttgctgttccttctgttcagccgattacagatgcaaatgagagtccagttcagattcagattactgcagttgaggttgtgcctgaggtagcagccagtgatgcagcaagagatgtgacagaacctgaaacagaggtagctagcaatgatccagacatagcaacagcagtgacacagcaggagcaaccttccacttggtctcctatcagagattggtctcccatcagagatggtgatgatgaagagacagagtatgactcaagtgatgaagctatttatgacattgatttactttgtcatgatcctggaaggcgaattgcaatcaaaaattatgatgtcaatgaacggaattctgtgataaggggatatattgcattagggccatgccaaccacgcagccacaattttcctataaggaaaattggagatgcatttgtaaataggggatttaggaattggcacatgagaaaaaggattgcaaaacatgttggtggtatgactagctttcacaatgtggcacaagataaatacaatcacttccttgcacctaaaacaaatattgttgagagctttgctgccaccaatgaacaagacaaggctagatatatggctcgtttaacctattcaatgaagtgcttgaagtttcttttaaggcaaggtttggctgcccgtggacattatgaaagtgaaaagtcacttaataaaggaaatttccttgagatgttgagtatgctagcagaaaactttgaagaagttggtaaggtggttttgaataatgctccaaagaattgtaagttgactgctcccgaaatacaaaaacagatagctaattgttgtgccaaagaaactactaagcttatcatggaagaccttggtgatgaatattttgcaatacttgccgatgaatctagtgatgtgtaccaaaaagaacagttggctctttgtttgagatatgttgataaaaaaggaagggtagttgagaggttccttggtgttgttcatgttgaaaatactacttccttgacacttaaagctgcaattgaatcattgcttatggagcattccttgagcttgtctaaggtccgtgggcaaggctatgacggtgctagtaacatgaagggtcatgctaatggactaaagaaattgattatggatgagtgcccttctgcctattatgtccattgctttgcacatcaactccaattaacacttgtggctgttgctaaggaaaacccagattgtgtgtggttctttgagcaacttagatttttgttaaatcttcttgggaattcttgtaagaagacagaaatgcttagagttgcacaagctcaaagaattgtagaagaactagatttgggtgacattgaaactggaaaggaatgtgcaaatgcacaaacagtgttgacaatattccaatcatttgagtttgtttttatggcacacttgatgcaaacagtacttgggttcacatctgacttgaatcatgctttgcagaagagggatcaagacattgttaatgcagtaggactgattttattgacaaagtttcaattgcagcaattacgcgaggatcctggatgggatgattttcttcaagaagtgcaatctttttgtgtgaagcataagatcaagattcctgatatggactctttctatcggccggttggaagagataggaggttctttattaaaatcaagaatatgcatcgcttccatgttgacatgtttctaagtgtcattgatagacaactacaagagcttaatgaacggtttgatgaggtaaacacagatttgctcctttgtatggctgcatttagtcctatagataactttgctagttgggacaaagataagttgattaagcttgcacggttttatcctaatgatttctcaagcacagagatgaaccatcttccatcagcattgaaactcttcctcactgagatgcgtatagatgaaaggtttagaaaa

SEQ ID NO: 39901 - DNA, 3633 bp, Oryza sativa
  Clone ID: PAT_MRT4530_43396C.1
atgaagaagaaatcgattgatttgaagactttgtgggatagacattcaaagtctaggaaggtagggttaggttctggttctggatcaacaacacagccagttagaattgacagtgaagttgctgttccttctgttcagccgattacagatgcaaatgagagtccagttcagattcagattactgcagttgaggttgtgcctgaggtagcagccagtgatgcagcaagagatgtgacagaacctgaaacagaggtagctagcaatgatccagacatagcaacagcagtgacacagcaggagcaaccttccacttggtctcctatcagagattggtctcccatcagagatggtgatgatgaagagacagagtatgactcaagtgatgaagctatttatgacattgatttactttgtcatgatcctggaaggcgaattgcaatcaaaaattatgatgtcaatgaacggaattctgtgataaggggatatattgcattagggccatgccaaccacgcagccacagttttcctataaggaaaattggaggtaagcctcggcgcttccttcctagttggtatgacgaatttaaatggcttgaatatagtgtggaacaagatgctgcattctgttttatttgttacttattcaagcataaaattaataattctggtggagatgcatttgtaaataggggatttaggaattggcacatgagaaaaaggattgcaaaacatgttggtggtatgactagctttcacaatgtggcacaagataaatacaatcacttccttgcacctaaaacaaatattgttgagagctttgctgccaccaatgaacaagacaaggctagatatatggctcgtttaaactattcaatgaagtgcttgaagtttcttttaaggcaaggtttggctgcccgtggacattatgaaagtgaaaagtcacttaataaaggaaatttccttgagatgttgagtatgctagcagaaaactttgaagaagttggtaaggtggttttgaataatgctccaaagaattgtaagttgactgctcccgaaatacaaaaacagatagctaattgttgtgccaaagaaactactaagcttatcatggaagaccttggtgatgaatattttgcaatacttgccgatgaatctagtgatgtgtaccaaaaagaacagttggctctttgtttgagatatgttgataaaaaaggaagggtagttgagaggttccttggtgttgttcatgttgaaaatactacttccttgacacttaaagctgcaattgaatcattgcttatggagcattccttgagcttgtctaaggtccgtgggcaaggctatgacggtgctagtaacatgaagggtcatgctaatggactaaagaaattgattatggatgagtgcccttctgcctattatgtccattgctttgcacatcaactccaattaacacttgtggctgttgctaaggaaaacccagattgtgtgtggttctttgagcaacttagatttttgttaaatcttcttgggaattcttgtaagaagacagaaatgcttagagttgcacaagctcaaagaattgtagaagaactagatttgggtgacattgaaactggaaagggtttgaatcaagaaatgggtttgggcaggccagcagatactcgttggggatctcactataaaactgttatgcatgtcctatctttgtatccttcaattcaaaaagttcttataatggttggcaaggatcgctcttttggtgcagaatgtgcaaatgcacaaacagtgttgacaatattccaatcatttgagtttgtttttatggcacacttgatgcaaacagtacttgggttcacatctgacttgaatcatgctttgcagaagagggatcaagacattgttaatgcagtaggactgattttattgacaaagtttcaattgcagcaattacgcgaggatcctggatgggatgattttcttcaagaagtgcaatctttttgtgtgaagcataagatcaagatccctgatatggactctttctatcggccggttggaagagataggaggttctttattaaaatcaagaatatgcatcgcttccatgttgacatgtttctaagtgtcattgatagacaactacaagagcttaatgaacggtttgatgaggtaaacacagatttgctcctttgtatggctgcatttagtcctatagataactttgctagttgggacaaagataagttgattaagcttgcacggttttatcctaatgatttctcaagcacagagatgaaccatcttccatcagcattgaaactcttcctcactgagatgcgtatagatgaaaggtttagaaaagtaaaaaatcttgctaatctttccattatgattgttgaaacaaaattgcacaatagacatgagattgtttacaagcttctcaaattggttctgacgggaatacccaactttctaatcctggctccgccactgttcacggcgacatatccaccgaaccgccgcatggttatatcttgcggacgggacacgtacgacggcagccatagccagccgcccaaaccagcaaccaaagaaacagctagagagagaaagaaaccccggattacggattcctccctcccccaaaggccaaagcctcccaccgccgagccgccgccgccgccggctttcttgtttctagcttcctttgatgatgaacgctctcggtttatcggtggcggccaccagcaccggctcccccttccacgacgtctgctgctatggcgctgggattgcagggaacatcttcgctcttgtgctcttcatctccccgctgccgacgttcaagaggatcgtccggaacggatcgacggagcagttctcggcgatgccgtacatttactcgctactcaactgcctcatctgtctctggtacggcctccccttcgtctcctacggcgtcgtcctcgtcgccaccgtcaactccatcggcgccctcttccagctcgcctacaccgccaccttcatcgcattcgccgacgccaagaacagggtgaaggtgtccagcctgctggttatggtgttcggcgtgttcgctctaattgtgtatgttagtctggcgttgtttgatcaccaaacacggcaattgttcgtcggttacctcagcgttgcgtccctcatattcatgtttgcgtcgccccttgtccatcattaatctggtgatcaggacgaagagcgtggagtacatgcccttctatttgtcactctctatgttcttgatgagcgtatcgttcttcgcatatggagttctactgcatgatttcttcatatatattccaaatgggattggaaccgttttgggtgtcattcaattggtgctctatggctacttcagaaaaggatcaagagaggacagcctcccattgctagtcacacatacatgagcacaccaaggaacaaggtcctgcaagcaatttgcctgcctttgtttcttggaaaatcatcggttctcttatcagttatcacatattggattttgtgttggtggtggtgtttactgttcttttgtaaaattgttttgtggtttgaaatgtacaaatagattttggtataccatattgaaagtagttttcc

SEQ ID NO: 39902 - DNA, 1979 bp, Oryza sativa
  Clone ID: PAT_MRT4530_43397C.1
atggacgagttcaaaggcccaggggagaaggagaaggaggaggaggccggggacaaggccgcggcggaggaggcgggggacggattccaggtggtgcgcggtaagaagaagaagcggcccaatggtggttcggcttcgggtgctgggtcggggacgatgatggccaaggacaaggcggcggcggcggcggccgcggagccgtggacgaaggcgaaggtgtctttccacgatcccaacattccgcggccgcaggatgtgtacgcaatcagagtgaacaactacaacgtgccgttcgaccatgtctggctagagcgcaccgaagatggcagccgccctatccaccctctggaaaaactgccaatggagcagtttattgacagaaatgttcctgaaagtgaacctgtaaagccagctgatttggaggataccccatttacgctagttgaagataagaatggtttagcagacttagctaaaaagttgaagagtgtaaatgaatttgctgttgacttggagcacaatcaatataggtcatttcagggtttgacctgcttgatgcagatttcaacaagaacagaggattttgttgtagacacccttaaacttcgcatatacattggtctctacttgaaagaacattttaaagatccaaccaagagaaaggtaatgcatggggctgatcgtgatattatgtggctccaacgggatttccacatatatgtttgcaatctttttgacacaggacaggtgcaaaagcgcagtaatgaaatttgtttacagttgtatgaaaaggaactgctgacagatacatcttatctccacatatacgggttgcaagaacatgacctggatgcaaaacagctggctgttgtatatgctctacatcaatggagagattatatagctcgtgaagtagatgagagcactggttatgtgttaccaaataaggctttaattgagatagcaaagaagatgcctacagatactgcagagttaaaaagaatggtgaaatcaaaatatccatttgttgatgaaaatctggaccaagtcgtaggcatcatatggaatgcaactgaatcttcttatgcctttgaaagcagagctgaacaactaaagaaggaacgtctggagcagctaacggacagggttcagactatatcatcacctgagatgaagacatctatgaacttatcaggccagattagatcaatggataaggaaatactgagcgataacatacatcagcaggtggcacaggctacttttcaagaactgaagagacctatggctttgggagcagtagggaattcaacatccgggggacagagagatttctttggagggttttcaaataagtctgagaagatggagaaggctaaatcctatccagccttttactacccccagcttccacaatatagccctgaagttgggtacggctttcaatcaataaaccgaactatggcgggaacagcacagtctcctactggcaataaggagagggatctccagaaccctagaagacgtcaatctttcccaccttccggtaacataagtgatacacaccagtaattgctctgatgtatgccttcaaattcatccttctgtgcagaaaatagctgtagagaaatggaaactgggctgtttttatccgtgccccctcatatgagaaactatgcctccctcagatttttttggctagactaacagaaatatgagaatagcccatatcattgacattagatgcagagcatgggaaatgccaatgtggattggcttgtgtgtaacaactgacaaacatgtgctgtgcaattgtgaatactggagttgtacaagtggtatactgtaatactgttatagcatagcatcagaatacaaagacagaaatgaacacataaaaaaaaaaaaaaaaaaaaaaaaaaaaaaaaaacgacagcctggctcccgccctccggccgatccactagttcaacctgcag

SEQ ID NO: 39903 - DNA, 501 bp, Oryza sativa
  Clone ID: PAT_MRT4530_43398C.1
accaaacaaggtttttacccccattatgaaatggaagtttcttaagccaccaagtatgccatacaaccagtatgccatacggcaacccccttctccaatcactgcgtttcaactgagaacaaccaagtcctggcaaacaagctcggctggtgggccaacaaagctcactatcaaggacattaacacttgtttcagcccatagcgcaagcaaactacaaactccaccaagtttggtgatctctactttgatcggaatctggctcaagctcaagctctgttggcttttaacgtcgccatctagatatgggtatctcaccctaggtactatggtggcacccagtgaccatggaccacccttgccggtgtcttgtaatgagtgtttaacagtatagtgtttcggaagttaaaaataagctcagatatcatcatatgtgacatgtgaaactttgggtgttataaatagacaaaaaagttgtctttcaaaaaaaaaaaaaaaaaaaa

SEQ ID NO: 39904 - DNA, 1884 bp, Oryza sativa
  Clone ID: PAT_MRT4530_43399C.1
atggcttatgagattgaggactggattgatgaggccatgcatcatctcactaaggacgacagcaattctgggttcatttcgaagatcatttttcgtctcaacaggatgagaacacaaaatcgcatggccaatcaaataaatgaggtgaaaacacgtgtggtggagatgagccatcggcacaaaaggtataagcttgatgcaagtatctctacatctgactatacagccattgatcctcgcctctgtgcgctatatgcggatgcagaggcccttgtgggtatggatggtccaagggatgagattaccaaatggtttatgggtgcagatcaacagttgatggtggtgtctgttttgggaattggtggtctaggcaagacagcacttgctaacgaagtgtacaaaaagattggagggcaatttgattgtcatgcatttatctccatctctcagaaaccagatataatgtgccctccccaaaataatcatgctagcagagtgataacaacaacacggattgaaaaggtggctatggaatgttgcagctatcgctgtgaatttatttataagatgaaaccactgaatgaacatgattcaagaagactattttttaatagaatatttggctcggagaatgcctgtccagaacgatttaagggagtttcaactggaattttacaaagatgcggtggtctgccacttgcaattgttagtgtctctagcctgttagctaatccagcaacctctgtagatagacaatgggagtacgtaagcaattctttgagtgataagtttggaataatgcctgcattggatggaatgagaaacattttacatcttagttacaaaaaccttccttatcatctcaagacatgttttctttatcttggcatttatccagaggactacataataaggaaaagtgatgtggtcaggcaatggataactgaaggttttgttcataaagcccaggtacaagatgcagaagatgttgcaggtagctacttcaacgagctagtcaacaggagcatgattctacccacagacatagactatcagaataatgtagtatccttgttttcagatgctgtccaccagatgagtttggacctaacaggaattcgtcagttgtttcaacttagatatgtgaagattgaagccaatattcatgtgcagatacaattgcctgctcaaattcaggagctaaaacttttggaatccattgatatagaatggggatcagtttgcattccaccagatattgttcatctgcctcacttgattcatcttgttatcccagaaggaacaggattgcctgatgggatcggaaacttgaaatctctgatcactctgcgttcttttgatctgggggagaactcgttacataatatcagaagtatcagagagctgactaatctgaaagatctcaatctctgttactctggaaaaaatgtagtatctaatatggagacatggattgatgttttgcgttcttcccttgaaaagctttccaacctcaaatatctacatttatattggcctggtacttgtgaaaatggcctatgttctttgaaccctccatcccgccatcttcagagactggagatggcgtactggtggttttccaaagttcctaagtggattggagggctccatgagcttcacgtcttgaaacttgcagtgaaggaggtgtcagatgatgatatcactcttcttgcacaactgccttccctgacaaaccttggattgcgcatgcgaggagcacctaagcagaagataattatctataagaaggcattcccagttctcagatacttcaaattctggtgtagcacaccctgcctggtctttgaggcctccgtgatgagcgaagagctgcggaattag

SEQ ID NO: 39905 - DNA, 660 bp, Oryza sativa
  Clone ID: PAT_MRT4530_4339C.1
atggggacgggggccggtggcggcggcagcggcaggatgggcgacaaggccggttacccggatgagcggatcgagcaggaggcggcggcggcggcggcggagtcgacgacgacgacgggggcggtcacggtcgcggccgcgatcccgatggcgctgccgatgatgacgcgggatggctccccggtgctgtccggcgaggagcaggtcatatcctccagctcgtcccctgagcccccgctcatgctgccgcaggcgccatccggctccggctccggcggcgtcgcgtccggtggcatgcgggagaacgcgcagctcgcacgggagctcagccagatgaggaagctctgcaacaacatactcctcctcatgcccaacagtgcaagatccgcgacggcgaggcgcggggtcggtggcagcaacggcgaggcgacgctcgggggcagcgcaccctcggcgcggctcgcctcccctccctcccagatccagccaaaggggggagggggaggccagtggccggtgacgcgaggcggaaaacagaggagggaggtcggcggcagcgctcctacctcccagatccggctgtcggccctcctatcccggatccagaagcgtcatgggggagggtggcgacggcggctgcatgcagtggccaaggggtga

SEQ ID NO: 39906 - DNA, 267 bp, Oryza sativa
  Clone ID: PAT_MRT4530_433C.1
atgctggaattttggactttggactttccgctagctagtatactggtacataagagtacaaactactactattactattactatcagtttcgtattgcagacatcatggcgaaaggtgggttagttgtaccggcaaaggcatcttgtgggcgttgcgagatgagcaattgccgagttgacgatgcaaacaagcatgaacatacgctgctcattgccaaggaccaacttggtcaggttgttaccatctcctcccaattcataaatcca

SEQ ID NO: 39907 - DNA, 180 bp, Oryza sativa
  Clone ID: PAT_MRT4530_43400C.1
atggcgccgcgatttccctcgctggctcgacaagaaagcggcgacgctggccgcaggctccgcaagaaggcgggcaagagctttgaggatctgaaaagctttcaagtcaatgtttcatacggttttcacggttaccgcggttaccgcgcagtaaccgtgcttaccgccggggcgcggtaa

SEQ ID NO: 39908 - DNA, 243 bp, Oryza sativa
  Clone ID: PAT_MRT4530_43401C.1
ggcacgagatcgcgcgaccagcagcagcaggagcagcaggagcaggagaagccgcagcggccgcgggagaggacgaggagggtgcggttcgccgccgacgtggtggagccgtcgtctgatgcaacgagtaccgccgccggtacgtcgccggccgcccctaaccggcaatgggcaactcctcctcctcctcaccaccggctaggcctttagctaggcctcgacgcgtcatgcaatcacacccag

SEQ ID NO: 39909 - DNA, 619 bp, Oryza sativa
  Clone ID: PAT_MRT4530_43402C.1
atgtcgtatcgtgtagatcctcgtactagcatatcccaatactctattcatccggtctatgggtatcccccatcgatagtgccgtgccaggtaggggtacttggtgctcaatgttccattgatatgacttcaagttactccgacacctgcatctacaccaactttggcccaggtgatccaacataggcatctttggtgtggattcaagtcggatccatcttctttccggtgtacgctgcaactccaatctcgtctagcccaatctctgtccgaaacaagaacggcgcagctgcgactacgagaagcgacaccaccccagctggtcctcttgtcccgatggaaaagaggatgccggctacaacaacgtctgataagagacctcaagtggccgaaacacatccatctaccgagaatcaggcaccgataaggatatcttctcagaggtctaccacttggtgcgtcatccacaagacggccaatcactccctgatggactgcaaggtggttcaacaagtgaaagccgaactcgaagtttgcaaggagcataatattcagcacatctcaccaagcaggaccaccaggtgtccgatccacaggtcaagaggacacgagctctctt

SEQ ID NO: 39910 - DNA, 1491 bp, Oryza sativa
  Clone ID: PAT_MRT4530_43403C.1
atggacgccgccgccacccgcgtctccacccgcctccgccgctccacccagacccacgccgcctacaccgtccacgtcgccgaccgccgcgtcatcgccctcgtcaccgcccacccggcctacgcccgccgctgggtccacaccacgcgctggctccaccaccgcctcctccgctccggccgcctcctcgtcggcctcggcgtccagtggacccccctccgacgcccgctccaccgcggctcccctcccccgccaccggccaccctccagctctgcgtcggccaccgctgcctcgtcttccacctcgcccacgccgacgccatccccgccgccctccgccgcttcctcgccgacccccgcatcaccttcgtcggctccggcgcctccaacgaccgccgcatgctctccgcctactacgacctccacgtcgcgtccgcccgcgagctgcgcgccgtggctgccatgggcaacgcctccatggaggccatggccgatcgcttcctcggctaccccggcatcgccaagcccacgaacgtctccatgagcgcctggcacgcgccctacctttccatcgaacaggttgagtacgcctgcgtcgacgcctacctcgccttccgcctcgccgtccatctctgccccgcgcccgcgcgccagcccgtcctccgcgccccgccgccgccgccgcccgctccgcgcgcgcccgtctaccaccaccctctgcctctcggtccgcgcgtcgccgtgctcgccgcccccgcgccacggcccgctcgccacgctcccgtgcgcgcccgtgtggcgccaccggtgtaccgtgcggttgcgcgcgccgagcccgctgctgctcagacgcactgggcgctggtagcaaccgccgtggacgacgacgcgtcagagtcagagtacagcagcaagatcacggacaacgtgcgcccacgcgtcgccgcgtcggactcggacattgaggaggaagacgacgatggcctctccatgatccactcatcaagctatgcttcagatgaccatgtcttctcttcagatgacttcgagctcgtcggccatggactgctctcgtcggacgatgaggatggctatgaagacttcgtcctggggatgggagctctcaacatcgacatcgacgacgacgatgactacaatggcaacactggcagcatcggaattctgactgttcagagctacaacgagcacagcagcattggaattctgactgttgagaactacgacatggctggcactgaagaaatgtttgtcagaaatggagtggccacgcttgaggagttggaggaagatgacattgtcaccggagccggcacggtcactgtcgatgagggtggtggtgggtatgaagcatttgaggggaacagtcaggcgttcgacgatgtcgaggagggcgggtatgtagaagatgattggtacgatgaggatgaggaggagcttttagattatgatacaagtggagggttctactag

SEQ ID NO: 39911 - DNA, 438 bp, Oryza sativa
  Clone ID: PAT_MRT4530_43404C.1
atgaatgatcatgttccaagcgaatcatggcaatattcaaatgacgcgcagccggcggtagatggccccaccgcggcccactccgctccgccggccgtgctctcgcccgccgccgccgctctactccactccgccggccgccgcgcgctcgctcgcctgctccggccacgctcgccgccgctggacaacgaggaggatgacaagttcgagttcagcgtctacgcggtcgctgccgtgctgtccgccgctgacgagctgttcttcggtgtgaggcacatgccgatgctcccgccactgcgccccccttccccatcgtgctcgcctccgccgtgcttggaggttcgcagtgtagtgggcattggtggcgcaatctgctcatgcttgtgtccaagaagctgggcgacggtgaggcgaaggatcagattggtgggaatctga

SEQ ID NO: 39912 - DNA, 164 bp, Oryza sativa
  unsure (1)..(164): unsure at all n locations
  Clone ID: PAT_MRT4530_43405C.1
attntacaaactaaccattgttaatacatcagtggacgtgactgacaaatgagtttgaaaaaatataaaataacgacctcaaaccaacacactcttgtgatcatttacatctaacaaactaatttagcattactactatacatatcaatcaataacgagagctc

SEQ ID NO: 39913 - DNA, 420 bp, Oryza sativa
  Clone ID: PAT_MRT4530_43406C.1
atggagatacaacaatatcatgctattctaaggcatcgccatagcgtcgctatagcggtaaggcgctgccaggagtcagggcgtctggcccgccttaccatattgcttatggcgtccgccttatgcccaaggcgccgctacggcgtcgatattgcgtccttaggcgctacaatggctaaaggcaacgccacaggaagtcgagggcgtggtccccacgcaccatatcccaccaaatcaaggagaaaacaacagaaagagggtcgctggagtctgaggctgtggcgatccatccctcgcgacatctccatccctggcggcgatccaagttgttgcctgcggctatcctgtgcctgcaccattgtcctggtcctctgcacctgcgccatcgtcctggtcctctgcacctgcgccatcatcctg

SEQ ID NO: 39914 - DNA, 402 bp, Oryza sativa
  Clone ID: PAT_MRT4530_43407C.1
gagtacaaacacaatatatggggctcgtaatttacttctgggagttacgggaaacatgaaattacagagaacagtaaaataaaggagaacccattgttcttttcaagtatctttgatcaagttactaaagcatatgcacaaagccgtaggctgatcagtcaaagccttcaagatgctcccaaaagctccttgatatcatacccttgcagctgaagaaaggttaacagtaatattactcccgagttccaaaatgcatgtattgtgataggagttagaagattatgggtttgagcatatgaaaaacccaacgcaacaccaagtataaacaactgtgggaattgtccaggtgtcagatgagcaaaggcaaatagagcagcactgacaagtatgcaaactggagta

SEQ ID NO: 39915 - DNA, 1276 bp, Oryza sativa
  Clone ID: PAT_MRT4530_43408C.1
cgagtacgctcgccgtgacgctccgacgatcaccgcggtggcagcggacacgtcgccgccaccaccttcaccagcgtcgtcgtcgccgccaccgttgtcgtttccgcctccaccgcctccgccatcatcaccacctccgccagctctgcctgttgtcgatgatcacagcgacacgcaacggtcgctccggcggctgcggcagctgacggacagcccgtacacgctcggcccggccgtgacgggctacgacgcgcgcagagcggagtggctgcgcgatcacacggagttcccggcgtcggtggggcggggccggccgcgggtgctgatggtgaccgggtcggcgccgcggcggtgcaaggatcccgagggcgaccacctgctcctccgcgcgctcaagaacaaggtggactactgccgcgtccacggcttcgacatcttctacagcaacacggtgctcgacgccgagatgtccgggttctggacgaagctgccgctgctgcgcgcgctgatgctggcgcacccggagacggagctgctctggtgggtggactccgacgtggtgttcaccgacatgctgttcgagccgccgtggggcaggtacaggcgccacaacctcgtcatccacggatgggacggcgccgtgtacggcgccaagacgtggctcggcctcaacgccggcagcttcatcatccgcaactgccagtggtcgctcgacctgctcgacgcctgggcgcccatggggccgccgggccccgtccgcgacatgtacggcaagatcttcgccgagacgctcaccaaccggccgccgtacgaggccgacgaccagtcggcgctcgtcttcctcctcgtgacgcagcgccaccggtggggcgccaaggtgttcctcgagaactcgtacaacctgcacggcttctgggcggacatcgtcgacaggtacgaggagatgcggcggcagtggcgccacccggggctcggcgacgaccggtggccgctgatcacgcacttcgtcggctgcaagccgtgcggcggggacgacgcgagctacgacggggagcgctgccggcgaggcatggaccgggccttcaacttcgccgacgaccagatactggagctgtacgggttcgcgcacgagtcgctcgacaccatggccgtgcgccgcgtcaggaacgacaccggccggccgctggacgccgacaaccaggagctcggccgcctactgcacccaacattcaaagcccgcaaaaagaagacatccagagcagccaggcccatgtaa

SEQ ID NO: 39916 - DNA, 3326 bp, Oryza sativa
  Clone ID: PAT_MRT4530_43409C.1
ctttctttcttcctcttcttcgatctctctctctcccctcaaccatctcgatttcgatctcgccgtgaagcagcagaggagcaatggagatgctgaggcggaacctgaagcggcaggcgtcgcggtcactctccgccttcgccgtgtcctcgccgcgggcaggcgctgtcgccgccgccgacgccgaccaggagaacctccacccaaacctggccgccgcctcgccgccgatgtcccccgccgccaagaactcctcggcggcgccgggcgcgtcgccgcggtcgtcgaagcccgtcccgaccagcgctgctcctccctcgaaggccgccgccgagggggagcaggcttctgcgcccgccaacgaggcacccgccgtgaaggtggtggtccgggtgcggccgacggtgagccggccggtggacggcaaggatctgttcttcgtccgcaagacctccccctgctccgtcgccgtcggcgatcggtcgttcgccgtcgatggcttcctcgacgacagagcctctcaggcggatgctttcgatctgattggcgtgcccatgatcgagagcgccctcgctggattcaactcctccctcgtgtgctacggccagagcggcacagggaagacgtacaccatgttcggtgccctcgcggccatggttgacagcagctcagaccacgccgacaggggcgtcgttcctcgcgtcttccagaacctcttcgctcaaatccaaggcaggcaagagagctcaccggagaagcagacaagctaccaatgccggtgctcatttcttgaggtacataatgagcagattaatgacctgttggatccatctcagcgtaaccttcagataagagagaatgctggcaatggtatccatgttgagaacttgaccgatgagtatgtgtcaacggttgaggacgtcaatcagatcttgatgaagggcctttcaaacagaaaagttggtactacgagtatgaacttgaagagttcacgttctcatgtgatattcagttgtgtcattgaagcatggagcaagggtttctcaaatggcttcagcagctcacggaccagcagaattaccttcgttgatcttgctggtcctgataatgatgaacttgatggtggcaacaagcactgtacaagagaagaaagatatgttaagaagtccttgtcaaagcttgggtgcagaactacaactttaagcacgctacggttcggtgagagagcgaagctcatgtcaaacaaggctgtagtaaatgagatatcagaagatgatgttaatggtttgagcgatcaaatacgtcagttgaaggacgagctcatacgaacaaaatctggagacactgaaccctgcaagaatgggtatttcagtgcacagaatgcccgtgaaagcctgcataatttgcgagtcagtctcaatcgctctctaatcttgcctcacatagaagttgattcagaggaagagatggatgtggatgaagaggatgtacaagaactgcgtgaccaaataagaaagcttcattcctcatctgaagacactttcgatgacttcatggatgcagagagtggtgatgacactccttgctctaaggggaatccaaaaacaagtgaggaagatgatcagcctgtaatagatgattgtgaagacccgattcaggaagagcatgaagtgttgtccagtacaaaagttgatcaagaccttgtgtctgacaggaaatcttttctatcagttagtgcctccccgcacctgtcaccaatgcaagaccctacgttatgttcttctccaaagattcacaacaaggctagaaaaagcattacctcaccagggctgtcaccaagcaaacttagtgtatctgattgtcccggtgatgaagtgtccagaaaaagtgcagttcgttcttctttacagtcaagcaagcttagcccaactgattcactggctgcaagtctccaacggggcttgcacattatggagtaccatgaacagaaccaaggcccaagaaaatcatttgttggcctttcatttgatcattttgcactgaacccccgtcaatcagttgcaaaagtcagttcaggagttctggcatcaccagagaggaaaggagcaacatcttctgctctttgttcatcctgcaaaaaagcgatcgacactgatgggaaccaaaaagataatataaatgcagaaaagcagattgtaatagccaccagtgtggtaccagaagttaaggacgacatcaccgcatcaacaattgcttcaaagagacagactgaacttgaagctttatgtgaagaacaggccgataagatcaaggagctgagcaatttggttgaccaatataagaagtgttcagaagatgctcaaaattcagatggtacggaacctacaaaagaactagtggatgaagccaaggttggtgaacaacatggtgagctgaatgtgaatgacagggaagaacttcttagtgaaattcagaggttgaaggatcaactgaaacaacaagcaggtgaatccacaaatgtcagccttctggaacatttgaggaatggcagcacagaccaagaatatgagctagacagagaaagggagaaatggatggagtctgaaagcaaatggatatgcctaactgaagagctgagagttgatcttgaatcaaatcggatgcttgcagagaaaacagagatggagcttagcaatgaaaagaagtgcactgcagaactggatgatgccctccaacgagccatctacggccacgccaggataattgaacattacgccgagctccaggagatgtacaatgatcttcttgagaggcaccgccgtgtgatggaaggtatctcagaggtgaagagggcagctgccaaggcaggcaggaagggctgcgggacggctttcgctgctgcccttgcagcagagctgtccacagtgaggattgaccgtgaaaaggaaagagcgcagctgaaagagcagaacagaaggctccgcattcagcttcgcgacacagctgaagctgtccatgctgctggagaacttcttgtaagattgagagaggcagaggaggcatccacacaagaaaaggagaggagtgcagcgatgcagcaggagaacgacaagctcaagaagcagctggagaagatgaagaagaagcacgagatggagatggagacgatgaagcacttccttgcggacagccggctgccggagtcagcactggggggattctaccggcaggagagcgaggatgtaccggagtacaacaaccatgccacttctacatgcgacgatgatcaatcttggcgtgctgcgtttacatctgcatatgaatga

SEQ ID NO: 39917 - DNA, 468 bp, Oryza sativa
  Clone ID: PAT_MRT4530_4340C.1
atgaggaggagtatgttgttgcagagcttcctcatctggctgagctcccgtgcgagctgcgcgttctcccgcatgccaccggacgcgacgccgccggagccggagccggatggcgcctgcggcagcatgagcgggggctcaggggacgagctggaggatatgacctgctcctcgccggacagcaccggggagccatcccgcgtcatcatcggcagcgccatcgggatcgcggccgcgaccgtgaccgcccccgtcgtcgtcgtcgctggcaccggcggcgtgcctcttcaccttccatccgacaacgtcggcctcggccccatcacactccgccgccgccgccgccgcctcctgctcgatccgctcatccgggtaaccggccttgtcgcccctggatctgttccgcggtggattgggtgccagctagcttgcccgagctctagatgcgtcgccgcgctgggaacataa

SEQ ID NO: 39918 - DNA, 933 bp, Oryza sativa
  Clone ID: PAT_MRT4530_43410C.1
atggcggtcgattggatctgggagaggcgccggagagaggaggaatataatcatcaaatgtcacaagacgaactgcagcaaccaggtcaggtgcagtggacgccggcgccggaagagaagtcggagatcgcggtgcagttcttcaccgcgccgtacccttgccagaacggccagcttgatcacggcgagcaccatgcactaggtggcattggagcgtgcagctccgtgcattggcaacctgaccgtggcacgtgctactggccgccgcctctcagtggggacggcggcggcggcagcggcagcggcagctccggcaccggcgaaggcagctacatcggcgagcgctgctactacgtcggcgagcccgacgtgcccatcggcctcaacctcctcgtcggcgacaatgacggcgccggagtagtactccgtgacgcggcgccgcaggcgaagcggaggactcaggccggccatggaggagatcttggacggcagaagaagaaagctcgagtttcagataagcggaatcaggagagtatgcagagcggcagctgctccgacaacgagtccaattgctcccaagtgaaccgccgcaaggtggatcgtgtcgccggcggcggaaacgggaaggttccggctcgccggaggtcggcgaccattgcccagagcctctatgcaaggagaagaagagagaggatcaatgggaggctccggattttgcagaagctggtacctaatggaaccaaagtggatatcagcacaatgcttgaggaggccgtccattacgtgaagttcttgcagctacagatcaaggtagaagtccaaatagtttgtcatgatcagatgcttagctctgatgagctgtggatgtacgcaccgattgtttacaatggcatggacttgggaattgatctgaatatttcccctccccggtga

SEQ ID NO: 39919 - DNA, 579 bp, Oryza sativa
  Clone ID: PAT_MRT4530_43411C.1
cacgaggcattcctctacattctacgcccgtcaccaatcagaacgacatcctacgccaaagcagccgtctatgcctcgcccgcgctgacgtccaacaatcgtccatccaccaacggactaacgatcgccaactcaccatccaaaccgcggacttcctcccgattcgaatcgttcacgacgaacgcggcgtgtgaagtggtatccgctttcttggtcgcgacgggttcgaatcgtgctgctcggaggcttgcgccgtcctgtcgaaggcaaggtcaataactattcgtgcactgtgtacgaagggtaactcacaaagcaatccgcatcgctcatatgatcatgccttgccacgtgcaacgcatcccggatctcactatccgaatgattcaccacatgtcgtttcgtcgtcccacccggggacaacaacatactcgcccctggactcgtcggcgacgcactcaacccactcgccgaggtcatactcgccgacagcccgtggaaatgatgatccgggtcagacgcaaactgcttctttgcgcgggaaatgaccttgctcgtccgcgcggacaagtgtttccg

SEQ ID NO: 39920 - DNA, 445 bp, Oryza sativa
  Clone ID: PAT_MRT4530_43412C.1
aaatcatgagcttattcacaattggaaccgtcttctatagtagttcccatacatcaggtcggttttaaatcatgaacttattcataattggaacatctctcaggctaagtctcaaaaacatgtacttgtcagaacttggcatgtgctcctgcacccgctgcaagatacatgactcctaatgttcactcagcggagtgtgtattcatgactcacgagctttgagtgctgatttgagcaattcctgctgcaagaagggtgccctgaagaaattagcacctaatttgcatctctgcaagcctgcatactgcctcatctcaagtcttcatcaccttcgtcggtgcctcctactgcttgggctctgccaatccggaagagtagcggcagtcggcacgaaagcgggaggtgggagcccagtggcagtgacggacgggccgaccgggtgtgc

SEQ ID NO: 39921 - DNA, 2727 bp, Oryza sativa
  Clone ID: PAT_MRT4530_43413C.1
tcaggttgatagcacataaccaactaaatcaagttttacgtcatggaaggaactggattcagtggaatcacgaatcaccttggcccttacaaactctgggagggggtcaacccacacataagattgatccggatcccaactcacaccaagtcgagcaagttcatgcgcaacattattacaagaccgtggcgcaaaatagacttcaaaactaggaaactgagattggagaaccgtttttatctcagtgaagattgtagcaccagtagctaaatcatgcgaagaggacttgattgccgacaccaacaaatccgaatcagactcaatatcaaccaccgaaacaccttgcaccagaatggctaataaagctgccagacacgcctttgcttcagccgagatagcatcactaacaaactccaaacgcccagcgcccgcacacaaagcatgccccacctcatcgcgcagaacaaaaccccatcctcctgtcttgcgatcagcatgaaaagcaccatcaacgttgagtttaagttttcccctttgaggcggtaaccagcgcttgatctcagtgtttcctctccgctgttcaacaggcttcaaagcagacagctcatgcaacatatttttcactctaaagactacttcctccggcgagaagccgtgttcccccgcattgatcttattacgagcaaaccaccaattccagagaagcaaaactacttccatacagcactcctcccctagtgacagaatatgtcgaaccacatccttcgctgagttcagattcatgaggtcaagccggatattctctttctgtaacaaactccaacacaatctgacaggcttacactttagaaagcagtgcccgccatcctcatcaaaacgcttgcataccaggcatagcgtgtctgtttgtctaacagaggtacgctctcgctgatcctccaacacgtggtatgcagatttcacagagaagatgccccttgtgtcatagtgccaagccgcaaaatcctccatatcagttctcaccgggatcgacagaatattggcaacatcttcttcccagaagatatcccgcaccaaagaaacatcccaatcaccttgacgagctaacatagcaagattgaaaagatgcaaatctctataccccaagcctcctttcttcttacgtcgacacaacaaatcccaagataaccaatgcattttgttctccgtctcctgctgcgaccagaaatatctgcaaataattgcactaatctcatcacataacgtttttgttagatcaaaacaggacatggcgaaggttggaatagcttgagccacagcctttatcagaatatcctttcctgcctttgataggagcttttccttccatccttggatctttttccacaccctttccttcagataggcaaaggttttagctcttgatctgcccatatacaccgggaggccgagatacttctcattcctggcttcagtagaaatatccaaaatctccattaccatcttcctatcagcttgagaggtatttttgctgaacataatagaggacttatccttgttcacaatttgccccgagcagctttcatacaagttaagcacattttgcagacactgtgcactcctttcattaactttaaagagtagcagcgaatcatccgcaaacaaaagatgactaacactcggtgcttgctgacaaacctttactcctgacaaatccccccgttcctcagccgcatagagaagtgacgaaaacccctcagcacaaatcaaaaaaaggtaaggagaaattgggtctccttgtctcaacccacgtgacggtataatctggtctgtcaaatcaccattgaccttaatacgataagttaccgtcgagacacatctcattatcaacttaacccatccttctgcaaaccccaagcgcaccatcattttctcaaggaagctccattcaacacggtcataagccttgctcatatcaagtttcaaagcagcatagccctcccggccagtacgttttgtttgcataaagtgcgtcatctcataggctagcaacacattgtcagtgatcagtcgctgcgggacgaaggcgctctgatttggcgaaataatatcagggaggatcaacttcaatctattagacagaaccttagaagctagcttatagaccacagtacagaggctgatcggtctcaaatctttcagtctttcaggactctgtacttttggtattagcgtaaccacggtgtcattccatccctcaccataatgctcattggagagcttttgaggatgcctgaggcacggtgggtacagccgccgagaaggcgaggggcggaggctcgccatgaccgcgccactggcgatgcccaccgtgaccaccaccaggagagcatcggaggcgtcgcgctttcggcaaaccgcgatgatgccgtggaggatcccggggcaatgcccatgctgggaggtgcgggccggtggcgctctgcgttctgcgccgcgcggtggtggtggtggtggtggcggcggcggctgcggagctcgaccggcgaccggtcgccgccggccgcggtctattgctgggctatagcagatgaagaggttacggcccatatcgtagccagagcagaagagatctgctttaaggcccacttgtgccaacgtgagtacgtaacctgcaagtgggccggaacggcctgttcctaaatatttagcaccaggtatgttcat

SEQ ID NO: 39922 - DNA, 491 bp, Oryza sativa
  Clone ID: PAT_MRT4530_43414C.1
aaacgaacacaacaaaacgggcccttggggattattcctttggccccgagcaatttccccactttttccctttcaacaattaaatcacacacgaacgcccaacaaaggggtgaaaaaaaatcattcataaatcaggggtttaacccgaacaacccaaactaatttggacgtaccctgggaccccgggaaaacaaaacaaatcctttaaacgcggggacccctttaattactacagggcccggccatgcaatttaacgcggggccgtaaacgcgggccttggggaccccggcgcaggcgttaaaaaaatccccgtcaataaaatcgggggaaaacacctgcagtttggcgccgaggcccttgggaaaaaccttggaaaaaaaaaggggggcgtaccccgggatcccccgggggaccggccggacccaaaaaaccgggttttccgcctgggggggcaccggtggtccccacccgggaaaaaaaaccccggggg

SEQ ID NO: 39923 - DNA, 475 bp, Oryza sativa
  Clone ID: PAT_MRT4530_43415C.1
cggacgcgtgggaaaaaaaaaaataaaaaaaaaaaaaaaataaataatataaaaaaaaaaaaaaaaaaaaaaaaaataaaaataaaaaaaaaaaaaaaaaataaatttaaaaaaatataaataaaaaaaaaatggggcggccgttttaaagtatcaaattttagtttcccttcttttcaacttattaattttttttttgggtccccaaatttaatttaactgcccgtgtttttaaaactatgtgattggaaaaaccttgggtttcccaaatttattccttttgtaaaaattccccttttcccaagttgggttataacaaaaaagccccgcacccttctcctttccaaacatttgcccaccttaattggtaattggaactccccttgtagcggcctattaaccgcgggggttgggtgggttactcccaggtaaacccttacatttgcaaaggccttagtgcccttttttttttttt

SEQ ID NO: 39924 - DNA, 1515 bp, Oryza sativa
  Clone ID: PAT_MRT4530_43416C.1
atggtgcagctcgaggagctaatctcctgcctcccgccgccgccggcgaccaccatcacccaccgcaagatgctcgcccgcaggaaaaccatggagatggccgtcgtctccgaccccgcccccgccgccgtcaccaacctcaattatgccggtgccacacgctcgtctccagtcgctgcaaatatccgtggtaccccggtgatgagggacgttctcagtcatctcccggtaaagatggtgcgggagttaggtcccttattcgccagcgaattttggctatccaccgttatggaaattgacgacgaacagctgctcccccagaatggcgagcaagtggatctcattgagagggttgggtcagtcctttccacacaagatgggcctttccctacggtgaggctcaccaacttgtgctttcagccatttggggtgcaggaattacattgcatagacgatgatgagtctgcatttattattctgatgtcttggtttaatctctttaactcgaagaaggtgaccaagttcatctttctcaatagagctcagccaacggctaaacttttatttgtgccagaaaacattcttaagtggtggaggctcgagaccctgtatttatgtcaaatcaggttcaaggacccctctggaaccattgatttccatttgccgaatctcgcggaattggggattgtcaattgtgagttccaccatgatacactgatgaagatggttgcacagtgcccaaagctcgaaaggttatctctggcttttctcgagttttctaccaagattcactttgagtctaatagcctcaagaggatggtgctctggaattattctgcaagagacagtgttagaattgtggccccaaaactatgcagactcatattgcataatgttggcacttctgagcctcagccccatgatgagcaccctgatcctggcgaccatcgaaccatggtgttatctatgaactcagaaatcgatatggatcttgaagttttaggttacattgacctgaactcccatgtgccactattgagtgaagggcaatcttgcaagtctgttaggactttgggagttcaacttgggtttgggcatgataatgagtttcacaccatgcggcgtctattgaaatactttccatctgtggagaacctatacatacagagtactaaactggacaatgtcactatagatctaacagaagatcgcattattgacttgtttgagccaatagaagatcgtaagatcatgatggttgtatatgaggcttttaaaggttctgaccatgagttatgcttagcatccgtgttattgcagaggctcccttccctgcaaaaaatgacgatattctatgaccgtgagatcagtgatttagtaatcaacaagtcacactcttccttacaagcagccatgctcggtgccacagttgagttgaacttttgtgcatgccctgagtcttcatggactctacaagaagccctaaacgccgatcacttagcatctaaaccatga

SEQ ID NO: 39925 - DNA, 465 bp, Oryza sativa
  Clone ID: PAT_MRT4530_43417C.1
gtgttgggttgtttaaataaatttttttttttttttttttttttttttttttttttttttttttaccactataactatttaaaggtagatttattccatcacatccctaataatacaaagtgatacatacatcggtcacacacacagtactggggggtcgaccataccctaattaaaaacttttataaataacccttattttttctccacttctacaaaatcactgtgcatacctacatatataaatatggcggccacacacacctacacttataaaaatcatacccccccccttttattttattgaccaaaccaaactaaaattaaacatttgcccaggatccatccatcgatccattggatcacttgtggggatccacctccgggcggtacatgggctccggaatctcgtcggggctcccccaacaacggcatcccccccggtaaccctaaccccaacaacgg

SEQ ID NO: 39926 - DNA, 634 bp, Oryza sativa
  Clone ID: PAT_MRT4530_43418C.1
ggagagagagaactagtctcgagttttttttttttttttttttttcacacatctaaactagcctagatgacagataataattatacacgggattagcaccagatcgaaccagatgacgataattatacataggtctagctatttgacactccagagtagaatcacacactagctctgaattgacaccatcctacttaatatgcttctgctgaatattcagggttcagtgaacaacaagcttggacatgagctccttgagaatggcagggcagcttgtggtgagatgctcgaagccgtcggtcgccatggtcgagctcaggtggtcggtgtatatgaagtgcagcatcgccctgaacaccggcgcctcgatgtcgttgatgcgcgttggcgtggcggcggcggtgctccgcggctgcgccatcgggccgaggagctccgccttgagcacggacgagcgggcggcgagcacggacctgtgcgccttgtacgtctcgccgccggcctcgagagtgacgtccgtgccgtccccactggtgagcagcttgccgaggtggcggtgcaggtcggacggcggcacggagacgtaggacggaaattcggcggcggcgaccatggacgacagtagctgggcaga

SEQ ID NO: 39927 - DNA, 304 bp, Oryza sativa
  Clone ID: PAT_MRT4530_43419C.1
atggcatccttctcgcggcgcgccgttggcttgagccacgatacgcgcaatgttctggttgttcgggttgacggtcctgccaacatgtacgcacatcgctggtccatcggtggtggtggcggcatgagcacatggggaggcaaggagcgtctacttcgctgtgccatggccgacgagcaggtacttcactctcccacttttctgcttgatctcccactgagccaaatgctagagcttgctcctgggccgagtgacagagaacaaaggctggaactgctgctgtcatcggatgacgaagggggcg

SEQ ID NO: 39928 - DNA, 538 bp, Oryza sativa
  Clone ID: PAT_MRT4530_4341C.1
gcgataaagctgaacacagttgacaataattctctctgtagagatagtcgatgggcgagcgggatcctgactagaaaatttgattacactgcatcccgcactacttgtggttctatataataaatgaattcgttgctcgtcattgcgccgttgctcattctccattcctgagcacgcacaaactattgcgcaccatccttgtagctggtgggtataatatatgcgtattgatgccagtgtgtgtctagtggccatcgctaccaaggaaaatcagtgatcactaggtcatggctgacacgattcagcagtggagctgtgtagttgattaagaacccatgaaaagtcagttaacctaagatagttattactaatggttcccttgtaacaagaattggggatggtacccagtgtgtccccacatccattgatgcaggccaaattgtttgtgggctgcaaaacctttctcttatcataacagacaaatgaaaacccgaaaatggtctatatatatatatatatatatatatatatatatata

SEQ ID NO: 39929 - DNA, 1405 bp, Oryza sativa
  Clone ID: PAT_MRT4530_43420C.1
aatttgaactgaattggaatttgccgagacacgacagaaatcatcactgaacacattcatatttacattttgcaagcacagggtttaaaattacagatcacatcacacacgcgcggctgcaaaaacctaccaaaaccgtcgcctactcctgcaccaccatcaccggccgatggcttggcatctccagcctcgccgtcgccgtcgccgtcgcttcctcctcctcctcctcctccgccgccgctcccatggcttccaggatcttctccaagacgcgctcctcgtcctcggacagccgctccatggcttgctcgaactgcgcgaccagctcgggatcaaacacggtgtgctgcggctgcggctcgccggcgttgtggagtactcctccacgttcttgcggcggcggcggcgaaggcgccggtgaggtcgtcccgaacttgggggtgacgtaggagcccggggagaatatctgtccgccctggaggagccagtcgcgcaggctgccggacttggagaagtcgaacgccggtggcagtggcaccttcagctcgccgagctgcctcgccctcgcccgcctcttgttcccggcggcggcggtggcggcctcctcttgctccgacggtttggcgcccgtcgcgtcttgatcggcggaggaggctgcctccgccacctccgacgagccgctccgcgtcaccagcgcgtcgaactcctccacggtgcgaaagctcgtcgccctcgccggcgtcgccaccgcgccatcgagcacgcacgcctgagccgaacacctctcgccgtcgtcgcgttcttcttcctcctcttcctcctccagcccggcgagcagctcggacacgttgatcgtctcgatcttgacaaactcctcggcggccaccgccgccgccgtggtgctctgatcggcggcgtccttggccctgctcgccgccgccgacgccgacgaggtggacgtgcggaggagggccaagaactgatcgccgttgctcttcttgggggtggacaggatgatctcctcgatcaggttgctccccttgaatccatggctcaccaccttctcctggaagctccctgatttgctcaggatcttggacgacacgcaccccatcgatctctcccaagctcaaaccaatctgatgaaactgctagtcagagttcagaaacccaggctcttgttggcttgctcagttgctgaattttcaccgggcaatgtgcaaatttgtatcaggagctaagcagcagtagattggtctcctaggggattaggggcagctgattaacacaagaacacatgcagagcactgtgccaagatccaatcatggcataatcaatggttagaatatgagatgaaaaataggatagagaattccaagccggacgcgtgggcggacgcgtggg

SEQ ID NO: 39930 - DNA, 499 bp, Oryza sativa
  Clone ID: PAT_MRT4530_43421C.1
aaattaaaaaccatttgttgactctataaccacgatctctcttctgcttggaattctctatcctatttttcatctcatattctaaccattgattatgccatgattggatcttggcacagagctctgcatgtgttcttgtgttaatcagctgcccctaatcccctaggagaccaatctactgctgcttagctcctgatacaaatttgcacattgcccggtgaaaattcagcaactgagcaagccaacaagagcctgggtttctgaactctgactagcagtttcatcaggtaccaaaaaaaaaaaaaaactcatcttattccctagttgagatcatcagtttgtttctgaacattttttttttttacattttgcggcgttgatcagattggtttgagcttgggagagatcgatggggtgcgtgtcgtccaagatcctgagcaaatcagggagcttccaggagaaggtggtgagccatggattcaaggggagcaacctgatc

SEQ ID NO: 39931 - DNA, 1263 bp, Oryza sativa
  Clone ID: PAT_MRT4530_43422C.1
gcacgaggctcgccgacacggccacacggggcgtcgccatcctgtcgccgcggcgcctccccctccccgctcctcctcctcctccatatcccactcgccaatctcgattccctcctccgctctacctcgccggagttcaccctgtgtgggactgggagcggcggcggcgtcggaggcaatggacgcttcgtcggtggcgctctacggccagctcaaggctgctcaaccattcttcttgttagctgggcctaatgtgattgaatcagaggagcatgtcctgaagatggcaaaacacatcaaaggcatcacaaccaagcttggtctgccacttgtgttcaagtccagctttgataaagcaaatcgtacatcatcaaaatccttccgtggtcctggtctggaggaaggcctgaagatacttgaaaaagtgaaagcaacatatgaccttccagtggtcactgatgtgcatgaaagccaccagtgtgaagccgttggaagagtggccgacatcatacaaattccagctttcctctgtcgccagactgatcttctagtggctgctgccaagactggaaaaattatcaacatcaagaaaggacaattctgtgctccttctgttatggccaactctgcagagaaaatcagacttgctggaaatcaaaatgttatggtctgtgagcgtggcaccatgtttggctacaatgatctaattgttgatccaaggaattttgagtggctgagagaagctaattgtccagttgtagctgatgtaacgcatgctctacaacagcctgctggaaaaaagcttgatggtggaggtgttgcaagtgggggcttacgagaactaataccatgcatcgcaaggacttctgttgctgtcggagttgatggtattttcatggaggtacatgatgatcccttgaacgcaccttgtgatggcccaactcaatggccactgcgcaatttggaggagctattagaggagctgattgcaattgctcgagtcaccaagggaaagaagccactcaagatcgatctcacccccttcaaagaataatctggtccagttggtaggaaataatgggcacacttgcttggttgatagttttgaccagcatatatttacctgtttggatgaattgctcgttgtatgtcatacattcgtttatcggtgactgttgtctgtattgtactgcctatacaataaagatcattgttttacccaaaaaaaaaaaaaaaaaaaaaaaaaaaaaaaaaaaaaactca

SEQ ID NO: 39932 - DNA, 416 bp, Oryza sativa
  Clone ID: PAT_MRT4530_43423C.1
tcgcccacgcgtccgctgaacgacgtgagccgcaagagccgctgcgcccacatatcgtcggatggtgaagaacatcaacgagagcatgctactacctatgaagcaaggctggtcatcctagtactgggacgactacgaagatgcatgactgctggcgctaaacccgtactacggacaggagttgctccaggacgtgtattaccgtgagcagcatcacgcaggcgatgatgacctgctgatgctgaccagcgagaagcagtactcggagcacctgtcgtcgatgtacccgtggtacaccaccacccatcatcttcgacgactgcaatactacgattaccaggcttgctcatagtcataggatcacactcgtgctggtctcatgcatccgagatatggatcaaaacaaataactaata

SEQ ID NO: 39933 - DNA, 1449 bp, Oryza sativa
  Clone ID: PAT_MRT4530_43424C.1
atgtacgggctccaggtgctcgccgacgacatccaggacgacgccgggaacgtcacgcgggagggcacgtcggtgctgttcaaggtgctgtcggccttcgcgttccgggacatcagcctcaccaagatcgagagccggccacaccgccaccgccatcccatccagttcgtcgacggcgccaacgtgggcacggccaagcacttcgagtacatgttctacatcgacttccaggcgtccatggcggaggtccgcgctgtcggagatacaggagttcacctccttcctccgcgtgctcggcagctaccccatggacatgacgccatggatgatgatcgatcaacaagactgatgctcaaattttcagagataagagatagagttgttgttttcaggcagctctgcccgtcctcttcttttgcaattacatcttggaaattacgcacagtacctactacaatggctatccaggggcaaattccctttgtccagcgcttggcattcgtgtttcgcagcgtctcaaaatctctggagagattgggtgctgcccctcctaccaaatcattctggaccaggaaccatctcctcaagctacaaaatagccttgacattgcatggcaatcgctctctctaatggaacgcaccttccatcgtcttgaatccaaacaagtggacaaggtcgcatcgcttgctgctgttgctgctgccgcaaccgacgctgcaaatagagatcgccttgaatctaaacaagtggacgaggtttctgctaataaggcttgtgtacatagtgcggttattatcttcttagccgtctctaatgagagagctgcatatggtgccctgtcagcttacaggagttcccttgaaatatgcagggcaaacatgactgtttttaatgacatgcacgtatctgtaaatgacaagctattagatgtcgcaggagccggggaaaagctgcaggccaacatcagaattgcatctgggatgacgaggatattagctatttttttgggaccctggatccaaaggatcaatggtgcagaaggcattccacccacaatgagaatcgcttttagtttctgcatgcacctcgtcatcctcgtcatttggaagctctccgaccacaagcacttccaggtgcagcagcagctcaaggatccatggccgcacccgcatccggttgttccagtggcggcggtcctccccgctgcggcggagtatgcgccgtcgcttattgtcaagcccaaggaggagttcaacgccgcggcggtagtgtacggcggcggcggcatgccggagcacgaagcgtccaccgctgcgtcgtacacctcctacgagaggcggagccttgcaccgccgccgcaagaacactccattctcgagtgggagatctcgttgccgctcccaggcgtggcagcaaccgccgtcgagagagaatatagagagagatga

SEQ ID NO: 39934 - DNA, 935 bp, Oryza sativa
  Clone ID: PAT_MRT4530_43425C.1
tgggtctccttgaggttgaggacctcctcttcgccccgcgcgtcgacggcggcggcggcgacgacgagggcatggcggcgcccgactacgccatccctcccctctcccccaccgcctcctccgtcgtccaccgatgcgcccggatcgccggcgtggaggtggagcagctgctccggcggtttgagccggagaagggggaccagccgctggtgtacgccaggagcgtcgtggagtactgctcctacattgccctgtgcgtcgagaccaagcgccatgactacctcagcgacagcgagttccactcgctcacctacgacatgataatcgcctgggaagcgcccgacgacgagacggacgccgcgttgcagctgcgcgtcgcctaccagggtgtcctggctcccgggtgcctacagcgaggcggcggcggccaaggcctacccattctgcgacgccatcccctgcgaccagttcgaggtggcctttcaggccgtggagctctggatcgccgaccgcgccgtcttccccgtcgagaactcccgcgccgtcgtgcccgtcgagcatccctcggggagctcaccctcaacgccatgggcctcaacgtcgcccgcgaggccttcgacgacaccgcggccgccgccgagcacgtcgtcgccgcggggctccgggacaccgccgccatcgcatcctcccgcgccgccgacctgtacgggctccaggtgctcgccgacggcatacaggacgacgccgggaacgtgacgcggttcgtgatgctggcgcgggagcccatcatcccgcgaacggaccggcccttcaagacgagcatcgtgttcgcgcacgacagggaggggacgtcggtgctgttcggtgctgtcggcctccgcgtttcgggacatcagcctgaccaagatcgagagccggccacaccgctcttctga

SEQ ID NO: 39935 - DNA, 807 bp, Oryza sativa
  Clone ID: PAT_MRT4530_43426C.1
atggctatccaggggcaaattccctttgtccagcgcctggcatccgtgtttcgcagcgtctcaaaatccttggagagattgggtgctgcccctcctaccaaatcattctggaccaggaactatctcctcaagttacaaaataaccttgacattgcatggcaatcgctctctctaatggagcgtaccttccatcgtcttgaaaccaaacaagcggacaaggttgcatcgcttgctgcaattgctgctgccgcaattgacgccgcaaatagagatcgtcttgaatctaaacaagtggacaaggctgctgataaggcttgtgtacatagcgtggttgtcttcttagccgtctctaatgagagagctgcatatggtgccctgtcagcttacaggagttttcttgaaatatgcagggcaaacatgattgtttttaatgacattcagatatctgtaaatgacaggctattagatgtcgcaggagccggggaaaagctgcaggccaacatcagacttgcatctgggatgacgaggatattagctatttttttgggaccctggatccaaaggatcaacggtgcagaaggcattccacccacaatgagaatcgcttttagtttttgccgtgagcatatgtggtcaattaaaacttgtgctgacactccgtttctcttgctgggatgcggtgccttcagtcttcggaggcggctcaaactttctatggctgcgatgcggtgccttcaacttcaatcttcggaggcgtctgaaactttctatgactgggatgcgtgggaagcgttgccttcactctga

SEQ ID NO: 39936 - DNA, 1374 bp, Oryza sativa
  Clone ID: PAT_MRT4530_43427C.1
gtggcacagtgggacccgcacgtggacgccgcgttcgcactgctgatgcaggggaaccttctgcgagccaggcgtcccatcgccttcgcgccacgtccagcgccgcctgaaaacttcggcggccctggcccatggcacagctccgccatccatagccatctcgatcgcgcaagcatcgaccaatggctggccggaggtagggaatagagaggacaagaataaagggtcaatgagaaactcattctattttcccgtaaggattgcataggtctcagaatcaatccggcaagctgcaaggctgcctttaaagcagcaatcaagttcgggattagatgtctgggcttttccttgtcttccggcaatactaattattacaaataagtggagaagtgcgtggaagactttaaggaaatggagtagtgatttgtacacccaacatgtttttatgccagcatgggtgtgatgacagcgttgggaaatgtgggttctattttggctggttggatggaattatcagatgatgtgacagttgtaagtgtctgagataatctcaaccatctttctttaattgatcgaatgcctcccgatgagcagtggatagaagttttaacgtttgcctccaagcattatgatatgaatgatcttgattacctattcttgttaagcatggatggtgattttgcttcattgccagaacttgacaaataacacagaaattatgtgcttttgagttgcaagtgagaaaccaacgcttagatctggtatggctaggctaggatcggtgtttcatgtcagcgccaatccgaacacccactagtaccgcccaactcatgccaggttgcggataactctcagctgcttctcattcttcggatgacatcaaaaggctggtggatgcgctgactccgtggctccctcacaaacatgatattcagatatatgctgtggcatcaaagctctaaacaatgattcatccgagtgttcagctctcagagtgtatctaataatcattagctgagatcccaccggatgatatgggagaaaaggggataagttagtgctggttgacgcgattaatactgggatatctttgtattgcagcacaatcaatatgaatatgaaacataactgatgaaaaattacaaaaaaaaaaacagttccagtagttgcctctgtgtatggcatatgctaagatctggatttcatgttacaccaattcgaccacccacagtaccacaaaactcgtgcaggttgcgaataactctaagcgcttctcattccttggatgacatcaaaaggctggtagatgcactatcaccctggcttcctgacaaacatgatgagcagacatatgttatggcgtcaaaactttaa

SEQ ID NO: 39937 - DNA, 1756 bp, Oryza sativa
  Clone ID: PAT_MRT4530_43428C.1
cctccgcctccacctacgtcgccgcacccgacgatgatgacgacgacacacgtgcacgaggccgggcggagaaagggcgatgggcggtggagcggcggcgggcaacagccgcggcatcagccaccgaggccttcgtggggagagcaacgacggtggaggacaacgccgccgctgccgacaaggccgagaggcgcggaggcatcgacggccacctctccccatctgctgcaggcggccagaagagaagagaatagaagaaagaaaagaagcgccgccgaccccagcaacatcctctccctttctctctcgccggattggatcgaaacgttggccgccggggaagcagctgggcatggcagggcatctgctcccatttgcccgtggtcatgtacacctccgggagctcgaggaccttgagcagcggcatgagccccttgcgccggagccagttgcagacacgctacagggagggagggaggccgccctttcccgccacccacccctcgccgtcgccgtccgccggatgatggaaactctgcccgcgccgcgccccacccagatccccagatccacggccatccgcccgccgtgcgccacccccttctcccgcgcccactggcagaccacctgcgccgccatcctcgccaccaccactaccaccaacgccaaagcctatggcgccccgcgggtgaacggcgacagcatcaagcccgccctctccgaccacgccgcgccgccgctcgacctggatctgctccccgtctccaacctccctcgcccgctcaccatcaccgacctctcccccgcgcccatgcacggcagccagctgcgcgtcgcttaccagggtgtcccgggggcatacagcgaggccgccgccgccaaggcctacccctcctgcgacgccatcccctgcgaccagttcgaggtggccttccaggccgtcgagctctggatcgccgaccgcgccgtcctccccgtcgagaactccctcggcggcagcatccaccgcaactacgacctcctcctccgccaccgcctccacatcgtcggcgaggtccagctccccgtccaccactgcctcctcgcgctcccgggcgtccgcagggacctcctcacccgcgtcatctcccacccgcaggcgctcgcccagtgcgagctcaccctcaacgccatgggcctcaacgtcgcccgcgaggccttcgacgacaccgcggccgccgccgagcacgtcgccgccgcggggctccgcgacaccgccgccatcgcgtcctcccgcgccgccgagctgtacgggctccaggtgctcgcggacggcatccaggacgacgccgggaacgtgacgcggttcgtgatgctggcgcgggagcccatcatcccgcgaacggaccggccattcaagacgagcatcgtgttcgcgcacgacagggagggcacgtcggtgctcttcaaggtgctgtcggccttcgcgttccgggacatcagcctcaccaagatcgagagccgcccacaccgccaccgccccatccggctcgtcgacgacgccaacgtgggcacggccaagcacttcgagtacatgttctacatcgacttccaggcgtccatggcggaggtcagggcgcagaacgcgctgtcggagatacaggagttcacctccttcctccgggtgctcggcagctaccccatggacatgacgccctgggagtattcctcctcatcgtcaccatcaccggcgcccggcggcgacaccagcagataa

SEQ ID NO: 39938 - DNA, 603 bp, Oryza sativa
  Clone ID: PAT_MRT4530_43429C.1
atgccgttggttagtcgatacgttgttgaggtggtggtgggggacacggagcggcggcggcaggggacacggagcggcggcggcgggggacgaggaggcggcggcggcggctgcggccacgatgagcagctgtcgccttggcgcggggacggacggaggcaggggcgggcggtgggcgggcgtggacggcggacacggaggcaacatgcacagtgcgcggagaccctcctgcgccagagggagttcgccgctccctcctctgtgtcccgcgtcaactgccgccgcctcctcgtaccccgcctgccgccgacccgtgagagagagaaggaagaccgccctcccccggcctccctctggccggatctgggaggagaggggaggggagctgccaacgtcgtcgtccacgccgccgccgccctcccccggcctccctccggccggatctgggaggggaggggaggggagccgtcgccgctgcaacaggagccgccgacgtcgccgccgcaacgggagccgccgacgtcgccgccgcaacgggagccgccgacgtcgccgtccacgccgccaccgtgcggaccacataaggttcgcctgcgaaaatag

SEQ ID NO: 39939 - DNA, 1844 bp, Oryza sativa
  Clone ID: PAT_MRT4530_4342C.1
ttggtgtgtttgtcttttttttttttttttttttttttttttaggggtaaagcagctgccagctatacatatagcttgcatgagttgcatttcaacttaatttcctttgtgtcatcaatacaacagctatcctacactgaacaagatccctcttgttttacacataacctaagctaactctttacagcaccaaagggaaaccgtctcaggacatgcatcacatgtcctcccattgcctgccttcttgaggcgaagagatggcggacgacgactgagacctccgagagctttgtttatgtcctcccattcccagccttctttgaggcaaagagatggcggacgaccgagagcttgcttgtcgcgcgagaaacgatagaagagacagcagagttcttgccattcagcgatgacgctgtttcttccgattccgcgtcttcgtttgattctgaaggaggtggtggaggtattgtcatgaggaaagcatccagcatgcggatgatctggctgaagctaggcctcatggcaggatcctcgacccagcatgactgcacaatgaacacaagctcctgaggggtctcctcaggaaggggtgggcgcgcttgcttgaaagcagcagcatatgcagcttgtagatttgacatgccttcaaatggcattttattagtcaacagttcccacagaacaatgccaaagctgtacacatccactttatttgtgtaatgcttcttctcaccacgttgaagagtaacagtgctatatagctctggggccatccagcggtatgtccctgtttcagctgtcatcatttcagtcacagtttcttctcgtgcaagaccaaaatcagtaagcttcagcttcttacgatttgcagtgagcaacaaattatcaggtttcaggtctctgtgtattattccattcgcatgcaaacattccattgcatgagctatatccagtgcatagccaattgcagtatggatatctaactggctgggccgaaggctgttcaagtagtttttcagtgacatccccggcaataactcgctgacaataaccattaatggttccttgcaagctccaataaacttcacaagattgtcatgtttcactttacacatcatatttacttctcgaatgaaacgagcttcaagggttgccttttcctccggagtggtgccattgttaagaacctttattgctacaatttgttcaccatacttccccttgtagaccttgccatgagctccctccccgattttggatccgataaacaaattcttggggtcaacaagcagcttcttgtcaatccaagaagccggcgatgcggcggcgtccgagcagcgcgccggctccaccaagtcccccgccgcgaccttgctcggccgcggccgcctgaactcctcgctgccaccaccatccctacacccgccatcgctgccgcagctcatcgcgcgcgcgccgccgcgggggaggaagcccagccgcccgctgggggtgggtcaagcgagctcgcgcttgcagcagccgaggcaagggagggcggacgccttcaactcgatccccccacccgagacgggagccagttggaaggaggtcaaagccgcttcaagaaacacccgctctctcctcgccggcgaggaggaggaggaagaggccgcgcggcggggtaggatcaggaccgggtcagggagaggggggaggcttccccacgccgcgcgttgcgggggttctcgccggcaggccggccgccgaggaggtccggcgagaggagagcgcgaaggagagagggagggagggtagagtagaggagcggccaggggagggcaggccgcccgggggatccacta

SEQ ID NO: 39940 - DNA, 255 bp, Oryza sativa
  Clone ID: PAT_MRT4530_43430C.1
atgagggcgacacgagaagaggcggtgcggtggggcggcgcgtggagacaacgcgaagggatggggcgtggtgatgacatggcagcatggccaactaagctgcccggcacagcacggcccaagctcggtcgtgcctgggccgaggctagtcgggccgacacggcccaaccgacgcgctgggccgtgccgtcccagtccacgggcgtcatacacggcccaatactactcgggtcgtgccgggccggcctgaaggca

SEQ ID NO: 39941 - DNA, 516 bp, Oryza sativa
  Clone ID: PAT_MRT4530_43431C.1
ggtggcgtcgtccatcgattctgatattgggcaccatcatcgcctgcgccggcggcggcgcaagctggaacgccgggaacgagtgcagctccgggaaggggtcgctgtccacgatctccgactccagagtgcgcgtctcgccccaccgagttggtgtgcctagtgcacactgcatacgtacccatgtcggacgcctgctccttcacctccttcccttgctgcatcttatcccactcgttcttgttgatgtacatgcgacacagcaacccaatcatgcaacctgagagatcctttcttggcgcccgtggaggcgcggccatcattggcgagccgggactcatgcatgatccactcagtgttgacccctcctggcgccttgccggcgtataacacgagcgctttcttgatcccaagcgtgcgcccacgaggtgcgacgggcttgttggtgcctggggcctttcagtaccagatgccggcagcgcgtgtggggcgtgacccattaggatacttgcgatc

SEQ ID NO: 39942 - DNA, 181 bp, Oryza sativa
  unsure (1)..(181): unsure at all n locations
  Clone ID: PAT_MRT4530_43432C.1
aaatcccgtagcgtcttcagcntgtacgttgccgagaacgatcccggaataagttatcatgcatccgccgtttcatgtgcggcgtgtgcatcccgatgtcctacacttcctccgttaaatctttatctttttttatgtttttttgctcgagacagtcgcagttcttacggtatcaaaaaaa

SEQ ID NO: 39943 - DNA, 587 bp, Oryza sativa
  Clone ID: PAT_MRT4530_43433C.1
ttccagttccaagctggcttacactgccatacattccagacaaacaatatgccacagcttccccaattgcattcaggataccaagtaacttttgtgcgccattcagcagagcacgatcctctctcacactgttgtcaacttcaatgatctttgatcccactagaagttgcattaccatgccagatgtcacaattggagtgatacccagctccataacagtaccacggtttgatgcaaggataacacgcatccagtagaaaggatcagctccagtagttgaatggatgccatacagtggtagctggctgcataccaggaaaatgaatagggaaataacagtgtagatcactttttctctaaatggtattttcctatcagcactctgtacttcaggcaggaaagccagaaaaggcctgacaagatgcaataccctaaagccaccagccatcttttccaggtagcggacaacgacgacggcccgacgccgaggagtgcggatgcctgcctcgccgccgcagccggtggtgacgagctcgtcaaatccaacgcgacgagagagagagagagacgaagagaggagaagaaaa

SEQ ID NO: 39944 - DNA, 361 bp, Oryza sativa
  Clone ID: PAT_MRT4530_43434C.1
gattgtgtgcaggtgacttaaggacggccttggtcaatagtgaggaccgggactatgctcagggaggagcagaggtctagtgcggtcgggataccatgtgagaaggtgaatagagtcaggattcttggaggacaactttagtcaacggtggggatcgggactaaactcagggaggagttgaggtccagacggtcaaggagactgggtgacaaagttggatacgagatggcatacggtggatggacatcgtgtgggagagatcttcgcaacaggtttcacgaagtgtgcgtgcaagcgtcggtgttcgcgaaggaaattggtcgaggaaattaggagtatatatgagcgtgcatatatgtat

SEQ ID NO: 39945 - DNA, 188 bp, Oryza sativa
  Clone ID: PAT_MRT4530_43435C.1
aattggggtttttttttttattttctttggaaaaaaacagatgctggaagctggttactccgtcggcggaggaaagaaggcattcagaaaaaaaatttatgggggccatgagatgacccttaaacaggtcgtagtactacctttctaagttctcaaggcacacgcggggacacgtgtacacatagaaa

SEQ ID NO: 39946 - DNA, 143 bp, Oryza sativa
  Clone ID: PAT_MRT4530_43436C.1
attgctcgaagaacaagagcgaggaaactcatttgtaatcgcaacagagcattcttcgtcccgttgcgttcaaatacgacagtggacagcaaaggctcggttgggtgtccaccgttagacctagcaaaagcgcttagacatat

SEQ ID NO: 39947 - DNA, 375 bp, Oryza sativa
  Clone ID: PAT_MRT4530_43437C.1
attaagagctgcaagaatttttttcagtgggcatgcgaggtcagaacaggcaatatgaaccataaatccaataattggaaacgaaccactctctataccttgcggtcgagctgctccaataactcccatacaacaaatttaccatatcaggagggatgaaccatgtacacaaatatcgcccttaaaaaaggaaccactgctaacacgtgacaggctcacatttcacagatcaccgacaccaagccttgggcatgggcgaactaccagcatgggtactaaatggtaaggaccatgtccaaacggctctgttggatggaaaaaccacgcacttcgaaccttagctggggaaacccacccgactaaataaggtccaat

SEQ ID NO: 39948 - DNA, 1341 bp, Oryza sativa
  Clone ID: PAT_MRT4530_43438C.1
tcgaaactagaaatctctagccaagggctcaattaatgaattatgggtttccttcaaagctccgacctcgcctcctccctccgcctgctcgccgacatgcaggccgccgggctgcgccccagcggcgcggcgtacgcgcgcctcatccgggcgctcgcccgcgccggccggacgctcgaggccgaggcgctcctcctcgagatgcgccgcctcgggctccgcccggacgccgcgcactacaacgccctcctcgaggggctcctctccacggcgcacctccgcctcgccgaccgcctcctcctccagatggccgacgacggcgtcgcgcggaaccggcgcacgtacatgctgctgctgaacgcgtacgcccgggccggccgcctcgaggactcgtggtgggttctcggcgagatgaagcgccggggtattcggcttgacaccgccgggtacagcacgctggtgcggctgtacagggacaatggcatgtggaagaaggccaccgacctcatcatggagatgcaggagctcggggtggagctcgatgtcaagatttacaacgggttgatcgatacattcggcaagtatgggcagttagcggatgcacgcaaggtgttcgacaaaatgtgcgcagaaggggtcaagcctgatattactacatggaattctttgattcggtggcattgtcgtgtggggaatacgaaacgtgctctgcgattcttcgctgcaatgcaggaggaaggaatgtatccggatcctaaaatctttgttacaatcatcagcaggttgggggaacaggggaagtgggacgaaattaagaagctgtttcatggcatgaggaatcgagggctcaaggagagtggtgcagtgtatgcagttttggttgacatttatggacaatacggccattttcgtgatgcccatgactgtgtagctgctctcaaagctgagaatctgcagctttcacctagcatcttttgtgtcttggccaatgcatatgctcaacagggtttgtgtgaacaaactgtaaatgttcttcaattgatggaggcagaaggaattgagccaaatcttgttatgctgaatttgctaataaatgcttttggtactgctggaaggcatttggaggcacttgctgtactccagcatatcaaggatagcggtatgagcccagatgttgtgacttacacaacacttatgaaggctttcatgagagcaaagaaatttgaaaaggtgtcagaagtatataaggagatggagggtgctggttgtactcctgatagaaaagctagagaaatgctgaatgacgcctctattgtactggaacaaaggggaatgttacat

SEQ ID NO: 39949 - DNA, 354 bp, Oryza sativa
  unsure (1)..(354): unsure at all n locations
  Clone ID: PAT_MRT4530_43439C.1
tttgctctccttgctattgctgcatgcagcgcctctgcgcagnnngatgttttaggtcaaagttataggcaatatcagctgcagtcccctgtcctgctacagcaactttttcttaacccatgtggtgagttccnaangcatctttatggcatatcttcaacccccttcttgcaatcaacttcctttcaactganaaacaaccaattcttncaacacctctctctttttgctcaaccatctcactttcangacattaacatntgtcaanccatancgcancatctacaactccaacantttngngatctcttctttgatcggaatcttgctcaaactcaaactcngttggctttt

SEQ ID NO: 39950 - DNA, 206 bp, Oryza sativa
  unsure (1)..(206): unsure at all n locations
  Clone ID: PAT_MRT4530_4343C.1
gtgggaggggattaaaattgtgatgtgtgatgctgtaaaggcactggcgtgccaatgcacaatgatgaggaacaccaacgtgctgtgttgtggtgaattggaaatgcaaggaaaatgggtgtgaccacaacccagtgtttggagcttgtaatgcaaganacacaatcaagaacanaacagctttgtcagtctgaaaaaaaaaaaaa

SEQ ID NO: 39951 - DNA, 473 bp, Oryza sativa
  Clone ID: PAT_MRT4530_43440C.1
acccctgaaagcttattttagaaatgattcttttcacggcgtcaacataattagcgccatggtcgatatcaatatcgccagagtcaatggcgccgtcctcctaccgacgtggcggggcggtgctgaggagcacacaagaatcaatcatagaaaaaataaattcaaatgaaagaaatatgtggcctgtggaattttctaaaactctaccgaaaagcttctcacctcgaaaacacaatcttacaagcggaatttggaggttttaatttcgccgaacccggcagagtaggggagaatcggatgtaacttttttctgtagatgttcgtggatatattatttgcctgattccgaaggaagagggaggggctgcgcgcggtgtgcttcctccgcctccgcccctcccatccaccggatctgggatgggagggaaggaagaggagggaaccggagggagagggaggggcctcctccactg

SEQ ID NO: 39952 - DNA, 1284 bp, Oryza sativa
  Clone ID: PAT_MRT4530_43441C.1
tcacccagtgttgagtcttttagctcccacacttgaaacattgtggggcatcaccatctttcttctcaagaacaaggcatagaggagttcattccatgcatcagggacaccaggcaggcaccagtggctgcaatcctgcctgtgatgagatgcaggccctgaaggactcaggtacaccgagaggtgcccgtctttacgcagagctgtcatctgagtcacattcagtatatccagcccgacaagcttggtcgtgatgctgttccccagtacatgatttatgggttcaagcaggtcagcccacggttccagcgatttaattggagttacatctggtagagtttccaagtggcaggtccctccagtcttccagtcaccacctctgtaagaaatatctaatctgaaatgcacaggagcatatgtacggaagatgatctgggtcttgtttgtgttaacttcattgcgaagccaatgaaacaatgtctgcatggatctttggtaagcatctctaacagtcatctccattttgacctcgttgccttcttggaaataggcgccacctttgattgttttctcatggttccaccagtgccccgtgttaaagatcaaaagatcagcatccttccacttaccccggccagacatccaatccatggcatctactctaattgtatattttacgactgcaggggctccagctggtgcacgaccttgaaggactatgaaaggagacctgtaatactccacagtgcaattgtactctctaaacttgaaaattaagaaacccatgtgttttgtaataggattcccattaacttcaaagatggagctcttgtcaggaacagcagcagcgagcatacaaagcagagactcccattggtttcttgcaatcgaatccccaacaaatacaactcttctgtttctgagtttctctagcatatttctggcattaaatctggggagatcgcagcgggaggggcgccatcgccacttggtgtaggagtcgtcggggcggccgttctcggagcagcggaagccgacgtcgaggaaggggcaatccctggaggcgtagagcgggtagccgtcgtcccacacccactccccgtcgaacaggtcgcactcctcgcctccgccgcctccgccggcgccgccgccgcggggctcctcgatggagaccccgccgctgaggagcttcttgggcgccgccagcgccgagccgacggcggccgagcagcggagcgaggcggcgcacacgagcaggagcagcgcggcggcggcggccagcat

SEQ ID NO: 39953 - DNA, 495 bp, Oryza sativa
  Clone ID: PAT_MRT4530_43442C.1
atggcggcccgcccggcgctcgctcgcctcgacgtctcgacggtggccgccggcgccggcaagcagcagcttgtgcacgctcgccgccgccgccgcccggctcacgctcaccgcctccccgtccctggcgccggcagcgcgattcgtctagcctgttcttctccattcctgggcggcagcaacggtagccgcagtctcaagcacaacgcggccgcgggcgagaagtccgccgccgaccacgccgccggagccctagaagacgagctgatccagaaggagaactccggcggcgacgctgccgccggtgcctctcctccgtcatcctgcgacaaccacggtgctccacagcaaatagaggtgacggctgatactaacgacggtgataaggagaagacgaatggtccggcacgagatgtacacatcaaagctaaactattagggtacaatctggagccaggaagcggcccacattacaaccatttaggccctgtttaa

SEQ ID NO: 39954 - DNA, 1748 bp, Oryza sativa
  unsure (1)..(1748): unsure at all n locations
  Clone ID: PAT_MRT4530_43443C.1
cagtgtgatgacccttgaatcccttggggtttcagcaactgcagcctgtcaactagtgcagcaaaagcaggggggaaaagcacaaagtaaagctgcagttcatcagccaaggaagggattaggcaaagctgttaccagcacgtccgttgtaactgacgagaacaatcgncaattaggcgaatgattgttagtgcttttcgcaaaagacaatgagcctggagaacaggtggacatagcaggtgggagtggcattgggtacggtagtagaatgatagtatgaagcttcacttttagatacttaaataaatggggcggcgggagtcggcacgtgggtgggccagtacttgtcgccagtttgttgtgggcgtgttctcatcaaaataaacccatacagctcatctggaaaggcatgtactatccacagaagacttggttttcatcatatattatacctgtatatacaagggcatctctctttatgtactcattctgattgtttaacacaaggctgagaaaatttgatacacttggaccttgcatttcaatctcatcaatcccatgcacatcctctcagaatttgagcaagaccgtcgcgttgctcgtcagtaagctgcttcgggaacgcgatctcaaacttcacccttagatcaccccgtgctcctttctgatcggcaattggcatcccttcccctttgatgatcttctcatatcctgggcagatgatctcatcctgaaatgagcagctcaccttcttgccactcaggagcctgaatgagaaggaccagccggtgagcgcgctcaccaatggcacctcggctttcagcaccaggtcgttgcctaccctcttgaagacagggtgtttcttctccgatatgacgaagacggcatcggccggtaggcaccctggcctctcatcccccatgccttcaaatgtgatcttgttccctttcttccaccctggtttcaccagcaccatctggctcacctccttcttgactattgacctgtccaagattgtaaatccattgaaggtgattagtccagcaacaccgttcttggtgacgacgtcgcgggtgaacttgacctccttcttgcagccgtggcagagctcctcgagggtgcagtcgagcttgcgctccagcggcggcgccttgcgcatgattgagctggagaactcggcgaacgcgcgccgcccgccggagttgccggagctgtacaccttcttgaactccctcgccggcgtgccgggcgccatcctcgcgccgaagtcgtcgctgcgcgtcctcgcgatgtgtgcccctccgccgccgaccacgccgcacgccatggccttctcgcccgcgcggccgtcgttgcagcacaccccgaacaccgccctgttctcctgctggtcaaggagcgcctcgtaggcctcggtgatggccttgaagcgggcctcggcctcgggcttggaggacggcgggtgcttgtcggggtgccatttcttgacgaggctcttgtaggcggcgcggatttcctgcggcgaggtctccctggggatgttgaggatgcggtggtacagctcgggagggttccccattggagagggaagagaagacacggtggatggatggatcggtggtggtcgcggaggaggaagaagaagaagaagaagaagaagagcaagggaggggagcgaaatgaggagtttgttacggagggaggtggttaagcggcagaggagaaacacagcgagtgtgccctcgtgc

SEQ ID NO: 39955 - DNA, 1031 bp, Oryza sativa
  unsure (1)..(1031): unsure at all n locations
  Clone ID: PAT_MRT4530_43444C.1
ccggccgggagaggaaaagagagcgcgatatgggggaggaatcgccggcggccggcggtggcgcggcggcggcggcggccggaaaaccatcgggcacggcgcttccgaggagggggaaatcctgcaagggctgcctctactactcgtccatgctcagatcccgcggattcaaccccgtctgcgtggggatcccgcgctccatcccccaagtcccaagctacgtggtggacgagcccagagaagaggcggcggcgcaggggcatgatttgaggcagttcaagtacgcctgcgctggttactccatgtttgtggtggataacaaagacggccgaagcggcgagaaggagggcaagacgttgttgccatattgccaggggcttgagctattggtggacagcagattggttgagaagaaatcaccaaataatgagcctgctactgcctcttatagaaaggaagcggccaccagctctcggcaacaaggacaaagacccgggcaacttacaggacaggatttctatgcgaggtttaggaaaagcgcgggattggtcgcttcaggcgttgcaaagaatctaaacaagacagctatttacatcaaggaaaacgtcgcagacatactttacccggaccgtcgaccacctaaataggaactatgctgcttgcccgtcgttgttcagttggagatctgaagaaaattgctaccgacatgagatacagaagactacctgacgccatatccttacaaattacaataaccacatccctattgaggagtggcccgagccacattgagcaaaattggacggtttcttggatgctcttaattctttccattgtacttgcatcgtttttgtaatgttatggccagatacaaactaatgttgtacatgcgacagccttcctgcttcattgaagcaaaaatgggatctggtcggtgaaatgttgaatgataaaaaatgttaactccttgagggcaaaagtgttgatagatataagtagaagagtgctatcctctanaattgtataagatt

SEQ ID NO: 39956 - DNA, 807 bp, Oryza sativa
  Clone ID: PAT_MRT4530_43445C.1
atggcgaaccaccgagctgtgatcgcggccgtcctcgttttctgcttgtgcttcgttcaggtggcccggtgcgatgtggtcgccgccgccgtttctccgtcgtcgccggagcaggcgcaagagcttcagatgctgagagccaaagtcgcgtcgttagaggatgagatcagtgggaggaaggaggagaccttgcagctggagaatgttgtcagggagaagtcagcacagattgcggcattggtgagcgagctagaagttctgcaggtgcctaatgttgctgacgatgaatcagtgctgaaggcaaacgcccataatgagatgcttgagaaacaggttctgaggctgggtagtgatttagaggaccaagttaagaaaggggaatcactagaagcccgcgctagtgaagcagagaaaagtttgcttgagcttactcagaagttggaccatgctgaaaagataaatatggagcagaagaaaaaaattgaggagcttaaccatagtcttcggcaagtccaggataaactttttgaagtggagagggaagcaaagttgaaggcggaagagttgatgaagatccgtcctcctttactgtactctgtacatctggcaaaggacttggcttctgacaaatggcagctccatgggaagcctgtgcttgatgctctggcgcagaagatttctgagaaccttgcacatgctcaaacattagtggagccgcacatgcaaacaacacagaatataggtttccgaattatctcttctatagacttgttaggagtaaaaaatgatgtacatcctatagactga

SEQ ID NO: 39957 - DNA, 151 bp, Oryza sativa
  Clone ID: PAT_MRT4530_43446C.1
gttgtgtaagcgagtaacacacacgatctagagaagggggttcatgaggcgaccgtacggtcacccattagcgagtccgtcgatgcacgagtagggactgctggcccggttgtatacatgcatgtggttgacacgaacatcatcctagttg

SEQ ID NO: 39958 - DNA, 671 bp, Oryza sativa
  Clone ID: PAT_MRT4530_43447C.1
tggaaacctaagaattgagttactaaaaagattcaaaccagcaatggagaagcctgctaaatttccatcaaaacatggtcctctctagtacaaaacgttatgatcaatattaatggctgcgatataagatagggtcctctctgcaaaagtgtcgtcagggtggttccacgcaacagactgggcttcacttgaccaggtggtgggtttggacactggacttgaatattctttcttgtaaagttaattctaaatctagtgttttggtttctccttcgacttctttggatattagtactccatcaaattctactactctttctactattaatatcatgtcggatgatcaacttgagcaattcaaggaggaggacttggctttggctattaacaagttgtctcgagctatgaacaatgtcaggtttagaaaaagcagaggttgagttcattgctttgagtatagagagcttgatcacatccattcgtactgacccaagcttgggagagccaagaaataagacaatagagacaaattcaatgatgataagcctaaaagtacgtacaaaggaagaaggtccaagcaaactcttaagaaggtgttgaatcaagtgtatgctgtttttgagccatcaaatgatgtagaccacactccaatcacaatgagaagatgattg

SEQ ID NO: 39959 - DNA, 374 bp, Oryza sativa
  Clone ID: PAT_MRT4530_43448C.1
gagaactgcaataatgtggattcatttgatcacagctaccagcatatcaaaatcgcgagccaaagccatgtcaaagatcgattgagttgttctccaggaaggatcaatagagcacaattcaggaaggatcttcctcaaaaaatcaggaaggatcaatgttaatgttccttctcctcacagggaaacagaagatctcctattcttcatcgatcctagttactatgagcttcatcagctcaagactgtttcttcttggaaccacctgagcaggagtggaaccagctcgctctcgctgccccttgactagatacacttatgctactgacctcctccttctcgttcttcttgttgttgcgacagccgttgcagatttg

SEQ ID NO: 39960 - DNA, 825 bp, Oryza sativa
  Clone ID: PAT_MRT4530_43449C.1
atggcgacctcgacggcggcgcccaggcacagctgcgcgaagctctcggtggcggtggaggaccccaaggcgggcggcggcggagccgtcttcgtgaaggccacgtggcaccccacgcgcttctccctcgccgtcaccgacggcggcgccgcgtgggtcgcccaggcctccgacgccgaggtgcgcctccgcgccgagcagtgggaccagcccgtcgccgactacctcgccctcgccgagcgctacctcgccttccagcagccctcctccacctactccttccacgacgccgccaacggcaatcgaaggctgtcatggacatttgagaaacaaggcaccaagttagaatggcgatggaaactgcagcctgcacctaacactcagcagactatagctgagatcttggattttcttatggatgcaaatatacgcttgagcgaagaggttgttaggaaaacacaatcctttgacaagttgaaacaagaatctgagaagtgcttgcaacaaagtgaaagatttaacattgagaaagctgagttcgaacaatccacattttcaaagtttgtggctgtcttaaattcgaagaaagccaagctcagacaactcaaggacaaactcacagaatttgaatctgctgacaaggctccaaaggaggaggatgagaactccactgataagacagagctttttgaggaagcaagtgacaaagatgcaagcgttaatgatgaaccctctgagactggtggcggcgatcttcatagctctcctgagaaaactgcagccacctccagaggggggaggggtcgcaagaggactagaaaatag

SEQ ID NO: 39961 - DNA, 1959 bp, Oryza sativa
  Clone ID: PAT_MRT4530_4344C.1
atggccgccggcggcgaggacgaccgcctgtccgacctccccgacgacctcctccgccgcatcctccacttcgtccccttcagggaggccgcgtcgaccagcctgctctcccggcggtggggctcgctctggcgttcctccggcgccgtcaacctcgtcgaacacgtcgaggacgaggaggaggaggacgtcaacctcgtcgaacacgtcgaggatgaggaggacttcgacttaggcgacgaggaggacgacgacgaggtcacggcggaggaaccttcggcccgccgccgcgacgccttcctccgcgccgccggcgcggcgctcacggccgccgacggcgacatctcatgcgaccacgtcacgaggctgagcgtcgacgtggacggccccgacggctactgtatcacgaatttcctggactgcgacgagtcggcggcggcgtacgacatcttcacgggcatggacgtgctccacaccgtggtctcccacccggcggcgcgcctcgtcgaagagctctgcctccgcgtcgcctccgagtccgacagctatggcgtccaccgccgccgccgcgacaaggaggaggagcccagtaccgacttaggtgtctacggcctcagcctcgcattcctgccgttcgagaagctccgcgtgctggacatcgccgggtgcaacaacctctccctgccgccaccgcccgccgccgccgccgccgccgcggcgttcccgcggctgcagacgctgcggctgcggcggtgcgccgcgaaggtgacgcacctgcagcgcctcatcgacgccgcgccggggctcgccaccgcgcacctcgagtccgtcgtcttcaacaccgacgacaacaacgacaaccagagctacaaccaccgcgacaccggcgcgtgcagcagcatcagcctccgctgcccggcggcgacctcgctcgcgctggaatggtgcggctctactgactacaagttctactacgcacacagcagatacagcgacgacgacgacagctgcggcggcagcatcgccatcgacgcgccgaagctgcgctccttcaggtacaaaggcctcccccggccattccacctcaagtcgccggcgccggagacgacgacgacgacgacggcggtgagcctccacttcaactccgactattatctcaaggaagacacagcacgtgtccactcctggcgtttcatcggcaacttcaccaacgccaagacgctcaagctgaaagtggataacctcgatcatctcgccgtcgccgacaaggcgagccgatcgaagctcctctgcgtgctgccgaacctcgtctccgtcgaacttgaagcggcgcagctgatgaacaccaagatgaacaccaagaaatcggcggtggcgatcgccaatctcctccgttgctgcccggttctcagtgagttcaccatgaagctcaactccgccacaacgtgcactgatagatattggccaaaccaccgtggcagattccagccagatttctacgattccgttgatcacttcatgcgccgcaaatcgaacacgacgacggcgatttcctcgatcgatagtagaaaaggagatggtgatcgccatgtcgatgaggtccctgatatccctgcattgagccgacgatcgttcacctgcttgcagagaagtctgaaaaaagttagcctgaagtttaagtggagcggggacgattgctttggagtccagcttgtcaaattcttcgctcaaaatgcaatggttcttgaagaaatgcggatcgacagtggcgacagaaaactgtgcgaccatatgaatctgaatgttgaaagatgggttggggctgattccaccaaaatttctctgaaacgcaagaattttgcgaatagtacatgggagttttcgagaacttgtccagattcgacaccggagcttgagacgagtacaacaagctttatagtcttaccccttgaaaggtga

SEQ ID NO: 39962 - DNA, 575 bp, Oryza sativa
  Clone ID: PAT_MRT4530_43450C.1
gttggaagaagatgcacaactgacattgatctactgaatcaggaaatgtgcgctcacacagagggtcttagctcaccaaaactcaagacgttcttttgcgagttataaggtagtgtgcaccaaaaagacctagccgcccaaaatgtaacgtgcaacatgttaaaaaaaagcgccctaacttaaatgatgccaatttggttggccacattaaaagcattatagcctggagagagcttcacataagccttcttctagaccccaggcctgatcataacgcaaacagtttttgcctggatgtgatacatcttcttgacagaagcctcgctctttttaaggggaggctggaggtctaggattaagacaacggggttgtcgtcttcaatcttatccagggcagagttcagacgcaaggagattcttgaggaaaacgcccttttcatgctgggaaagggcatgtgctttagactcttgagtcctccagggatacttgagatcttgcaggacaccaggaattagggtgttacccaaaaaaagaactccaggggctccctttttgccgcacaaactggcttcct

SEQ ID NO: 39963 - DNA, 2132 bp, Oryza sativa
  Clone ID: PAT_MRT4530_43451C.1
ccggccgggaggtccctcaccctcccccgcgccgaccccccgccgctgccgccgccgccgctaaaaccctaaaacctgcaaccctagccatggcggcgagcagcgccgatctcgccgacgacggcttcccggcgccgcgcctcttctcgcagggcgtctcctacacctacgacgacgtcatcttcctcccgggctacatcgggttcccggccgacgccgtggacctctccacccgcctctcccgccgcatccccctctccatcccctgcgtggcctcccccatggacaccgtctccgaggccgccatggccgccgccatggcatccctcggcgccgccgccgtcgtccactgcaacaccgagccccacctccaggcctccatcgtccgcgccgccaagtcccgccgcctcccgttcgtctcctccgtccccttattctcccccgcctccaccccatccctctccgacttcgctggccacgactacggcctggtcacggagcgcggcgattcgctctccaagctcgtcggcgtcgctgttgcagccgagacctcctctcgtcaggctcccctccctgtgtccgagtacatgcggcccgccccgcgatcggtgtgcgaatcgttttatttcgaggtaggcggccgcggaactctatctaccagattgatatgatcaagtatgcaaagaagatgtacccggaagtggacttgattggaggtaatgtggtgacgattgcgcaggcacagaatttagttgcttctggggtggatggattgcgtgttgggatgggctctggctcaatttgcactacccaggaggtttgtgccgtgggccgaggacaggctacagcagtgtataaggttgcatcttatgccaaagatcacaatgtgccagtcattgcggatggtggaatttcaaactctggacatattgtgaaggctttgtctctgggggcatccactgttatgatgggtagcttcttggctggcagccatgaagctcctggtacttacgagtacaaggatggccaccgtgttaaaaaataccgaggcatgggctctctcgaagcaatggacaaaggggatgtgaccgccaggtacctaggcgatacccttcaatgctttaaagttcgtccccagggagttgttggagcagttgctgataaagggtctgtgctgcaggttcattcctttatactaatgcaagctgttaaacagtcttttatgtattcctaaaaaagtttatgggggtggtccaaagtgaaagaaaggctacagcagtgtataaggttgcatcttatgccaaagatcacaatgtgccagtcattgcggatggtggaatttcaaactctggacatattgtgaaggctttgtctctgggggcatccactgttatgatgggtagcttcttggctggcagccatgaagctcctggtacttacgagtacaaggatggccaccgtgttaaaaaataccgaggcatgggctctctcgaagcaatgacaaaggggagtgacgccaggtacctaggcgataccctcaagcttaaagtcgcccagggagttgttggagcagttgctgataaaggttctgtgctgaggttcattccttatacaatgcaagctgttaagcaagggttccaagatcttggtgcgtcatctttgcagtcagctcatgagctgctgcgatcggagactatcaaattagaggtgaggactggcgccgcgcaagttgaaggggggatacatgggctagtgtcgtacgagaagaaggcattctagttccagatttaatcaagcatcaggacaaagcggctattgcatcctaaggaaacaactgttccctatctttacctgatcaatgattttcaagaacagctcgtctgcttgatgaacctggcatgctgtttcatcggtcggtagcatcaccatccgtttaccatcgcaacgacatgatcgattgtgctttaacttcagttttgctagaggggaagctatcccatgatttgcctcaaccggttgatgctgatgtactttgcctttttgtgcaaacttccaaccgcaaactcatcctgttgtagcgaattcggcttatgtttttttttcatgaataagaataaataagtttggtttgt

SEQ ID NO: 39964 - DNA, 226 bp, Oryza sativa
  Clone ID: PAT_MRT4530_43452C.1
gttcgacctggtgttcctggtgggcatcctggtgaccgtgttcctgtcgaacgacgccaccgccgtggtgctgacgccggcggtgtacgcggcggccaaggccgccggggcgcggccgctgccgtatctgttcatctgcgccttcatcgccaacgccgccagcttcgtgctgccgatctccaaccccgccaacctggtggtctacggcagccagatgccgccgctg

SEQ ID NO: 39965 - DNA, 419 bp, Oryza sativa
  Clone ID: PAT_MRT4530_43453C.1
ttcctgttttgctgcacttggcttgtgctctgttatgatttctttgcgacgatgggcaggcacagcttgcctggggcaacgagggaggtggtctgggtgtgcactaccatcgtcagagaccgatgtggaagcgcacaaatacaatgcggagaacaattacatggacttgatcacggacaccggcatcctgggcaccaaagggaggccgacccagatcaccttcacccagcctacctacaggcagacctacttctgcttggctacctgccgttgcatgctacctgtcggctcatcggagactttctggcgagcaccataggactgccggttctgccttctcagagcactacgagcgcctacattaataagggagcgaacatgcttatcactgcagccgcctgcagggacgccaactaatt

SEQ ID NO: 39966 - DNA, 406 bp, Oryza sativa
  Clone ID: PAT_MRT4530_43454C.1
gaccgtcgatccgatgaggcagatgatccgacggctctcccgcgtcggcgactgctcgtcgccctcctcgccgccgccattctcgccggcgccacgccgcggaggcggcggaggtgggagcagcgggaagaggtcgtcgtcggcggcggcggcgcacgagggggtacccgaggggcacgtgccggtgtacgtggtcggggagggggatggcggcgaggcggcggcggcggagcggttcgtcgtgcgcgccgagctgctcgggcggccggcgctggccgagctcctccgccgcgccgcgcaggagtacggctacgaccaccacggcccgctccgcatcccctgccgcgccgacgtcttccgcgccgcgctcgccgccgccggcgacgaggacgacgacagcgagtag

SEQ ID NO: 39967 - DNA, 484 bp, Oryza sativa
  Clone ID: PAT_MRT4530_43455C.1
ttaagggtaatttgggtatttgtattttccttttgttttagtctcgtattgctccgaccatctcgccgcatccatccgccgtccgttcctgtacagcccgattccggtggtggcacccatttcgattagccggcgttcatcctgccgccgccgttttatctcgccgtcggtgacctcgattatcctgccatcctccgcccctggtattcccgccgtcgctgatctctgtctagccaccacggccgtgccaactgactccttgctggcgaccacgcgcatctgcgccgatctcctccctatcgaccacggccacgccgatttcttctgccctgacgaccgcgtccacatccgcgttgacctcctcctccaacttacatatcgggatgacgcagggcaggaagcttccccgtctctgacgtgcatcagctaccgccccggctcgtactcccaccgagaacctcgtcaacgccatgcagttcgccat

SEQ ID NO: 39968 - DNA, 1029 bp, Oryza sativa
  Clone ID: PAT_MRT4530_43456C.1
ccattcgtttggctaggttagaggccagagaggggtgaggcacagtcgctttgcttcgctcctcctcgccgccggcatcccgctcgtcctcgactccgactcctcgtgcgcatcggggcggaagggagcggcggcgcgaatcgacggaaggagacagttcccctttctcatccacctcgcctcgagcctgtgaagctgattccccaaagtgatagccgcatggtttttccattggtactaccaacaattgacgagaatccatctgcggatctgcccctatgccattgcagcaccgtctcttgccgcgcgattagccatcccgcaaggccgtgacgcagccacccctgcatcgggagtcggggcgctcccatcttcctgtcgtgggtaacacccacagagcagctgtatgcacggatgactgaccggcaagccatggctatgggcagcagcgacggtgacgtgctgtatgcccgatgcctcgtctcgctcccccggctccgcccgctcaatgtgttcgcgctctggttcatgtcggcgccatacgggaagctgtcccgcccggggtggggtcccacggtgccggcggcgctcgcctggtgcctcatggagagccccaccctctggctcccaccccttgtcctctccaccaccaccacctccttgtcgaccccgacactgcgcgtcaccatcctcccggcggcgctgtacatgctccactacgtgcaccgcacgctcgtccacccaatccggcttctccgcttgcgccgtgccccggtgcccatgccgatcctcatcatcatgtttggcttcggcttcaacctcctcaacgcctacatccaggcacgctcctgggcgctcgatgctgtgcctccagccaccgccgcgccactcactgtcgcccgctgtcttgtcgggctggccctcttcgtttgggggatgtggaccaacatcgcagcagacagggagctgctgaggctcaaggaggctggcaaagggtaccagattcccaaggatgggctgtttgatgtg

SEQ ID NO: 39969 - DNA, 656 bp, Oryza sativa
  Clone ID: PAT_MRT4530_43457C.1
attttgcatcggataacctcacgctcagcaaaggccacactgaaaaggcggcgccgtcttgagctcttgagatgtggagtccggtccaccccctctagcggtgaaagccgcggtgctcgacggaggtaccactgtccggagcccgcgagaaatggagtgcgcgaaggcgagtgcagggggtgccgcgcgaatccgcgtgtgaccggtggaacttggctttaaggccggtgtggccggcggagctgtgcggggccagcggaaggactgtggagtccgccggcgtgagcctctgcgccgtggcgtggttcgacggaaggggccaagccggaggcaaaacgcgccacacggggccggcgctgggcgtgagtcggcggaggtgtcatgcacatgcatgcagcatgcgcccgtgcatgccacttacactcgcaggatgggaatcaaatgcatgtgcatgcaaccgaaccacacgagggcggaaaccgcttcggtctctatcgacgcggagatggcgactcgcgacaaaggcgaccgtggggccggcttgcccgcgcggaggtggcgaagccgcgaccgagtcggcggaggcgacggagccacgcgggtccacgggagttggcggagacgcgcgggtgcgcggggccgacggaggtggtgga

SEQ ID NO: 39970 - DNA, 328 bp, Oryza sativa
  Clone ID: PAT_MRT4530_43458C.1
aaaccaagatttaaattattatgattaaagttatgcaactataacttcactaccatacaccattgcttttttcaagtatggtattttgttagtccacgaacaaagccaacccgcatttcattgtttttgggaaaacaataacccccaattccttcctacagccctcctaaattaaattttacaacaaactgggttttatgaagataccctctcttggtacaactggccgccctcaaaaccgtgatatatacttttgacactataaatgtgaaaatggggggccctaaaaattgccagaccacaaatttggccggggtcctttttaaac

SEQ ID NO: 39971 - DNA, 659 bp, Oryza sativa
  Clone ID: PAT_MRT4530_43459C.1
aacgtgaaaaggtatagggctgacgcaatcatccagtaagaatcctattcgttgtccatattttggcatctgtgaatgtgatgtgggcacatacattgcgtgaataagtgcattgcacgtgcacgattactagtatatcaaatcgagagtagacaatcaaaacccatctctgttttggtgtgctcacatggagctgccgcgtcctcgtcccgtggcccccatccccccggccacgcccgctcccgcgcgtccgcctgcaggggcccgacccccgcgagcgcgccgctcccgccttcgtgccgcatcctggccccgggcttccagaattgcgggggttgcgccatggtcgaggcaggccagcttcgtcctgctcctcgtgggcctcttccgctcttccccccggttgggcccgcctcctatgcacactctgctgaatgtggggttgaggaattgatgatgacagctcaagggactgtggaggattccacgttgccataggtgtaaagttagatggcttttgagtaatagtgaagaaattgggccaaatgatttggttcgcagaatttatctgggcatatgtcattgcgctccgccttatattgagctaggaggacttcatattcactgcagcttgatttggaaaaaaaaaaaaaaaaaaa

SEQ ID NO: 39972 - DNA, 1104 bp, Oryza sativa
  Clone ID: PAT_MRT4530_4345C.1
atggcagaggatttgcttcctagttcccaactcccaagtggccaacacgaaacatctttgaaggagaacttcagaaaaactccccgcgtcgctctcgcgcgggcggctcggggggccaaaaaccctagccgcccacgcctccactccttccccctcacctcgccgctgccggagctcgccggcggcgtggacggcccgagcgcggaggcggcgggcgcctggggcagcgtggtgcggctagcccgggcgcggaggcggcgggcaggcgcagcctgcccagcgcggcagcagcggtgcggcggcttcgcgacggccgctcggcccggcaacccaagacgcggcgacgtctcctgggatgcgcgggacggcgcgagggccgcgcgtaggcggcggcaacggcgcgttggccatgcggaggtggcgggttggaggcgcgaccagcgacgctgggcggcctgggtcgccgttggtgggcggcgaggtggcggcggagcattggcttcggcgaggccgccgttgggcttggcggcggtgtggagcgcgctggcggcggggtcgtctttcccgtggttggccaggcggtcgctgtgttcgaagagctcctccccttctttgtggggagcttctaggcacggtgaaggcgttggccggtctaccagaaagactcaggttgccaaggcgaggttgttcccggtccggtcccataggtcggattcgacgtggaggctgaagggcggcgtggcggaggtggcctgggtcagcgtgctagggcgtggcggcggggtcgtcttccttgttgtcgaccaggctaaccctgtttggcgagctcctcccctctctgcggggagcttcttgacaggctggtggcggtggtcagttgacaaggaaaactcaggttgccgaggcaatgttgttccatgtccggactcccttaagttggattcaacggggaagccggcgggcggcgtggcagaggcggcttgggtcagctacctggcggaggtggttggtgctgtggcagtcttgtcgttggcaagactggaagccggccggcggtggggcgtcggttgggtgtggtggaagccatgtgccgccgatgtttag

SEQ ID NO: 39973 - DNA, 2147 bp, Oryza sativa
  Clone ID: PAT_MRT4530_43460C.1
tcactggctaatggcgccaccttctgacacggcgggcgagtcggacacggacacgccggaggactcgtccatcgactcgtgcgacggcgacgcctccccgcacgcgcggatctcctcgatcatcttcaccacgtacccgatcttcggccgctggtcgggcgccgccgacgcgcagctcagggcgagctgcagcatcgccaccatctcctcctcgatgcccttgtccttcatcagctccaggtcgaacacctccgacgtccactcctccctcaccaccgactgcacccaccgcggcagctccaccaccacgccgccgttgggaagctcgctgcccgggcaccgccccgtcagcagctcgagtagcaccacgccgaacgcgtacacgtcgcccttctgcgacgcccacggccgcggcggcgggggcgcctcgggggcgcggtaccccgccgagcgcgccgcggcggccgccggggacgagcccagctgcgccaggccgcagtccgcgagccgccccacgccggctttgtcgagcagtatgttcgtgctcttgatgttgccgtgcgccagcctcggcgtcccgctgccccggcggctcgcgtggtggatgtatgctaggccgcgcgcggcggcggaggcgatgcgcatccgcgccgcccagtccagcggcgtgcgcccagggccacggttaccgtgcaggagggagaagaggctgccgttgggcatgaactcgtagacgagcagcttctcgtcgcgggcgtagtagtaggcgttgagtggcacgatgttcgggtgacggagacggccaagcacggccatgtggtgctcgaaatccttcttggacgccgccgccgccgtggcgtcgcgcagccgcttgacggccacgacgctgccgtcgccaagcacggccttgtacgccgtgccgcacccgcccttgccgagcatctctgctgatgcgcgcagcaggtcgtcgagctcaaaccgcttcccgccgccgctgctgacgtcctccagaaacaccattttcccccgctcaaacgtgccgccagctgcagtgaccactccggtggcgccataggggctggaggagtacacgatcttctccccttcccggagacgcctggcgcttcgccggccggagaggcgtggccagaagtagcagaacagcagcccggccacgagcccgaccacggcgaagtccccggccacaattgccaccacggccgcgcagctcatctttcccttgccgctggttgccgcgcccgctggcttcgctgacggcgacgacgccaccatggccgcagccggtgggcacggcggcgtcgcggacgcgttgacagccgccgacgcgttcggctgctgcgcctcgtccttgcacggcggcagcggcgcgctgcagagaccagcattcccgccgaacgccccaaccggaaacttggccatcgccaccggaatcctccccgtcaaaagattgttggagacattgaagtcttgcagcacagggagcgcaatgccgtcaatcccgccgctgagccggttggagtccagccgcagcgtgagcaacctgtcgagccggttgagctccggtggcacgacgccggacaagttgttgaacgacaggtcgaggcgatacagccggtacagcgccccaatcgacggcggtatcgggccggacagcgagttgccggcgaggaacagcagcttgagccccgcgagcggcgagaggtcgggaatggcgccggtgaggccgttccccttgagactaagcacgcggaggccgtcaagcctcgcgagcgccgggagcgcggcgtcgccggacaggccgaaaccctcgagcaccagcctcgtcacccgcccacccgcgcagctgacaccccgccacgtcccgcacggcgctgggttggctgccaggtcccagctcgccagcgcgcctgaccggtcggcggccagccggaagtccgacagcgccgcgacgtcggcgtccagcgagccgccgccgccgccgtcggcataacacacgaagcatcgaagcagcagtgccgacaagaagagcggcagcagaatggcgctggcgccgccgccgctgttgcgaggcatgctgctccctatgcgtttcttttgttcgagcttgacctcgcgtttggcttgtg

SEQ ID NO: 39974 - DNA, 493 bp, Oryza sativa
  Clone ID: PAT_MRT4530_43461C.1
cacgccagctttgtcgagcagtatgttcgtgctcttgatgttgccgtgcaccagccttggcgtcccgctgcctcggcgactcgcgtggtggatgtatgctaggccatgcgcggcggcggaggcgatgcgcatccacgccgcccagtccagcggtcctcccaccatggttgcctgcaatggaatgtctcagcaacaggtgttcgacgagcagcttctcgtcgcgggcgtagtagtaggcgtggaaattttctggctccgccattggcatgatgttcgggtgatggagacggccaagcacggccatgtggtgcccgaaatccttcttggacgccgcttccgccgccgtggcattgcgcagtcgcttgatggccacgacgctgccgttgctgccgccgctccagcccgtgcttctcgcggctgggcgaaggagagaaaagaaaaagagaaagaaagagagaagggaggaagaggggaggaagaagagagacaatga

SEQ ID NO: 39975 - DNA, 324 bp, Oryza sativa
  Clone ID: PAT_MRT4530_43462C.1
atttctttgttttagtccacgagtccaaattcttgtatttttcaaccttgtctcatggaataaaaaactaacgtgtatacgatataattatatgaatttaactgggataaaatacaacttgctttcagattatgttagcttgggatagttttgcaaagatgacttgatacacacaatttcagtttcttaatagaatagcacccaaggaaatgttctgtctgtatccaccttttgtacaatttggtgggaatatatcttactaacatttatatttcttattaatttctagggagtttagaacggcgttgaatattgatagatatt

SEQ ID NO: 39976 - DNA, 327 bp, Oryza sativa
  Clone ID: PAT_MRT4530_43463C.1
atggacggttcaaagcctgcctgcgacgatgcgccggccccttggcgggtggatctattgtggccgctcccgcgaagtggtggggagggagcaagccacaccactgtccccgtggcgggcggatctgccaccaccggccccgtggcgggcagttcttccccacggcatggcaattggagtggcgacggcagctgcggccgcgacgacgacaatggctttgggagcggtgatgacgatggtagcttcgactgtagcgacggtggtagtggcttcagctgcagcgacagtagttggaactgcgacgatggtagtggctttgggagctag

SEQ ID NO: 39977 - DNA, 455 bp, Oryza sativa
  unsure (1)..(455): unsure at all n locations
  Clone ID: PAT_MRT4530_43464C.1
ngatcgncgaccctgccaatcgccagtcaagctgtgcccaccagnggattgtcccaatttgtngcgaaagctactatacggcatcatacgcaatgttaaagattgccactgtcctgttgcattggacattggcttaatccatgcttatcacaaggtattgaccatcacaccacacaacagtgtttgtactgtatgaatggtacatncangcgacaatgatcnactcggtaaaaaaaaaaaaccnagggggcggnccctccccntatatcnatncnccggcncntnacactctacnggaaacctttttctctntcctgcncantcccccccncgnttnacnaagccccaccccccccntcccnatacatgcacgtanctacctttnactcctaannntnaccctttntcnntgcancgnaatccnttaaccnattaccncaaggtcattgtccgnc

SEQ ID NO: 39978 - DNA, 1806 bp, Oryza sativa
  Clone ID: PAT_MRT4530_43465C.1
atggcggaggcggcggccggcggcgaggtgcggcggcgaggggggtgctgcggcggcgggggaggcggcggggggttgttcccggaggagtcgttcgcgagctggggcgcgtacgggagggcgctgatggagacggggccgcggctggtggagcggccgacggcgaggtcggcggcggcggtggaggtgaacgaggtgagggggcggagcggcgcggagatgaagaggaacctgacgtggtgggacctcgcctggttcggcgtcggcgccgtcatcggcgccggcatcttcgtgctcacggggcaggaggccagggacgccgccggccccgccgtcgtgctctcctacgccgtctccggcgtctccgccatgctctccgtcttgtgctacaccgagttcgccatcgagatccccgtcgccggtgggtcgttcgcttacctgcgagtggagctgggcgacttcgtggcgttcatcgccgccggcaacatcctcctcgagtactgcatcggcggcgcggcggtggcgcgcgcgtggacgtcctacttcgccaccctcctcaaccaccgccccaacgacttccgcatccacgccgcctccctcgccgccgactactcccgcctcgaccccatcgccgtcgccgtcatcgccgtcgtctgcgccctctccgtcctcagcaccaaggcctcctcccgcttcaactacgccctctccatcgcccacctcgccgtcctcgtcttcatcgtcaccgccggcctctcaagggccaggctctccaacctcaccgccgacttcgcccccttcggcgcccgcggcgtgttcgcggcgtcggcggtgctcttcttcgcgtacgtggggttcgacgccgtcagcaccatggcggaggagacccgggacccggcgagggacatccccgcggggctcgtcggcgccatggcggtcaccacggcggcgtactgcgccctcgccgccacgctctgcctcatgcagccctaccgcgagatcgaccccgacgcgcccttctccgtcgcgttctccgccgccggcatggggtgggcaaggtacgtggtggcgttcggcgcgctcaaggggatgaccaccgtgctgctcgtcagcgccgtcgggcaggcgaggtacctgacgcacatcgcgagggcgcacatggcgccgccgtgcctcgcccgggtgcacccgaggctggggacgccggtgaacgccacggtggccatgctcgccgcgacggcggccatcgcgctgttcaccgacctcggcgtcctcgccaacctcctctccatctccacgctcttcatcttcatgctcgtcgccgtcgcgctgctcgtccgccgctactacgccaccggcgagacggcgcgcggagaccggaacaggctcgccggctgcctcgccgtgatcgtggcgtcgtcggtcgcgacggcggcgtactgggggctgggcggcgacggcggcgggtgggcggcgtacgcggtggccgtgccggcgtggctcgcggcgacgctgttcctgcagctgagggtgccgatggcgaggacgccggagaagtggggggtgccgctggtgccatggctgccgtcggcgtccatcttcatcaacatcttcctcctcggctccatcgacggcaggtcgttcatgcggttcggggtctggacggcggcgctgctcgcctactacttcttcttcggcctgcacgcctcctacgacaccgccaaggcgctcgccgccgaggtcgccgccggcaaggtggaggaaggcggcagcaagccggcggtcggcggcgccgccggcaactga

SEQ ID NO: 39979 - DNA, 5478 bp, Oryza sativa
  Clone ID: PAT_MRT4530_43466C.1
atggatgcctctgataaaacttttgctgatgtagtaaagcttttgacgtcgtggttgccacgtcggtcaaacccagacaatgtctctagggacttctggatgcctgatcacagttgcagagtctgttatgattgtgacacacagttcaccatattcaaccgcaggcatcactgtcggcgttgtggtcgcattttttgtggcaagtgcaccacaaattccatcccagcttcaagtggccctgacagaaatatcgatgaaggggacaaaattcgtgtctgcaacttttgctttaagcaatgggagcaagagagagccgctgctaacaagcagatgatgccattgcttagtccttccttgtctgaggcaagtctgtttagcaccaagtcagctatcaccataaatagtgttagtacaacagctggatcttactctactggacactatcaacatgtggctcgtgcttccagcattagtccacccaaaagttcccaagacaaagtgtgtcatgatatgctagacacccatgtgcctgagaaaagtatgtccgctgtttcaaacaaagatgagacttcttcagttcattttggctattacacaaacaggagtgatgatgaagaagaagagtgttctgcttactgctctgataggcaggtacaacatcaacagcataatgaccattattatggtccagatgagttcgatgagcttgaatcatcctataatccaacaatatctccgacagttgaagaaaatgtaatttctaaagaagtatcctctcatgcgactgaccaaggattccccagcacattgcctgtcacaaaaatggatgatgaacctgatcctgacaatagttctgagtgtggggctgcttcgtccatttatgctcttgaaagtactgatacaaatccattggattttgagaagaatgaacttttttggtttcctcctgaaccagaagatgaagaagatgagatggaagttggattgtttgatgatgacgatgacgatgagcctgtagctgatagtgagcagcgtcgcattcgatcatccagtagctttggtagtggtgaattccgaaacagagatcggtcaagtgaagaacataagaaagtaatgaagaatgttgtcgatgggcatttcagggctttgatttcacaactgttgcaggtggagaatatttcattacacgagggtgatgaaacaggttggttggagattgttacttcagtatcatgggaagctgcaaactttctcagaccagacacaagccaaggtggtggcatggatcctggtggatatgttaagtttacttattatctgaagcctgcatccaattgctttttcagcactgttgtaaaaggagtagtctgtaagaagaatgttgcacataggcgcatgacatccagaatagagaagcctcgtctcctcctactagcaggtgctcttgagtaccagcgagtcacgaatcagctatcaagcattgacacgttgctccagcaggaaacggatcatcttaaaatggcagtcgcgaagattgttgctcaaaagcctaacttgcttttggttgaacatacagtttctcgctatgctcaggatttgctactagaaaagaacatatcactcgttttaaatataaagaggccccttttggatcgaatagctcgttgcacaaatgctcatatcgttccttctattgatctcctaccgtctcagaagcttggtcattgtgagttgttttatgtggacaaatacgttgaacattccgtgaactcaaataatacagcaaagaaaatgccaaagaccatgatgttttttgaaggatgcccaaagccattaggttgcactgttctgctgaagggtggtagcatggatgagctaaagaaaataaagcatgtggtacaatatggcatatttgcagcatatcacctggccttggaaacatctttccttgcagatgaaggtgctaccctaccagaaattccattggaatctccattgactgtagccttgccagatagccggtctactgcagacagctctatttcaacagtgccaggtttcacgtttaatgtttccaacagccggcaaacaactgatggttttgagcaccctgtcgcaggctctattagatcaactgacccaggtggaacagatgttccaccagtgtccaatgaatgcactactcaaactcgaactaccttctctcattcttctggaacttggtctgctaacggcggtagtttgaacagcaagacagttgatagaatagagaaggcaactgcaacttcagctacaacatctggtgtacttatggatcattcatatacatattctactctagagaaaaattggtattctggtgattatcatgagtatggttcaaccatgtcagatgttaagacaatgacgacagttttagccaactcaaatggtagttgtcatcatggcacatctgaggccagcaccaacatcactaattttgctaatctaaaggagccttttgatggttcaattgatttggctaatgtggaaaatgtcacaaacagcaatgtggtgatggtgcaaccagtgcctagtactgctgtacaaaatcaagaaactaatcaaggacatgagagcacatcaaataaggaagaaattatggcttctgatcatcagagcatcttagtcgcattatccatacgatgtgtctggaaaggaactatttgtgagcgttcacatatgttacgcataaagtattatggtaactttgacaagcctcttggaaggtttttgcgtgactgcctatttaatcagggttatcagtgcatttcctgcgacaaaccacctgaagctcatgtccattgctacacacatcagcagggaagtctaacgatatcagttagaaaacatacagaattcgttttgccaggggaaagggatgggaagatttggatgtggcacagatgtctaaagtgcccttggagcaatggatttccaccagcaactctaaggattgtcatgtctgatgctgcttggggtctgtcacttggtaaatttttggaacttagcttttcaaatcatgcagctgcaagtagggtagccagttgtggtcactctctccatagggactgccttcggttctatgggtttggaaaaatggtggcatgcttccgatatgcgccaattaatgttcattctattcatgtaccgccttataaacttgatttcagtcaccagcctttggattggatacaaaaagaagcaaatgaggttattgaccgtgcaaaggttctctttgatgaaatatcacgggctttacatcagcactctgacaaaagggctcatagtggttctcttaacatggaatgcggcaatcacattgttgaccttgaaggaattcttcgaagggagaagttagaatttgagggatgtctgaataaagttatcaaaaaggagacgcagaaaattcaaccagacattcttgagatcaataggttgaggaggcaattactcttccactcttacttgtgggatcaaagactgatatctgctgcaaggtcagatagaagtcatcaagaaccatataacttcaagccagctgataaagagatggtccagtctataggtagtattgctgagcaaaatgccatagaaaagcctcaaagtgaaattagtgcaactgaggcttcctttaaagatcataaatatgttgagtgccttcaggagagcattgatggcgggaatagcccaggagttgatccatgtaatagctgtcctaaccatgaccagcaaatagccataagtgaatctgatttaatccaaaggggcagcaaaacacctctccacagcagcgtcagtattaatgtggagtctgttccactggaatctgatattgtagctcgacgcaccctttcagaaggacagtttcccagtttattggatgtttctaatgcgcttgatgcaaaatggacaggtaaaaatgatcctgtccctagcagtgcgatagtaccagattgtgtggcatcctcagaggattcagaagaacatgtgactgatacaccttcatatgcctctgtcttcctgaacaagctaggcgatagtgcagaggaccagtccaactggcttgggatgcctttcttacaactttaccgtgctctaaacaagcagtggtgtcgctcaaacaggtttgatgctctcaatgaatatactcctgttcatgtttcttttcttaggacggtggagcgccaggttgggcccaaatttctctttccaattggtgttaatgacactgttgttgggatttatgatgatgaacctactagcatcatctcctatgcgcttgcttcccatgaatatcatcttcagctatcagatgaactggaaagcgacacaacagataattcactctcagtaactgatttgagaggtgcttcattaactgaatcagtggatgaaactgcttctgaacttctaagaagttttgtttctacagaggacaatatcctctatttgtcaggaggcaagaatccatccccttcagatccactcgcatacagaaaagcaagtcacataaaggtgaattttggagatgaaggtcctttaggacaagtgaagtatactgtaatttgttactatgcaaaacaatttgatgctttgaggagaatatgctgcccatcagagcgtgattttgtcaggtcacttagtcgttgcaagaaatggggtgctcgaggaggaaaaagcaatgtattcttcgcaaaatcactcgacgatagatttataattaagcaggttaccaagaccgaattagagtctttcatgaaatttgctccagagtattttggatatatttcagagtcaattgtgactggcagtcctacttgtattgcgaaaattcttggtatttatcaggttaagagcctgaaaggtggaaaggagatgaagatggatgttctagtgatggaaaatcttctgtttgaacgtcatgtgacaagattgtatgatttaaagggatctacaagatcaagatataaccccgactcaaatggtagcaataaagtacttcttgatcagaacttacttgaagctatgccaacctcccccatttttgttgggaacaaggcaaagcggctgctagagagagccgtttggaatgatactgcattccttgctggaggtgtgactctctggcagtccataggtgtaatggattactctttacttgttggtgttgatgagaagaagcatgaacttgtgatgggcatcatagattttatgaggcaatatacatgggacaaacatctagagacatgggtgaaaacctcaggaatattgggcggaccaaagaatgttgcacctacagtaatatcaccgaagcagtacaagatgaggttcagaaaagccatgtcgacttactttcttgttgttccagatcagtggtcacctccagcagtagtccctagcaagcaaggggctgagaacaaccaagataacgattaa

SEQ ID NO: 39980 - DNA, 561 bp, Oryza sativa
  Clone ID: PAT_MRT4530_43467C.1
ccggccgggctaagccgagacaacgcagagaaaggcgtcttcgtactcgcctctctccgcgcctccgcgcttttcctcctcctctcccctctctcccttctccggcgccggcggagcatcaacccaatccgccgccatgagggagggcatctcgatccacatcggccaggccggtatccaggtcgggaacgcgtgctggggggtctactggctcgagcatgggatccacgctgatggtcagaagcccacacacaggactgttggtggaggcgatgattcccctgcaccatcttaatgcatgcagctgctgggaaggatgcctcactgcaactgtgacaccagctaccagatgatgcagagcatgcaacaaggtatttgtgctggactcgggcagcaccagatgatgatgaacatggcgatgcagatgccatacatgtgcaacatggcccctgtcaacttccaactctcttcttgtggggcgggggggagcaaacggtgggtacatgtactctagtaataaggggggggatactatcgggtgcagacactagaaataagaac

SEQ ID NO: 39981 - DNA, 563 bp, Oryza sativa
  Clone ID: PAT_MRT4530_43468C.1
gtgttttttttttaggaaacattagaccttccaaaaaaggaagaacaagaacatttatttatttattttccgtatgtgaaatcacgcaggcactgatctacattgcaggccattcttaaccataaaacacaacatcgagaaacaaatatttaagagaaaaagaaaagcttgagaaaagcaagctcctcttcttctacctactactactactgagaacctatttggcaggacttcaacttacaaatttaacttcaagagttggttctaaagtgtagctgtaaaatagtctaaatccaactttacatttctagatcattctgtgatagcacttcaatcaacctcactcccatttcgagtaaagctgaaaccgtttggttatgctctgaagctctaccaaaaaggctctccaaatactgatacagatacacagttaacggttctactcatgctctcatgagtcatgggcatgctttgcttgctagcgcacggacgaacacgctgcagcgtcctctctctctccgccgtcttctttcacttgagcgacgagaggcggttgatgaaga

SEQ ID NO: 39982 - DNA, 352 bp, Oryza sativa
  Clone ID: PAT_MRT4530_43469C.1
gcgtacatgaacacgtgagacccagcttggatggtatttacagcacctgaatactgggggctaccacaagactgaaaagacttggattaccgacaataatgcccaagataaagacacaactttaaccctaggtatgaagcgtggggcccatccaatacattctgcaatcctctgtttagaacttggtggggctgagggccatcatgaggtgcttactggcttaatgctccatacccttgatagaatggatccttatggttgtgtacgaacactggcatttccgagagatggctccaggtatctggcaccagagtagccacaattgttgtgcgatcctgcgctggccatttgg

SEQ ID NO: 39983 - DNA, 310 bp, Oryza sativa
  Clone ID: PAT_MRT4530_4346C.1
gtctttttttttttgtgctgaaaaccaccacgggcgggttttattgagacaaccatggctaaacccccacgggggcgataacgggaaagacaagctcccggacagactccacaaatacccccgagcaacaacagaaggccactcacaacatttgatacaagatattgaagccacacatgaggggctgacaaggccacgactaagaatgccaggagagcagctgcgcaggaacaagacaaccagcaagggcgagctcggggccaaagcctactaaggccacaccatccaggagacacaccaaggcaacttc

SEQ ID NO: 39984 - DNA, 1206 bp, Oryza sativa
  unsure (1)..(1206): unsure at all n locations
  Clone ID: PAT_MRT4530_43470C.1
cggcacgaggcacttcaccattcaccaacgcaaacgcaaacgcaacgcagcggcggtagacgaagcgaggagcaggtagcggttcttggtcggttcgccatgtacgtcaacaactgcccctcccacgcctctcgcatggcagcggcggcggcgaggtacgacgtggagaagggagggaggaagagggagggggaggaggagaggtgcggttcgccggcggcggtggcgcagtacccgcagcgggagggggagagggagtgggtgccgtggctcgtcccggccatcctcgtcgccaacgtcgtcgtcttcgccgttgccatattgcagaagatgggagcactggtatgggacaaggttgttcatgagcatcagggatggaggctagtgacctgcatctggctgcacgccggtgttgttcatctgcttgccaacatgctaagcctcgtgctcatcggactcaggctcgagcagcagtttggatacatgagaattggcatcatctaccttgtttctggcattggaggcagcgttctttcatcgctgttcatcagaaacagcatctccgtcggtgcttctggcgctctctttggtcttcttggagccatgctgtcggagcttttcaccaactggaccatatacacgaacaaggctgcagctctagtgacgctcttgatcgtcatcgcgatcaacctcgccatcggcatcctccctcacgtcgacaacttcgcccacatcggagggttcttgactgggttcctcctcggattcatcttcctgatgcgcccacactacggatggatgcagcgatatgtcctgccttcctctgtcaagtacacctccaagaagtacctggcttatcaatggatcttgctggccgtggcctcggtcctagctgtcatcggattcgccgttgggctgtcgatgctcttcagaggggtgaatgctaatgaacgctgccattggtgccactacctgagctgcattcctacctcgagatggacctgcgggaactgaagatttagtagaaacgccacaaactgaagacattaanggagatttattgaagggtgtgtgatgcacanacatacaattttactgtntataacttatacagacataccctcccaggggtttagtcagttcacttgattgattcattctgttcgtttgtctgaattatttggaatagaaacatcttctccttaa

SEQ ID NO: 39985 - DNA, 720 bp, Oryza sativa
  Clone ID: PAT_MRT4530_43471C.1
agcgcgccgccctttttttttgttttttttgaacttgggggtggttaattcgcaaaaatgctcatcaagataggctcctacgacgagacctgcagcaaggaacgccatgtacacactaatctgcatcaagcaaaaaaaaaccaaaaggagaagatcggatttgtatcaaagctgagaaatcgaagaaggagaaggagacgtgtagctgttcgtggttgtcgcgcgagaaggagacctcgcgggaggcggcggtggcggcggccttagtgtcgctgtttataattttttaaaaagaaccttctctcccatgacttcttggatttgggcgacatcgccggagatgctgtgcatcacctcgccggtgctcacctccgtgtcaaagaatccgatctcctgcctcagcaccgccttcaggtactcacgccgcatccgcagcgccgacctcttgccgatgatcctccagcaggtgatctctgcagcaaggaacgccatgtacacactaatcggcgtcgtggccgtgcgcggagtagacggcggagtcggcaacgacgctgtcgtcgttgctggcgaaggaggtgttgtgttaggcaccacgacgatggcgcggctcgcgtcggtcaccacgctctgcagctccagccgcctgccgccaccggcgacgggtctgtgcgccgacgaggagatgtcgcggtagtgcgggcgggtggaccgcctcgacat

SEQ ID NO: 39986 - DNA, 301 bp, Oryza sativa
  unsure (1)..(301): unsure at all n locations
  Clone ID: PAT_MRT4530_43472C.1
ctgcgcccatctgctcctctcctctcctctcctccgctctcgcgaagctcccaagtttgactccctcgagacccaccaccaccaccacgccgcgagcacgcgagcgaacgcgcggcggcgggggggatgggaggggttntatacncttgatcgttctctgggggatgtgctctggccggaccagcgggcggcgcccatggcccatggcgctctcggcggctacgtcagcctggatgggtttctctgcaaggacccaattcctactggccaagattttgcttataatgatgccttggccgct

SEQ ID NO: 39987 - DNA, 442 bp, Oryza sativa
  Clone ID: PAT_MRT4530_43473C.1
ggggccccacatacaacacaaaaatttagcggggggaggctcaaatagggttcataagcaaaaaaaaaaaccgggggggccccaaccccagggggggaaaccaaccgggcaaaaaccaagctggaaaaaatcactttttgccctcgccgcccttgggggagcaaggcccccataaaaagcctaactcataatcggaatcctttccttggtgggggggggaggcactatcccccccgggaaatgggtcgttactccccggaatctccgaattttttgatcaaacccaggggatttggtttttgcaaattaccaacaaaacaagggcggggttttcttcttttttttcttccaaagggaagccaagaactccttttgccgctaaaaaatctcctgcagggcctttttgggcgctgaaaggtcctcctccaagggcctaacacgg

SEQ ID NO: 39988 - DNA, 225 bp, Oryza sativa
  Clone ID: PAT_MRT4530_43474C.1
actgcatgacaactttaacgacctaaaaatattgcgggatcatacgtaaacggctataaacacaccactagctagtacaccaacagaaacactaggccatctttgccatgacctcctcgatgatgatcttggtgtccacatacgaagagccgatctggttgtcgtccatgatgccgaaggccttctgcaggcgctcgaagctgtcgaagaagcgcttgacgaggt

SEQ ID NO: 39989 - DNA, 1139 bp, Oryza sativa
  Clone ID: PAT_MRT4530_43476C.1
gaggggtaacacacgcacgcgctcgctcgcctggcctggcctggcctggcagggcagggcaggtggcgcgcgtgcacaacgtacgcgtcgaatggtccgccaaaaattggctcctcacccttgcgcagatgcagcctccttttgcagttttgttttgctgcaaattcggattcgttttgttttggaaacgttccgaaaaatccggtgcgtgaaaacggcgtggagtccggataagttacgcgcgacttatccggttcggttacacgcagtggagatcgtgcgggcgccctgatcaagcgacccttctctatataaaccgacccgccgtcttcacgcaatatatgcgaaaatcaatctagggtttgcctcctactctgtactgcgccgtcgctcgtagactactccatcccgctcgccggcgtgcaccagcgatcgggagagcaggtctccggaacctctgcctttgacgtcctgacaaccagatgaggtcggcgaggtcgaggcccttgctctggaaggaggagaggaggtcggtgaagttcatggtcggcgccgggatctggtccagcgcctcctgcttgatcgacaccctcccgtcgcgccgccccgtcgccacccgccagaacggcccgccgatgacggagatggcgtcgcgggtggcgagcgcgaggatgtcggcgcaggagacgacgccggggcactcgctctcgaccacgctcttgatgcggtcgatgaaggcgaacccccgcagcgtcaggttcggcgccgcgtccttctccgcctccgccccgtccgtcccgttcagcaacaccgacgcgtcgcaccccctgacgaagcagtcgtggaagtgggtgcggatgagggtggcggcgacggagggggcgagggggacgtgctgctccacgtagtgcttcaccagcgcctccgcgcgcgggcagctctgctcgtagaacccctccttgagcacccacccctccacgccgccgccgacgaagacgacggccaccgccgccgccaccaccaccaacgtcagcggcgcggccattgccatagctaagctcaaagctgctttctctgacaatctctgagtggcagtgcactcggctatatatagagagagacagtgagcggacgcgtgg

SEQ ID NO: 39990 - DNA, 449 bp, Oryza sativa
  Clone ID: PAT_MRT4530_43477C.1
cccacgcgtccgtggagttcgtcgccgacgagggcacggtgatcatgccgcggtggatgatgcgcggcatgcgcctcgacgacggcggcctcgtcgtcgtcaggagcgccagcctccccaagggcagctacgccaagctgcagcctcacaccggcgacttcctcgacacggcgaaccccaaggccgtcctggagaagacgctgcgcagcttcacctgcctcaccaccggcgacaccatcatggtggcctacaacaacaaggagttcctcatcgacatcgtcgagacgaagcccgcctcggccgtctgcatcatcgagacggattgcgaggtcgatttcgcacctccactcgattacaaagaacctgaaaaggttcagcagaaaccatctgttccttcaagcaaggcggcttccgaagatcaagatcaaatcaaagatgagccagaattc

SEQ ID NO: 39991 - DNA, 321 bp, Oryza sativa
  Clone ID: PAT_MRT4530_43478C.1
atggaggctggcccgacgcgggatcgatctgagccattcgtttcgacggctgcccccggccgattcggcggcaccgacggtgccaacggctacccgcgtgcagacccagctcgcgggctgatccgccaccgacggcggcttcctgcggtggatctgacggcaacaacagcggcggctgcttcccggggtggatccagcagcaccgacggcgccagcggctacctgcgtgcagatccggctcgtgggccgatatggcagcggatccgacggcgacgacagcggcggcttcctgcggtggatccagtggctacccgcatgtag

SEQ ID NO: 39992 - DNA, 121 bp, Oryza sativa
  Clone ID: PAT_MRT4530_43479C.1
cgctaatgtctttggcgctgagattgttcctatcagcaacggaactggcgctgatatcatgccagcgtggcgggcgagccgcgacgtggcgcggtctcagcgccaatatatctggcgctga

SEQ ID NO: 39993 - DNA, 301 bp, Oryza sativa
  unsure (1)..(301): unsure at all n locations
  Clone ID: PAT_MRT4530_4347C.1
ggcaccaaaattagggatatatacgacagngcgaacatgaagcgagtctttagtaccaggctacggccattgtagggtaccatatgcaagcacgggaaatatccaagcttgaaagttaaaaacgaccgtacaaacaatgtattaacnaaaacaacaaagntggaatcaaagcttttaatcgccttgttttggttgaaggaaatcaaaccgtccattccttgtncnactgttgaaaattttcaacgacaatnntgcatgtgcattatttgttcaaccaactcccttcgggtaaaaaaatgca

SEQ ID NO: 39994 - DNA, 479 bp, Oryza sativa
  Clone ID: PAT_MRT4530_43480C.1
aagctttttttttttccaatatagtttgaccaatatttatatattcgataaaaatgagctggggtttttatgtatagattcctgcgtatattatcaaaaggaaacttctagaatctaggtctaactctcacattaacttatatttaaagcatacactcaaaataaacattataacaccaaatcattccgctctcgcaatggctaaacagattacttcttgttaccagcaccaccagtcttcttaagaatttgaataacatcttcatcctgtaacaagtgactcaaaccgactctttgaggactgaacttagcgctcttaccccagcagaaagcgaatttaaagtctctgaccaaatctttgtgaatctgctcgcaaacactttgtactgtgcaaccgtttctgccctgggtcaagataattggatcaccgaaatctgggaggtagcctctcttcttagtatatactctgaccaaagctt

SEQ ID NO: 39995 - DNA, 216 bp, Oryza sativa
  Clone ID: PAT_MRT4530_43481C.1
atggcgaacgggctccatctgtccgtgacgagtcccgtgtcgctgtccccgtgcgttgtcgccgtgcctccgccctcgcggttccttggtccaaaacatacaggactcggcagtgcggccaatgttgcactctcctgtgccatcctctcccagagtcccagctcgatctgcctcagcctcaccaagtttgatccgatccttgcattggaacgataa

SEQ ID NO: 39996 - DNA, 538 bp, Oryza sativa
  Clone ID: PAT_MRT4530_43482C.1
caggaaaagccactttcaaaaattgtgaaaaatgtgagataatatactgaaatcctacagcagaaatacctcctaaaaagagtgcaaatatgaactattctctcttgttcagtaattgcagcatcaaggagcccttgccccttgccacttcttttataggcatcatttgaaacttgcaacctggaacttcacaggtgttgtacacagacagggtgggaggtctccataatattcaggctggcatatttcagagctagaaatgttcaggtactaccatctacttgttccatacgtagtcctagctagtatgcaattataggtgagatgtatcatgtatgtaaattagcacaagcttgcagctgaccaaaatcctaaagctaatcgtcatcgagggtttcagatggaagaactcaaccaccacccaatcagtactggacccttcaagccaagaaacattagtgaacaccaacgctagctgaatcaacaacagcaaccctctcgatggcaatcctcaacagcacatgctcactgtcgtcgc

SEQ ID NO: 39997 - DNA, 1465 bp, Oryza sativa
  Clone ID: PAT_MRT4530_43483C.1
tcaaaaattgtgaaaaatgtgagataatatactgaaatcctacagcagaaatacctcctaaaaagagtgcaaatatgaactattctctcttgttcagtaattgcagcatcaaggagcccttgccccttgccacttcttttataggcatcatttgaaacttgcaacctggaactgcatataactttccaaaactcaatacatggtgcatcatccatagattgacatggaaattaaaggagagcaccaaccttcacaggtgttgtacacagacagggtgggaggtctccataatattcaggctggcatatttcagagctagaaatgttcaggtactaccatctacttgttccatacgtagtcctagctagtatgcaattataggtgagatgtatcatgtatgtaaataagcacaagcttgcagctgatcttaatcttaacggaggtgatcgagactacgatatataatcatcccttggagatagctaataattaagcagctttcatggtatgacgtatgtaaacaaatgagcaaattaaccttcaagccaagaaacattagtgaacaccaacgctagctgaatcaacaacagcaaccttctcgatggcaatcctcaacagcacatgctcactgtcgtcgcagctgacgacggacgatgtatgcaagaaccacccaccggacggccgccatgatcaagaacctcattaatttgctacaattcaccctgcaaaaccaaaagctaccaaagaagaaaaagttgtggagttgcggtgcgattgcgaaaaggtggagttgacggcgaggacacctggggcggagaggacatctgggcggcagatcgtggcacagcaaactggaggtggcggcggttcggttcctacctctttcgactggattggaggagagaccttcgtggatcagataaattagggctgagggggagagataaaggtgctgactgctgaggggtagggaggcgtgaagctcagcggacggaatggggcgcgtgcggcagatgaagcgtggaggatggatgcggctgcgcggtgcgagcgggcattggagaggcgagcaatggggagaagaggaaggagagcgtgtaggaggcggtgcgcgggcggagaagggcggcgtgcgatggagcttgagcgagggtagcgaggtgatggatgcgcgatgcgtgcggtgcggggatccggcgcgatgcgactccggatcggtggtggcgcggtcgtgggtgtttcggcggcgcgcgcggtgttgtcggaggagaccggcgaggcggggaccaagcgactccgtattggtggcgaaccggagattggaggcgcggcggtgttgccggcggtggaggcgcggcgaagaggagggaggtgcggcgaagaggaggactgcgcggcgatgggggcgccggctgtggaggcgcggcggaggaagaggtgggcgtgggcggacgcctgggcggac

SEQ ID NO: 39998 - DNA, 128 bp, Oryza sativa
  Clone ID: PAT_MRT4530_43484C.1
cctaataaggagcgggacctatatttaaattgtttgcttctggaacactaatggcataatgcccatgttaacaatgaccttctcgacatgtaacagaaggtgaaaacgacccaacaaatcccacaatg

SEQ ID NO: 39999 - DNA, 426 bp, Oryza sativa
  Clone ID: PAT_MRT4530_43485C.1
ctggcacgcgcgtgcaggccgcgacgcgctatagcggtcgcgacctgcgctcgcgttcgcacttgagagtagcgtctttatacctattacgacattggctggctctgacgtatatcgcatatcatgagacgcccctaataggcacaagcatattattttgactatagctctcgtacacgttcccatccaattaagcaactactatgcattttaatatgcgcttgaatattatgcaagcgacatatggtgtttatggagctaggtgccgattaagggtgcgattgagatgctccaccaacttttgcatacatactgatacatgatatatatatacatgagggttatttattaacaaacaaatacaccgaccggtctataggataccggctcactgacgcgtacctgctatgcctatagtgtgctata

SEQ ID NO: 40000 - DNA, 204 bp, Oryza sativa
  Clone ID: PAT_MRT4530_43486C.1
atgcaaaccacgcaccccgaatggacgaatccagctgcagcagggcctcaggtgttcgatggacagcgcagaggctgcagagctcaacagtttcgcggcggagccatggcttccggcaagatggacacgccgcagcagagattgcatcttccgaaaagcaaggactactgccaaggcaaaaaccaatctataagcaaggactaa

SEQ ID NO: 40001 - DNA, 169 bp, Oryza sativa
  Clone ID: PAT_MRT4530_43487C.1
ccggccgggattgccctcacggcggcggcggcaggccatcgctcgcttttctccaccatcgacgaccagtcccctttctcctccatcgcccctctcgtgcagatcggaaatgatttctcctcatcccgatttgacctctggttcgaccgatatgaagcaggcggcggcc

SEQ ID NO: 40002 - DNA, 1356 bp, Oryza sativa
  Clone ID: PAT_MRT4530_43488C.1
gtcaattcagaaccacgggagcagattgctgcctgcactgcttgtgtacttgaaagaaccaagtatcagaaatacaaacagtagcttttaggagatggaactaacaaaatgtgcatcctgaactgaaagctttatgtcacaagaaaccttgcagatcaactaaaaaaaaataaaaggggagctaaagcagtctcatttcttaagtgcattcatcctgtcccgcaggtaatacaactttgctctcctgactttcttcctgtccaagaccttgatttccttgatgtttggagagtaaagtggaaagacagactcgactccaacaccagctactaatctacgcagtctgaaagttgtattgatcccagcattacgtcttcctatgacaatgcctttcaacgtagactcacgacgcttgttctcaggaacttgcaatctcatttggataatacatccaggctgcacatcaggaatctctctttccccacggaccttgtcaacagcctccttgttcaagatattcataatgtgcctggccgtcttgtcaggcctcttaaacttgatgcgcggaggatgctcgactcctggagagtcagaactttcctcctcgacagaaacctcagcactccccactgttgatagacccctcattggcatggtattcacgcagaacccatgggaatgaacactatcaccggagacgattgagttcccaaatggacgaatccagctgcaagaactcaggtgcttgatggacagcaggttagcacccgactgcgcgactccagaagctgcacggtccaagagcttcgccgcggagccatggcttccggcaagatagacgcgccgcagcagagactgcatcgtgccacgcgccgcgccgccgcgaggcctcccccgcacgccgtgccacttcctcgcatcggagacagctcgccaccggggtttttgtccccgctgccgtcatcctagttcctacgtggttttcggtggcggcgaggcggtgagaggaggggagggtggcggcggccaggggctagggtttgcccctggtcacccgtgtgtggacgaccgaaggcgcgtggagaacaaacacaactgatatcccggatgcaaaccacgcaccccgaatggacgaatccagctgcagcagggcctcaggtgttcgatggacagcgcaggttagagcaacaagctcacttttatatagctcactattatacttactcttagcgcccgactgcgcgatttcagaggctgcagagctcaacagtttcgcggcggagccatggcttccggcaagatggacacgccgcagcagagattgcatcttccgaaaagcaaggactactgccaagg

SEQ ID NO: 40003 - DNA, 3078 bp, Oryza sativa
  Clone ID: PAT_MRT4530_43489C.1
atgctgcgggaggcggatgagagggcagcggagggcggcagaagagtgccgctcgacggcagaagagcgctgctcggtggcagacggcaggaggtttctgtgttcggacttttgggttcatcggaggtggcaggcttggcagaacggccaactactgagattttagctagccgaagacctctagttggctttagcaatgtcatcaaaaaggtggatgatattattgatggaggtataacacccttagcatgtgcggcatacaatggttcagttacaagcatgaaaacgttgttgcaggctggagctaatgttcagatttcaaagccaatcggcaaagctatagtagctgacctcacttcatctgaatctatggttcagattctacttgattctggtgctaatgcagacgcaattgatgaggacgatgtccatacagcagcaagagttactgcgctgcgtgagcgcatgtttaatgctttggaaaacataaactacttgctagctgatatttgctgtaaagcgctgagaaatgatgacaagggcaaggaggttatgtgtttgaaggcagcgttggcgctgaaccctcaaaatgagagagctgaaagtcttttgaggcacggcccggcggccggccgggccgacacgggcccgacccccatcgggccgggccgctcctcggaggacgccacgacggcgaccgggaagaagatgaacccgctccctgctctggccagccggctgtgggaggcgagcatccgcaagctcaagtactccaccatccttcgcggctccgtcgtcccctccggcggcaccttcgacggaccggcggccgccaccggcaatgccgctggaggtgaccccatcacgctcaccccaagcctctccgtcagctcctccacctccaacaccatctaccagtacgacgacggcgacgaagacatcgactccgtcctcgacgacgttgacaccgacgacgacgacgtcgacgaggcgtcgctcggcgagcccagccactccgaccagctgctgcccagcggagacttctaccagggcgacctacgctgtgacctcccccacggcgccggcaagtatctctggacggacggcagcatgtacgaggggtcgtggcgcggcggccgcgcggccggccgcggcaagttctcgtggtcgtcgggcgccatctacgagggcgacctcgccggcgggtacatgcacggacaggggacgtacatcggcgagctcggggacacgttcgccgggctgtgggcgaacaacctccggcacggccgcggcacgcaggcgtacgtcaacggcgacgtgtacgacggccactggcgcgacgggctgcaggacgggcacggccagtacatctggcgcggcggccacgagtacatcgggacgtggaaggccggcgagatgcacggccgcgggacggtgatatgggcggacggcgaccggtacgacggcgcgtgggaggacgccaagcccaaggggcagggcacgttccggtggtccgacggcgggatgtacattggcctgtggtgccaggagtccggcgagacgcagggcaagggcgtgtactacccgccgtccggtggcccggcggtgccgttgccccgggaacccaagggggtgatcacgaagctgctcgaggagctggagatgtccgaggggaagacggtgtcgctgctgccgtcacagaaggtgctgacatggcctggggtggagcccgtgacgaagaagccggtgtggctgccgccggaggtcgccgctgaccaagggatgtggcggccgccggaggttggagctgaccaagggaggaggtcgagcaggaggaacaacatgtcgtccgacattgacagcctggttgagggggaggacggcggcgaggagagtcgcaacgacaggtcatgggtgcggacaccgtcgtgtatgcgcgcgccgacgatgccgaagccggggaagaagcagggggagaccatctccaaggggcacaagaactacgaactgatgctcaacttgcagctgggaataatattagatgtacctatcattgccacccacttctcagcggagcgcacaatgtcgctgaggggagggggtgaatccgccggcagcgattctccttgtcggcgagaggaggccaagagtaggactcctcggccacagccgggctcagccggcgagcgtagcgcggcggcctccgctgagatgtcgtcgaggggagggagcaaatcttgcggaggcgattcactgcagccaggcgaagccggcgagcatggtgtggcgccctccgccgccgccgtggagacaagctccgaggtcgccaaggtcaggggccaggcggccacgccctactcggctgccccctttgatgaatccatgctggtgcagcattcaacaggcaaggcgatggggaatcgtgaggctgacgttgctgctgttggtttgggtccaaaaaactcaggcctcaagatctgtccagctcgttccttgggacgacgccgcggaggtggccgggagggagcagcggggcacgctgtcgatgcggtggcggaggaggaggacgccggccaccgcgccgcggctggatccggcggggagggcgtttcatggagggggggtgggcggccgaggtacacgacggcggactcgctggcgttcgtggcggcgagcctcgggaagggcaggtggcgcggcggcggagggtggaggaggtgggtggcggagaggtcgtcgctgcggcgggtgatcggcgccgccacgctgcgtgacaccgtcacgccgctgctcgtcccgtgctacgacctcgccaccgcggcgccgttccctcttctcccgtgctggagccgttcctcttctcccgtgccgacgccgtcgagaggacagcttcgacttcaacggacgacaaccgtcgttgtcgttgtcgtcgccatccccaacctcctcaccggacgacactatccagaacgccgcagcaagaatcgggtggagtccaaatcggctacgatcaaggatcaaatcaattggcacgctcatacacctaaaggcaagcttttggacctgcactggagttaa

SEQ ID NO: 40004 - DNA, 249 bp, Oryza sativa
  Clone ID: PAT_MRT4530_4348C.1
atggcgaaggggtggacggcgcggctcactagacggggtggggagtgcgggaacggctgggagtggcgcggattcaccggcgaagtgggggaggtggaggaggaaagagaggcgggattcaaaaatggaatcccggctgtctcgatgcaatcgcagacacgagaggtgtactggggtgcggagagtggacagcatgcgctggcaccgcatttgcgggaggcggcggaccgcaggttggggaggacctga

SEQ ID NO: 40005 - DNA, 218 bp, Oryza sativa
  Clone ID: PAT_MRT4530_43490C.1
tttagtgcaaaacatcaacaactgttgtttggcccgatctttcggtgagttgagataactatgatttgggagaaacgttgacgacccgactacaaccgtacaagacgttgttgtgttgcgccttagcgatcgatacacctctccatgggttgttgatctcgccggtgcaaatcaaccctattcctgcaagcaaatcaaagaaacaagcaagaacaaga

SEQ ID NO: 40006 - DNA, 1713 bp, Oryza sativa
  unsure (1)..(1713): unsure at all n locations
  Clone ID: PAT_MRT4530_43491C.1
atgaacccgctccctgctctggccagccggctgtgggaggcgagcatccgcaagctcaagtactccaccatccttcgcggctccgtcgtcccctccggcggcaccttcgacggaccggcggccgccaccggcaatgccgctggaggtgaccccatcacgctcaccccaagcctctccgtcagctcctccacctccaacaccatctaccagtacgacgacggcgacgaagacatcgactccgtcctcgacgacgttgacaccgacgacgacgacgtcgacgaggcgtcgctcggcgagcccagccactccgaccagctgctgcccagcggagacttctaccagggcgacctacgctgtgacctcccccacggcgccggcaagtatctctggacggacggcagcatgtacgaggggtcgtggcgcggcggccgcgcggccggccgcggcaagttctcgtggtcgtcgggcgccatctacgagggcgacttcgccggcgggtacatgcacggacaggggacgtacatcggcgagctcggggacacgttcgcggggctgtgggcgaccaacttccggcacggccgcggcacgcaagcgtacgtcaacggggacgtgtacgacggcacttgcgcgacggcttgcaggnacgggcacgggccagtacatctggcgcgccggccacgagtacatcggactgtgaaaggccggcganatgcacgcccgcggaacggtgatatgggcggacggcgaccggagtccgccgagacgcagggcaagggcgtgtactacccgccgtccggtggcccgccggtgccgttgccccgggaacccaagggggtgatcacgaagctgctcgaggagctggagatgtccgagggaaagacggtgtcgctgctgccgtcacagaaggtgctgacatggcctggggtggagcccgtgacgaagaagccggtgtggctgccgccggaggtcgccgctgaccaagggatgtggcggccgccggaggttggagctgaccaagggaggaggtcgagcaggaggaacaacatgtcgtccgacattgacagcctggttgagggggaggacggcggcgaggagagtcgcaacgacaggtcatgggtgcggacaccgtcgtgtatgcgcgcgccgacgatgccgaagccggggaagaagcagggggagaccatctccaaggggcacaagaactacgaactgatgctcaacttgcagctgggaataatattagatgtacctatcattgccacccacttctcagcggagcgcacaatgtcgctgaggggagggggtgaatccgccggcagcgattctccttgtcggcgagaggaggccaagagtaggactcctcggccacagccgggctcagccggcgagcgtagcgcggcggcctccgctgagatgtcgtcgaggggagggagcaaatcttgcggaggcgattcactgcagccaggcgaagccggcgagcatggtgtggcgccctccgccgccgccgtggagacaagctccgaggtcgccaaggtcaggggccaggcggccacgccctactcggctgccccctttgatgaatccatgctggtgcagcattcaacaggcaaggcgatggggaatcgtgaggctgacgttgctgctgttggtttgggtccaaaaaactcaggcctcaagatctgtccagctcgttccttggttttggggagctga

SEQ ID NO: 40007 - DNA, 795 bp, Oryza sativa
  Clone ID: PAT_MRT4530_43492C.1
cccgcgtccggttcgttcttttgataatactctagtaacaaaatttttcggcctgcattgtgttaaaattacaggagctattcagaaaaaggttcggtttgttataatggggaatcttttctgctccaactattcaatccacagacgctttgatttgaaaggatcatcacatggtcgcacaacggacaaacccattgatcaaatcgatgagactaccactttgaaggaccttgatctcaatttcattttccggttagagggatcatggtatgaagatttctgcaggcaattggacaaggattgtgagtttctggagcaagagagaattatggattacagtcttctggttggcgttcacttcaaagaccgatgcaaagacagcagcagtcctgacaacgagacaactcaaactgctcttgaagatgaggaaagaagaaaagcaccagtcaagctagggatcagcatgccctcaagggtggagaatgttgtgaagaatcctgaaagtgaatcccagctcattggcgaacctacaggggaattccaggacgttatcctgttctttggaatcattgacatcctacaagactatgatatcagcaagaagcttgagcatgcctacaaatccatgcaatatgatcccaactccatatcggctgttgatccaaagcaatactgcaaaaggttcagggatttcatttacagggcttttagtgaagacctacagtaaatacttcattaacaaaagggaacactcttaattcttaactgaagaaagcataacgaccagctgatgga

SEQ ID NO: 40008 - DNA, 2319 bp, Oryza sativa
  Clone ID: PAT_MRT4530_43493C.1
atgaacccgctccctcccccggccagccggctgtgggaggcgagcatccgcaagctcaagtactccaccatcctccgcggctccgtcgtcccctccggcggcaccttcgatggtgcggcggcggcggcggccaccggaggtgaccccgtcacgctcacgccaagcctctccgtcatctcctccacctccaacaccatctaccagtacgaagacggcgacgacgacatcgactccgtcctcgacgacgttgacaccgacgacgacgacgtcgacgaggcgtcgctcggcgagcccagccactccgaccagctgctgcccagcggagacttctaccagggcgacctgcgcggcgacctcccccatggcgccggcaagtatctctggacggacggcagcatgtacgaggggtcgtggcgcggcggccgcgcggctggccgcggcaagttctcgtggtcgtccggcgccatctacgagggcgacctcgccggcgggtacatgcacggccaggggacctacatcggcgagctcggggacacgttcgccgggctgtgggcgaacaacctccggcacggccgcggcacgcaggcgtacgtcaacggcgacgtgtacgacggccactggcgcgacgggctgcaggacgggcacggccggtacatctggcgcggcggccacgagtacatcgggacgtggaaggccggcgagatgcacggccgcgggacggtgatatgggcggacggcgaccggtacgacggcgcgtgggaggacgccaagcccaaggggcagggcacgttccggtggtccgacggcgggatgtacatcggcctgtggtgccaggagtccggcgagacgcagggcaagggcgtgtactacccgccgtccggtggcccggcggtgccgttgccccgggaacccaaggaggtgatcacgaagctgctcgaggagctggagatgtccgaggggaagacggtgtcgctgctgccgtcgcagaaggtgctgacatggccaggggtggagcccgtgacgaagaagccggtgtggcggccgccggaggtcgccgccgaccaagggatgtggcggccgccggaggtcggagctgaccaagggaggaacagcatgtcgtccgatattgacagcctggttgagggggaggacggcggcgaggagagtcgcaacgacaggtcatgggtgcggacaccctcgtgtatgcgcgcgccgacgctgccgaagccggggaagaagcagggggagaccatctccaaggggcacaagaactacgaactgatgctcaacttgcagctgggtatcagacatgctgtaggaaggcagtcagctcctgcttcattggatcttaaatcatcagcatttgatccgaaagagaaggtgtggacaagatttcctcctgaaggatcaaagcatactcctcctcaccagtcatgtgatttccggtggaaggactactgtccattggttttcaggactttgcgcaagctctttgatgttgacccaggagactacatgctctccatttgcggggatgatgcactgctggagctttcatctcccggtaaaagtggaagtttcttttatttcaccaatgatgacaagtacatgatcaaaacaatgaagaaagcagaagttaaagtacttctgaggatgcttccagcctattataaacacgttcgttcttttgataatactctagtaacaaaatttttcggcctgcattgtgttaaaattacaggagctattcagaaaaaggttcggtttgttataatggggaatcttttctgctccaactattcaatccacagacgctttgatttgaaaggatcatcacatggtcgcacaacggacaaacccattgatcaaatcgatgagactaccactttgaaggaccttgatctcaatttcattttccggttagagggatcatggtatgaagatttctgcaggcaattggacaaggattacagcagcagtcctgacaacgagacaactcaaactgctcttgaagatgaggaaagaagaaaagcaccagtcaagctagggatcagcatgccctcaagggtggagaatgttgtgaagaatcctgaaagtgaatcccagctcattggcgaacctacaggggaattccaggacgttatcctgttctttggaatcattgacatcctacaagactatgatatcagcaagaagcttgagcatgcctacaaatccatgcaatatgatcccaactccatatcggctgttgatccaaagcaatactgcaaaaggttcagggatttcatttacagggcttttagtgaagacctacagtaa

SEQ ID NO: 40009 - DNA, 150 bp, Oryza sativa
  Clone ID: PAT_MRT4530_43494C.1
atgggtggaaccatgaattgggcaacacgcataagagttgtgcttgaagctgcacaaggtttcgactgtctggaaggtatcgtctgcaaaaatcgtgattttttcgtgcgggcgacgcacccgcacgcgaaagtcgcgtgcggcgcttaa

SEQ ID NO: 40010 - DNA, 231 bp, Oryza sativa
  unsure (1)..(231): unsure at all n locations
  Clone ID: PAT_MRT4530_43495C.1
actttcccctccatctccacttttnacggatcggcagcgacgatgaaggnctgcgggtgcgacaggcggttnagcggcgattgnaggtcggcggcgggcggtcgccggcttnggcctcctcggtgtgccnggnggcaggcggcggggtccctccagcttcctccaacgangggngacggcgacggnctgcgccacacgnagcnacgacgatngcctgcgccaacggggggc

SEQ ID NO: 40011 - DNA, 2205 bp, Oryza sativa
  Clone ID: PAT_MRT4530_43496C.1
atgaacccgctccctcccccggccagccggctgtgggaggcgagcatccgcaagctcaagtactccaccatcctccgcggctccgtcgtcccctccggcgccgccttcgatggtgcggcggcggcggccaccggaggtgaccccgtcacgctcaccccaagcctctccgtcagctcctccacctccaacaccatctaccagtacgaagacggcgacgacgacatcgactccgtcctcgacgacgtcgacaccgacgacgacgacgtcgacgaggcgtccctcggcgagcccagccactccgaccagctgctgcccagcggagacttctaccagggcgacctgcgcggcgacctcccccacggcgccggcaagtatctctggacggacggcagcatgtacgaggggtcgtggcgcggcggccggcgcggccgggcgcggcaagttctcgtggtcgtcgggcgccatctacgagggcgacctcgccggcgggcgtacgtcaacggcgacgtgtacgacggccactggcgcgacgggctgcaggatgggcacggccggtacatctggcgcggcggccacgagtacatcgggacgtggaaggccggcgagatgcacggccgcgggacggtgatatgggcggacggcgaccggtacgacggcgcgtgggaggacgccaagcccaaggggcagggcacgttccggtggtccgacggcgggatgtacatcggcctgtggtgccaggagtccggcgagacgcaggacaagggcgtgtactacccgccgtccggtggcccggcggtgccgttgccccgggaacccaaggagcagaaggtgctgacatggcccggggtggagcccgtgacgaagaagccggtgtggcggccgccggaggtcgccgctgaccaagggatgtggcggccgccggaggtcggagctgaccaagggaggaggtcgagcaggaggaacagcatgtcgtccgacattgacagcctggttgagggggaggacggcggcgaggagactcgcaacgacaggtcatgggtgcggacaccgtcgtgtatgcgcgcgcccacgctgccgaagccggggaagaagcagggggagaccatctccaagggccacaagaactacgaactgatgctcaacttgcagctgggtatcagacatgctgtaggaaggcagtcagctcctgcttcattggatcttaaatcatcagcatttgatccgaaagagaaggtgtggacaagatttcctcctgaaggatcaaagcatactcctcctcaccagtcatgtgatttccggtggaaggactactgtccattggttttcaggactttgcgcaagctctttgatgttgacccaggagactacatgctctccatttgcggggatgatgcactgctggagctttcatctcccggtaaaagtggaagtttcttttatttcaccaatgatgacaagtacatgatcaaaacaatgaagaaagcagaagttaaagtacttctgaggatgcttccagcctattataaacatgttcgatcttttgataatactctagtaacaaaattttttggcctgcattgtgttaaaattacaggagctattcagaaaaaggttcggtttgttataatggggaatcttttctgctccaactattcaatccacagacgctttgatttgaaaggatcatcacatggtcgcacaacggacaaacccctcgatcaaattgatgagactaccactttgaaggaccttgatctaaatttcattttccggttagagggatcatggtatgaagatttctgcaggagatgcattttaagtcatgggcctgaaaatacttttttcttggttacagacagcagcagtcctgacaacgagacaactcaaactgctcttgaagatgaggaaaaaagaaaagcaccagtcaagctagggattggcatgccctcaagggtggagaatgttgtgaagaatcctgaaagcgaatcccagctcattggcgaaccaacaggggaattccaggacgttatcctgttctttggaatcattgatatcctacaagactatgatatcagcaagaagcttgagcatgcctacaaatccatgcaatatgatcccaactccatatcggctgttgatccaaagcaatactgcaaaaggttcagggacttcatttacagggcttttagtgaagacgtacagtaa

SEQ ID NO: 40012 - DNA, 840 bp, Oryza sativa
  unsure (1)..(840): unsure at all n locations
  Clone ID: PAT_MRT4530_43497C.1
tgctcgtggtttttttgctttgcttttctgttaaggaggaacatcttaaccatcaaatataatacgtccctataataatttataatacgccctataatttcctacaaccatagctttatatacagngaaagatacagctgccatctacacacagttctagatcgcgagcggccttttttttttttttttttttagagaaccatacatttcattcattgaacacttgaatgagagaaaaactgagcctagttaatcaatccaaggcatatagctaaacattctaatcttgttggtacaaatcgtaattacacataaacagcaaacttcaagattgattttggttgaaaaaactacataaaaaactacatagattcaacattagacctagggcaatgaagattcccagagcttataacctgcagtaacccggccaaaagtaaaataaatacttctgcgtcaccccttgcttcatcattgttcttcagccacaagtcgttttgccggcaggatgctttggttttccacttttcattgtgctgccattgtgacaggtacttctgaaggaattatggcttgcaatgtagaccgaattagaatcaattatccctaaggataatcgatcaattaaagactctttgatgaactccacatcttaaactttcagagactgagcagctaatgctttccagaattccaggcaggcaaaaaatcttcaggtggaagatttgtaggttccatgaattaattcaatacaacagggaatcgaagtttgacattaactagtggcgttccaaatttgacaaatcacatctctacttggacagagatcaactaagtgga

SEQ ID NO: 40013 - DNA, 1323 bp, Oryza sativa
  Clone ID: PAT_MRT4530_43498C.1
atgaacccgctccctcccccggccagccggctgtgggaggcgagcatccgcaagctcaagtactccaccatcctccgcggctccgtcgtcccctccggcgccgccttcgatggtgcggcggcggcggccaccggaggtgaccccgtcacgctcaccccaagcctctccgtcagctcctccacctccaacaccatctaccagtacgaagacggcgacgacgacatcgactccgtcctcgacgacgtcgacaccgacgacgacgacgtcgacgaggcgtccctcggcgagcccagccactccgaccagctgctgcccagcggagacttctaccagggcgacctgcgcggcgacctcccccacggcgccggcaagtatctctggacggacggcagcatgtacgaggggtcgtggcgcggcggccgcgcggccgggcgcggcaagttctcgtggtcgtcgggcgccatctacgagggcgacctcgccggcgggtacatgcacggccaaggaacctacatcggcgagctcggggacacgttcgccgggctgtgggcgaacaacctccggcacggccgcggcacgcaggcgtacgtcaacggcgacgtgtacgacggccactggcgcgacgggctgcaggatgggcacggccggtacatctggcgcggcggccacgagtacatcgggacgtggaaggccggcgagatgcacggccgcgggacggtgatatgggcggacggcgaccggtacgacggcgcgtgggaggacgccaagcccaaggggcagggcacgttccggtggtccgacggcgggatgtacatcggcctgtggtgccaggagtccggcgagacgcagggcaagggcgtgtactacccgccgtccggtggcccggcggtgccgttgccccgggaacccaaggaggtgatcacgaagctgctcgaggagctggagatgtccgaggggaagacggtgtcgctgctgccgtcgcagaaggtgctgacatggcccggggtggagcccgtgacgaagaagccggtgtggcggccgccggaggtcgccgctgaccaagggatgtggcggccgccggaggtcggagctgaccaagggaggaggtcgagcaggaggaacagcatgtcgtccgacattgacagcctggttgagggggaggacggcggcgaggagactcgcaacgacaggtcatgggtgcggacaccgtcgtgtatgcgcgcgcccacgctgccgaagccggggaagaagcagggggagaccatctccaagggccacaagaactacgaactgatgctcaacttgcagctgggtatcaggtga

SEQ ID NO: 40014 - DNA, 495 bp, Oryza sativa
  Clone ID: PAT_MRT4530_43499C.1
cccacgcgtccgaaattacaggagctattcagaaaaaggttcggtttgttataatggggaatcttttctgctccaactattcaatccacagacgctttgatttgaaaggatcatcacatggtcgcacaacggacaaacccattgatcaaatcgatgagactaccactttgaaggaccttgatctcaatttcattttccggttagagggatcatggtatgaagatttctgcaggcaattggacaaggattgtgagtttctggagcaagagagaattatggattacagtcttctggttggcgttcacttcaaagaccgatgcaaagatatgttcacactatagtgattgttttgaatacttacagttacaatcttttttgaggagatgcattttaattcatgggcctgaaaatacttttttcatggttacagacagcagcagtcctgacaacgagacaactcaaactgctctttgagatgaggaaagaagaaaagca

SEQ ID NO: 40015 - DNA, 237 bp, Oryza sativa
  unsure (1)..(237): unsure at all n locations
  Clone ID: PAT_MRT4530_4349C.1
aggtataccccgggtggttaaagtttaataggcctgtggccaanacaagggtgtggtgtcccgtgtcacggtaaggtgtagcccggtgtgtggtaaccaaaaggtgcctgtcgtcgtgtcgtgtttgtcggttgtttatnggcttccatccatacactggtaaagacactcaaannggataaaagtgttcaggggctanagaaattttcaangcaggtatccaaaaaaaaaaaaaaa

SEQ ID NO: 40016 - DNA, 205 bp, Oryza sativa
  Clone ID: PAT_MRT4530_434C.1
gtgtataaatatatagggggggagcttccataaatatcattcacatatgcctaacccaacagcagctagactaaccggctcccacaacaaggagatacacacagagatcaggtgaaacaaaaacaaaagcagagcacgcccggttaaatcaaaagacgatgaacaaactgggaacacacaaaacacggtgtcacacatcatggaa

SEQ ID NO: 40017 - DNA, 804 bp, Oryza sativa
  Clone ID: PAT_MRT4530_43500C.1
atgtcatcaaaaagctcgccaagggaactgactggaaagaagaaactgactaaacatgacgatgaagcattaaggtttattgagctggctgagaatggtaccgaccccgcaactatcgatgcatccgaagccaaggtggatgatattattgatggaggtataacacccttagcatgtgcggcatacaatggttcagttacaagcatgaaaacgttgttgcaggctggagctaatgttcagatttcaaagccaatcggcaaagctatagtagctgacctcacttcatctgaatctatggttcagattctacttgattctggtgctaatgcagacgcaattgatgaggtcatgtttgaggacccacccatcattgctgcagccaaaaggaaacagatgaatgttgtccaacttctattgagttcttccaccccaatcgaaggtgttgactggagcttgaatggtataatagcatatacagaatctgttacgtttaaagcagaggacgatgtccatacagcagcaagagttactgcgctgcgtgagcgcatgtttaatgctttggaaaacataaactacttgctagctgatatttgctgtaaagcgctgagaaatgatgtgagtacaacagagtgggacaggttgaggaatctcaatctgctttatctttcacacagtttccatggtcagaaacctgtcctgtcatctgacgccattgttaatatggccttggtttatcaaaaacaggacaagggcaaggaggttatgtgtttgaaggcagcgttggcgctggcccctccaaaatga

SEQ ID NO: 40018 - DNA, 522 bp, Oryza sativa
  Clone ID: PAT_MRT4530_43501C.1
atggatcgctccgtcattgttgccgcttgtaaggtgacacgtcccgatccccagacagacggacgcgcctacgtagtagtagtacgaggcgaccgaccacaaactccggggccttacatcggtcgccacgaagcacacggccacgtcgccgtgagagcaaaaaatcgcgccggccatacggggtcacagctagcatctccccgtggagtcgtacgtggcggcacgtacgtaccggcgggactcccccgcccccgcgcggccgacacgggctcgccattcgccgagtgctgccagccaagcaggcggtgctgcgcgtacgcgtacagtaccggtacacgtcgcctcggcccggtcgcgagctcacgattcggcgcgactcgagacgaggccatgacgccatgtacgtacgccccgtcgcctcgtagtcgtagcacggtagcagcgagcggccccggcacgagagagatcgtcaggttcagtggatcaccgaccaaccgccaacgggatatttcgcgcggatga

SEQ ID NO: 40019 - DNA, 459 bp, Oryza sativa
  Clone ID: PAT_MRT4530_43502C.1
atggagaatggtaatttgtgcaggttgttggaactaggtgctgtagtgctagccgaaaggagctgcctccaaaagtaccagttctcccatggtgatgttgttttgttcaagtgccccagtgatcatagggagttgtttgtcaagagattaattgccctgcctggggagtggatgcagctccctggcacccctgatataattaagatcccagaagggcactgctgggttgaaggtgataatgctgcctgcagctgggattctaggtcatttggcccagaggttgatggtattaaggatagtatgggtggggtacgggtttcgagtgctagtgggatgatagggccccctaggatccctttaggtctaattaaagggagggtggcccacgtcatctggccaccgtcaaagattggacgagttgatacaaaaatgcctgaaaatagaatttcacccctttga

SEQ ID NO: 40020 - DNA, 1476 bp, Oryza sativa
  Clone ID: PAT_MRT4530_43503C.1
atggagacgtcgtacagggaggaagaagcgaggaggaaggcatccctgctccactgcatcttcttcttcctcctcggagctctcgccatggccgcagcgatcgccgttctacacgagtcatcatactgggagtggcgctgtaatcgcctcaccgacatcgtcgttgacggcgacgacggcgatggtccgagcagcagcgaggtggtcgacggcggcggcgagtgggggatggtgaggacgaggggcgcgcagttcgtcgtcggcggcggccggccgttctacgtgaacgggttcaacacgtactggctgatggtcctcgccgtcgacccgtcgacgagggggaaggtcaccgaggtgttccggcaggcggcggcggtcgggctcacggtttgccggacgtgggcgttcaacgacggcgggtggcgggcgctccagaagtcacccggagtctacgacgaggaggtcttcaaggccctggatttcgtggtgagcgaggcgcggaagcacaagatcaggctgattcttccgctgatcaacaactgggacgactacggcggcaaggcgcagtacgtgcggtgggcgcaggccgccgccgccggcgccggcgccgacgccttcttctccgacgagaccgtgaggggctacttcaagagccacgtcacggcggtgctgacgagggtgaacgcgtacacgggcgtggcgtacagggacgacccgaccatcatggcgtgggagctcatgaacgagccgcgctgcgcctccgaccccaccggcgacacgctccaggcgtggatcgcggagatggcgttccacgtcaagtccgtcgacccggcgcacctgctcggcgtcggcgccgaggggttctacggcccgtcctcgccgccggcgcgcctccgggtgaaccccaacgccgacgtcgccctcgccggcgccgacttcgtccgcaaccaccgcgtcctcggcgtcgacttcgcctccgtccacgtctacccggacacttggctgccggcgggcgcgacgaaggaggcgcagctgaggttcgcgacgtcgtgggtggaggcgcacatcgcggacgccgagggcgcgctcggcggcatgccggtgctgttcgcggagttcggggtgtccacgaggggcgcccgggcggcgttcaacgcgacgtcgagggacgcgttcatcgaggcggtgtatggcgcgatgctgcggtcgacgcggcgcggcggcggcggcgcgggggcgctgctgtggcaggtgttcccggagggcacggattacatggacgacggctacgccgtcgtgctgccccgggcggcggccaccgccgggatcgtggcggcgcactccaggcggctgcagtcgttcaactcccggtgcgcgtggagctgccgctggggctgcaacaagagggacaacgacacggctgagacgacgacggcggaggctgacgtcgacgtgtccttccaccacgaactgtaa

SEQ ID NO: 40021 - DNA, 366 bp, Oryza sativa
  Clone ID: PAT_MRT4530_43504C.1
atggagaggatcatcgccatgtccgtggtgggcgcggggcccgggaacgtgttcggcccggggatgagcgccggcgcgctcgagagcttcgtcccgcggcggcaagcgggcgccaccgacaacgcggcggcctcggcggcggcggcggcggagggaacagggcgcggcgcgacaaggccggcggaacaggcgacggcggcggcggaaggcaggagggccggtggcgacggcgtcgcgcggcaactggcgatgcctaatatttccgtgacagcgtacaccgaacaacaattagggccggtctgggcggcgccgccatcggaggcgttcgatggcctcaacttcttcgagaccatcgtgatgaactga

SEQ ID NO: 40022 - DNA, 473 bp, Oryza sativa
  Clone ID: PAT_MRT4530_43505C.1
cgcgcgcgcgcccgcccacccacgcgacgcgacgcgcagcagcaggcagtcagatcagcaggcaggcgaggcagaggcgagtccagcagccgccagcaacctggtcgtgccgtgcgagccatggagaggatcatcgccatgtccgtggtgggcagcaggggcccgggaacgtgttcggcccggggatgagcgccggcgcgctcgagagcttcgtcccgcggcggcaagcgggcgccaccgacaacgcggcggcctcggcggcggcggcggcggagggaacagggcgcggcgcgacaaggccggcggaacaggcgacggcggcggcggaaggcaggagggccggtggcgacggcgtcgcgcgggatcccgcatctctggttttgcggttcgaggatgtttttccggtctgggcggcgccgccatcggaggcgttcgatggcctcaacttcttcgagaccatcgtgatgaactga

SEQ ID NO: 40023 - DNA, 288 bp, Oryza sativa
  Clone ID: PAT_MRT4530_43506C.1
ctcactctatcacttatatggaaggtcacactgccctacgcagggctagttaagggcatggtgatgcaatactgctggaattggctataccttacccctccgttttcagcgtggtagatagtcacggagatgcgaagtgggacatagtcacacgagcggaccgtactcaaaaactactatgctcggtatcaatggattgaatcgtcattaatcctacaggcacagatgcagagactccacttgttggtggacagacgcatggtaatccagaactcgtttccttactgc

SEQ ID NO: 40024 - DNA, 601 bp, Oryza sativa
  unsure (1)..(601): unsure at all n locations
  Clone ID: PAT_MRT4530_43507C.1
cggctcgagcantcatnccccganactaccatgntatgtnctngaccacntcgaatcngcnaatcttcnngtccnctganaccncacatntactcgggnaggtcnaangggggagtggtacccgacaacccctataatagagtacaaagggctcttctctaacattattcncagcgtttcctgacggnaaaggtntcctcctcaccnanggatancctcctcacggctaccccccnccncccggancgtncccctccnccaggggcntatccccctccccccgnggcttntcctccaccacctngggnatncctccacatcatgggtncctcacctggtggccaccctccacctggtggttaccccnacatggtggntacctcctgcgggntaccccgatnatcttggnaccnangggggcatgggaataaccgtggaagaaaattggaaaaanctggttgaagncccctncggttcttcacctattgggngcacaaatttcttctcatggcatggtggaaacatnggcnatngaagcatgaagctttggtgttncggcatggntacggngncnccncggggnnaatttnaacttggaaca

SEQ ID NO: 40025 - DNA, 792 bp, Oryza sativa
  Clone ID: PAT_MRT4530_43508C.1
atggggcagttgagagttcttgtacttggcaacaacccgctcggcggtccgatcccgccggttcttggccagctccagatgctggaggagctccaagtaatggccgccgagcttgtttcaactctgccattgcagttggccgatcttatgaatctctctgtcctgaaccttgcctataacaagctctccggtaacttgccgctggcattcgcccggctgcaggcaatgagggtgttcagaatctcatccaacaatctcacgggtgatatcccgagctcgaattcttcggtgtggacagcaacatgttcactggaaatatcccaccagagcttgggagttggttcatcagggaattcctccaattgcagctctggctcagcattctgcaggctgctctccctcgagaatctagacctttcaaacaacaagctcactggtaagctgcccgactgctggtggaacctgcagaatctgcagttcatggacctctcccacaacgacttctcaggtgaaatctctgcactcgggacaagctacaattgttctcttcattcgcctcgaccttcctttcctgtcgccatcttcaccgtcttgccatatgggactccccatgaccaggcttccaccatcgtcgcccgtgccgacctcctcgacaccagctgtcgcggcatcccactgtcgctagccatcatggccttccacgcaggaacccgcgtgggactcccgccgttgatgctccatcgtgccagcaactccaaccagatctggttcagaggcggcggatccacctga

SEQ ID NO: 40026 - DNA, 329 bp, Oryza sativa
  Clone ID: PAT_MRT4530_43509C.1
aagacaaggaagaaggggtcgtggagggcggaagaggacgcgctgctgacgaggctggtggcgcagcatggcccccaccggtggagcatcatcagcggcgccatcccggggcgctccggcaagtcgtgccggctgcggtggtgcaaccagctgagcccggccgtgcagcaccgccccttcaccccgcaagaggatgccctcctcgccgccgcccatgcccgccacgggaacaagtgggccaccatcgcccgcctcctccccggccgcaccgacaactccgtcaagaaccactggaactccaacctccggagaagctgcagcaatttctc

SEQ ID NO: 40027 - DNA, 561 bp, Oryza sativa
  Clone ID: PAT_MRT4530_4350C.1
gcacgaggcctcgtgccgaattcggcgcgaggcacagcgctcatacccgctgcgcacacaaatccgcctcctcttccgctcgaatttacgattctgcccccctccgctccaccgcgcgaaggcgaagccggtagccatgaagctggaggtgatgccgaagcagagggccatggaggccgagcagagggaggaggccatggagatgagcgggctcgagctgtggaagcacgagaagcccgcgtccatggtggtgttcctcccgccgccgccgccgccgccgccgcttgtgccggcggcggcggccgcggccgcggcggcgtgtggtgaggaggcgacgctggtgccaccgctcaacttcgcgatggtcgacgacggcatcttccgctccggcttccccgcggccgacaacttccggttcctcaagtcgctcaacctccgctccatcgtgtacctgtgcccggagccgtacccggagacgaacgcggagttcctcgccaagaacgggatcaagctccaccagttcggaatcgaggggcgcaaggaaccattcgtcaccatccc

SEQ ID NO: 40028 - DNA, 225 bp, Oryza sativa
  Clone ID: PAT_MRT4530_43510C.1
gcgtccgaggtcgcttgtgcggacgcgtacctatacacgggtatgagagccatggaagcaggacaaaggcagcgccggagacgacagagacgactttctcacacgtcatcgcatcgctaaatgtgattgcctacgtggctgcgaactaagactcgactctgttgttgtcggacaggaccctactcctaataagacctaagaccttgctctgtgtaagactctagt

SEQ ID NO: 40029 - DNA, 197 bp, Oryza sativa
  Clone ID: PAT_MRT4530_43511C.1
aagaagaagctaaaagccaaggtgatggattgtggtctaattacctagacatcgagcatgtgaaaactatgtgccagggaatgccatctgatagctggcatggtgaaaacatgaagcatccgatacttggaaacggtctttcacatgaagacatcactgaagtacctaacactaccaacttcttgaatgctgttgac

SEQ ID NO: 40030 - DNA, 336 bp, Oryza sativa
  Clone ID: PAT_MRT4530_43512C.1
atggcgcgggcgctgggcgatgccgcgtcggattgcaatagtgcgcggggtggaatttttgcgaaaaagtccttcgcttttggtgtcattcgatacatcatctccgagagtctccgcctcgcgccgtcgccatcgccgagcacgagctttgaggcgaacatggagaaagtgaggaggcgagcactcctctcctcttctcctctcgtccctcctctgcatgtcgtcaacctgccgccgtcgtcgctgccgtcatcaacttgcctcgggtttcgtatggggaagaaagagggggaaaggggctgccgacggccgtatgggggagaagctccgctgtag

SEQ ID NO: 40031 - DNA, 882 bp, Oryza sativa
  Clone ID: PAT_MRT4530_43513C.1
atggcgaggccgctgtacccgatgatgctggagagcccgcagctgcggtgggcgttcgtccggaaggtgtacgccatcctctccatccagatgctgctcaccatcgccgtcgcctccgtcgtcgtcttcgtccgccccgtcgccctcttcttcgtctccacccccgccggcttcgccctctacatcttcctcatcatcctccccttcatcgtgctttgcccgctctactactactaccagcgccacccggtgaacctcctcctgctggccctcttcacggcggcgatcagcttcgccgtgggcctcacctgcgcgttcaccaagggcgaggtgatcctcgagtcggcgatcctgacggccgcggtggtggtgagcctgacggcgtacacgttctgggcggcgcggcgcggccacgacttcagcttcctcggcccgttcctcttcgccgccgtcatgatcctcatggtgttcgcgctcatccaggtcttcttcccgctcgggagggtctcgctgatgatctacggtggcctcgccgcgctcgtgttctgcggctacatcgtgtacgacacggataacctcatcaagaggtactcctacgacgagtatgtctgggccgccgtcgcgctctacctcgacgtcatcaacctcttcctctccctcctcaccctcttcagggcatccgattcgtagattgcttgtgtatctaaagcttcttggatgagagatttctgttgttgtgctttgcttgtgcccgcttgactaattaacctgtaaaataagtaatcgctgatatgatttttgtttgtgttgtaatttgccttcgatgaaatgatagatttgctctgcgcctgcaaaaaaaaaaaaaaaaaaaaaaaaaaaaaa

SEQ ID NO: 40032 - DNA, 645 bp, Oryza sativa
  Clone ID: PAT_MRT4530_43514C.1
atgggggatgtgtcgttgaacccgccgatcaacgccgagccgctgaccaagggagatcaattcctggacttgatgtcagatggatggacaaatgagaggcacagcttgtacataagctccatggaggcatccttcatggaacaactctataggcatgaccaccatgggcttgacaggaataggagtcatgcgggtggcgcaattgggttcagggtgcaccgggagggtgtgtgcgacaacctaaggtctgagaggaatgatgctcacgctcatgatggaggcatgagctgcttccctgagaatccatggataaggcgtttcagaccacgcgatgccggtgtgaaccgcaagaatgatgcggtggggttttctgtggatgacgatgagtcgggtactgacatggtccgacagagggttcgggtgcatggaagagaagcgaagagttgtgctggaggaattcttgctgataaaagcacaggttgttccatccggaaaatcacccgcagcgacaaaaagccagcgaagaccaggagtttcgtcgagactgaaaggaagattggagaacatgggttgggttggaatcttgctcaacttgttgtggtgatgggcacttgtgctgctgctagtcctcagttgactaactga

SEQ ID NO: 40033 - DNA, 388 bp, Oryza sativa
  Clone ID: PAT_MRT4530_43515C.1
ccgacgcagtgacgaggtcatgcacgtacttgatggcaagatcctgggcaatcctgacttgatcatcgataactacagtgacagcatcctcgttgcatgcactgcttgcacacaagatgggtgccacccattgtaccgtcggccatgcgcttgagactaccaagtcccactactctgacctctactggaagacgactgaggatcactaccacttctaatgccagtacacaactgacttgcttgcgatgtaccacgctgacttcatcatcaccagtaccttccaagagattgccgggaacaaggacactgctggtcagcatgagtctcacatggcattcaccatgcctggtctgtaccgagatgtacacagcattgatgctaccgaccc

SEQ ID NO: 40034 - DNA, 318 bp, Oryza sativa
  Clone ID: PAT_MRT4530_43516C.1
atgaatgaagatggctatttggaggatagaattgggactgaggtgatgaatattaatgccataaaagtgaagcagacctcggagaaaatcgccggcaggcagaccgaggccgaaccggaagaaggggaggaagaccatgatctcgtctgtgttcggggggggaggactcctactgcttcctctatcatcgacggtgtccaggcggtggcctggttcgggattggcacagattctgccatcgactacgacatcagggccgcggaaagcaaagagcttcggcgagagaagtggggcggtggaaaatctcgcccaatctga

SEQ ID NO: 40035 - DNA, 429 bp, Oryza sativa
  Clone ID: PAT_MRT4530_43517C.1
atggcggagcagagggcggcgagggagcggagtggagggcgccaagggagtgcgcgaagccgtgaagcccgaggcgacgacagcggtgggaagatcgggagccgggtgcggctgccgtggcgcggtgggaagttcgggtgctggatgcggctaccggcgccggccaaggtcaaggtcattgggagggcgccggtccgccgccgggttcgcaagcttgtgcgccaccccgtccgccgtttccccggtcaatcccgccgccggagcttgcttctcctcgcgcgccgtgccggagacgagagcgacgacacggaggaggtgactgacacgtcggcgtccttcgccaccaaggagggcgtcgtcgccgccaagacggacgatgtggcggcaagaaggccaaggacggtggcggcggcggcgcggtgctggtga

SEQ ID NO: 40036 - DNA, 464 bp, Oryza sativa
  unsure (1)..(464): unsure at all n locations
  Clone ID: PAT_MRT4530_43518C.1
catctnatgggtgtnctgggtcttctccaagtccgtcacggcgcaacanctgggctccggcttgaagggcttgggcgttggggccttctcgctcgantggacagctatctcttccttcctcttcagcccgctcatctcgcccttctttgccaccgccaacatcttcgtcggcttcgtgctcttcctctatgtgctcgttcccatagcatactggggtttcgacctgtacaatgccaagacattccccatcttctcctcgnacctattcatgtccaatggcacgagctacgatatcacagccatcgtgnaacgacaagtttgagcttgatatcgatgctttacaaataagnttggcagggatcaacctcagtgtgttcttcgcgctcgctttatgggtctaagtttttgccacccattgnctccactggtaaaccacggtngggcctcttnctatgggaaaggaa

SEQ ID NO: 40037 - DNA, 2448 bp, Oryza sativa
  Clone ID: PAT_MRT4530_43519C.1
atggagagggagccgcggagaggagaggtggagtggaggagagggggcaagcggaggggaggagaggctgaaagggccggtcggccgggagaggtggagggcggcgccacgacggcagtcggcggcggcggcggcagcggcagcacggcgaagctccgcggcggcctgccagaaaaggttgcggttgtgcagcacaaataccttgtgttctttgcctactctcgtgcatgtgtattcaccagtggcggcggcggcagcggtgggaagttcgggtgctggatgcggctaccggcgctggccaaggtcaaggtcatcgggagggcgccgcacgcccgcaccttcctctctctttttcctttctcggccgagccctcccgagctctccatcgctcccgcgcctctcatcccgccatccgccgctcgccgccaagctccggccgcactccgccaccgctagagccgtcgccgcaccgcgccgtcgacgccgccgggttcgcaagcttgtgcgccaccccgtccgccgtttccccggtcaatcccgccgccggagcttgcttctcctcgcgcgccgccggagttgtccctcgacacgccgcggagttcttgtacactcgacgaggggagaaatggcataattcttgccgtgcgcggcgccggtgcagtgccggagacgagagcgacgacacggaggaggccaaggacggtggcggcggcggcgcggtgctggtgacggtggacggcgacgtggagctggagatggagacgctactgaaggcgtcggcgtacatcctgggcgcggcgggcagcagcatcgtgtacatggcggtgctggacgacggcgccgtgctggcggtgcgcaggatcgatagcgacgacgcatcgcccgcggcatggcgagagggctggccttcctccacgacaagaagttcgtgcggcaacgtccggccgagcaacatcctgctcgacgccgacatggagccgctattgacggacctcagaatctaccggctcatccgcggcgggggcacgctcaagccggcagcagcggcagcgccggggcagttcgggagcaagcggtcggcgaagtgcttgccggacctgtcgccgccgggcgcgaggccgctggcggggccgtccgggtccggtgacgcggcggcacagtaccaggagaggagcgagccagagctgatgctgagcagcaacaaccacaccctcgtctacacctgcgacaacgtgcggtgcagtgcccgcacagcaactacgcgctcggcttcctcgaccgcttgctctgctgctcgcggcgtctactcctccactccaccagagcgaaactgcaaggcggcaatggaggccggagatggaagaggaggaggagcggaggaggaggaggaggagcaggtgatgagcgaggtgcacctgggatgcccgccccgcttctccgggctctacgtctcccgcttcagcttctcctcccgcccgctagggccatctgcgggcagcgacggcggagaatgtagcggtgtgcgcgagcaggtcgcggcgtcgagcagttcttgtggttcgcctgacgctgttaccgtggatgaggacggggatctcgttcttgacaggagaagaaggaacagaggcaggagtgatcatgtgctcactgttcagcatggtatcacctcctctcttaggagcgttggtctccaggtttggaaggcggcattgctattaactgattttgtattgcataagagctttacatcgtctgagtttaatggtgttactgccatagagatcggtgctgggacaggtttggtagggttggcactagctcgagttgctaagaaaatcttcattacagataggggctctgatatcctcgataactgcttggctaatgtccaacttaactcaagcatgctaaagtttgatgaagctaaagcctgtgtgcgggaactggattggaaaatgtcatggcctccacctgtgtttaaatgtgattcatctgatccaagttcaaaatacttatggtatacaagtgaaatcgaggcggctgagaaagctacaacactatttgctgcggatgttatttacagtgacgatctgactgatctgtttttcagcatagcaaagaaactgatgtctcatggtgctgagaaggtattgtacttgaccctggagaagagatataacttcagtatggacgaactagatgttgtagccaatggttacaagcacttccgaagtttcttcacggttcaggatgaaagcggagctctggatgataattcatgtagaccagattttgttggagagcagatggaccttgcagaggttcctcagtacatcagagaatatgacaggggcaaagatttggagatgtggaagataatgatgatgatcaccatgacggcgaagcatgcgcaggttccaaccgcagaatcctacaaccacgagtag

SEQ ID NO: 40038 - DNA, 164 bp, Oryza sativa
  Clone ID: PAT_MRT4530_4351C.1
ggcggccaacctgctccattgcgccgccgtgtgtgtacgtggacattttgacgccgacgccgacgtgccaggctgccagccaaggcggctcaaagcagagcggcgagagcgacggcggcgaccgagaatactgcggcggaaaagcaggataaaaacgggggggg

SEQ ID NO: 40039 - DNA, 462 bp, Oryza sativa
  Clone ID: PAT_MRT4530_43520C.1
atggtggagaggtggtgtggtctagtggcgtcgatgccatcacccgcccagcgccatgccgccggattcgttgccaagatcaacgacaacagccacagcctgccgcatttagggaggagaggggagaaggggaaggaggccgccaccctatctctctccctattggccgccaccctcagtcggcactgtcgagctagtccttcctcggtgagcttgttccttcacggcaagatcgtcttcacgtgctgcccctcgtggaaggagaggagtggccccccgcaacgaagccgaggccatcactttgcccgcgtcccggcagctctttccagtttgtcgctctctcccgctagctgctgttgctcgcctagctcctctccctctgctcgcctcctactgcctgcatttggagaggaagatcgaggtgagaaggcgggagaaggcacgctggtccaaaggagatag

SEQ ID NO: 40040 - DNA, 101 bp, Oryza sativa
  Clone ID: PAT_MRT4530_43521C.1
atgtactagcccaaggatcattgattttatacttatcaccagaagttcactgaactctcattcttaggagacgcaccctctacacacctgataaaaccacg

SEQ ID NO: 40041 - DNA, 366 bp, Oryza sativa
  Clone ID: PAT_MRT4530_43522C.1
atgcctcgcttgctgctcttctgcttggtgtcgagccagctcgccatgaccgccgtgatgggccggccattccctctcttctacggcggcggcggcggcgcggcggcgagcatcgcagatgcgcctacttcttcttcttcttcagatggtggtggtggtggtggtcatctactgcatgtgtattctcttctcgagtcgagcttcgcggagtcgccgatgagctcgcaccaccgcaaccacagcccgttcgaccggaagttcgccggcggcaaggtgatactgggcggcctggcggcggccatcttcgccgccgtcttctgctacatccggatcacgaggaggaagaagatcgagcccaaatcttga

SEQ ID NO: 40042 - DNA, 2539 bp, Oryza sativa
  Clone ID: PAT_MRT4530_43523C.1
acggcgtcgtcgcactaccgcccggcggggggcgcgcgcccctcctctccttctcctctgttgctcggctggaaagagaagaaaagaagagaggaagaagaagatgagaggagagagaaaaagaaaagaaaaagaaaggaagattgacaggtcttgaggagtctcctaacctattagatgaggggggtcaatctcaggacatcgagcaaggggcgagggcggctcaggttattcacccggtggccaatgcgaggccgggagcgaggggaaaatgcgggggcgttcctgcccaacccggtccagccccgccccgctgccacccctaattgccattgggaacatcttcgcagcgcacgtcaccatcgtcttcttggccggagtccgccgtcgtagggctattggcttgccgataaccatcctgtgggcggcgaaccagctgggccggtgggccgcgacgtacgcactcagcaagctcgccctcggcagcacgccgcaggagctggagctggtgacgctctggggggctttcctgctgctccatgccgctggtccggacaacatcaccgcctactccttggaggacaatgttctgtcgacgcgccagaaggtagaaatgatcttgcaggtatcaggagcagcatttgccatgtacaagaatatagtcatcagaagcgggtccggtacgatggtctggatctcttctttcatgttcatcatgggcatttttaagtattgggagagggcgaaagctatgcagctcgccaacctagaaaacttgcgaagctcaatcaagaagaagaaggagacaaggagacgacgaagcttgagaaatattaggcgtccaagcagttcaaagcatgataatgacgaggaggcactgctggttgctcatggcctgctcgacatcaccaaaggcgccttcgtcgattcttcaatcaacgagcatcaaatccctgtctatgctggcaggagacgagagatatttcctaagagtggctgggggatgatgtacaaggtggtcgacatggagctctccctcatgtacgacattctctacaccaaggcggccatggtgcacacctggcatggctacgccatgcgtgccgcctctccgttcgccacatccatggccttcatgttgttttggtttgacagcaagcaaggtcagcggatgaccgacgttttgataacctatgtcttgctgggaggtacagtcctcctagacatcatatggcttctcagagcagtggcatcaacatggacctattcgttcctcaatgataggccacacctgtgggttcatcacgcgttattgtgctctgggaagtggcgccagctccatcgttccattgtctccctggatccgtcattgatcctcgccaaggaaccaagtagctacaggaagtggtctggaaaaattgggcagtataacttgttgcacgagtgcactcgtgacaaggaccaaaggaccagggaatacttgagctctgtggtgaagaaagtagcatcggagggcatgtggatggagtacgagtaccacaacttgagggttgaagacatggaggaggtggaggaggaggagaagaagaagaaagaggcggagaagaagccaaaactgctgatgatgcttcctgagcatcacaatgttgagaacattcggaaattggaagaagctctggattttcttcctgaatttcaggagtccattcttatcatgcacatcgctacggatattgtcttcatgtatactaaatttgaacaaaatgcagcatcgtccaagtccaaagacaatgtgaagatgatcaaggccttgtcggattacatgatgttcctcgtcgcggtgcgacccaccatgctacctggtcttaagctgcgcagcctgtacgaagctactaaggaagctcttgccaaaatatggtctaagaaagaatcttcccgctgtagctccagaacaagacaaaagtgtcttgctaacatcttgcgatgcatggagaacaaaaagagagggacaaggccggataaatccgacaactggaggctaggctacaggacccggaactgggaaccagactatacaaccgatctttacaacgttagtattgttctgtcagatgggattaaactagctgatcatttgctgcaatggctacatggtaattgctgggtcaaatttcccgaatgtgaatactcttacgaggcaaaatttgcacagatgtttccgaaattgagggaaatcctgaacgagcggccgatgtccgaccaccccgataaatggtcgcaactgttggaacacatcttcttggagtgggtgcgtctgctgattaacgcgtccgtcaagtgtacaagagattctcacgccaagcagctcagccgtggtggtgagctcaccaccatcgtttggatcctggttgaacacgctggcttattccgcgttgaccgtcaaaagagatgaaattaactgtttgttgattcctactgaatcgaggggttcatatataagttgagacggcctgtccttctcttgtggtctgtaacctgt

SEQ ID NO: 40043 - DNA, 373 bp, Oryza sativa
  Clone ID: PAT_MRT4530_43524C.1
tttttttttttgttttttttttattttttcggttttgccctttccccttttttttttttttttttttgggccgggaaaaccttttttttttgcaggaagacccaaaaaaaagacccccgattttggccttagccataatcaaaccctggattggcaaatttttaaactttaacatcccaggaaaaaaatccaaaggttttgacggggtttttttttttaggggggggtgccaaaaaaagggtaagctaaaactggaattacaaagatggctaagggaggttcccattttaagactaggccatcaaggctgggggggggggagcccttggcccacggggaacaagggggaaagggttcctttgggggaacaatt

SEQ ID NO: 40044 - DNA, 2208 bp, Oryza sativa
  Clone ID: PAT_MRT4530_43525C.1
atgcctggatggatggttcgcacggtgttcttgctcaattcgtgggtaatccgggcgttggtagtattcagcttcgcagcgcatgtcaccatcatcttcttggccggagtccgccgtcgtagggctatcggcttgccgataaccatcctgtgggcggcgaaccagctgggccggtgggccgcgacgtacgcgctcagcaagctcgccctcggcagcacgacgcaggagctggagctggagctggtgacgctctggggggcgttcctgctgctccatgccgctggtccggacaacatcaccgcctactccttggaggacaatgttctgtcgacgcgccagaaggtagaaatgatcttgcaggtatcaggagcagcatttgccatgtacaagaatatagtcatcagaagcgggtccggtacgatggtctggatctcttctttcatgttcatcatgggcatttttaagtattgggagagggcgaaagctatgcagctcgccaacctagaaaacttgcgaagctcaatcaagaagaagaaggagacaaggagacgacgaagcttgagaaatattaggcgtccaagcagttcaaagcatgataatgacgaggaggcactgctggttgctcatggcctgctcgacatcaccaaaggcgccttcgtcgattcttcaatcaacgagcatcaaatccctgtctatgctggcaggagacgagagatatttcctaagagtggctgggggatgatgtacaaggtggtcgacatggagctctccctcatgtacgacattctctacaccaaggcggccatggtgcacacatggcatggctacgccatgcgtgccgcctctccgttcgccacatccatggccttcatgttgttttggtttgacagcaagcaaggtcagcggatgaccgatgttttgataacctatttcttgctgggaggtacagtcctcctagacatcatatggcttctcagagcagtggcatcaacatggacctattcgttcctcaatgataggccacacctgtgggttcatcacgcgtttttgtgctctgggaagtggcgccagctccatcgttccattgtctccctggatccgtcgttgatcctcgccaaggaaccaagtagctacaggaagtggtctggaaaaattggacagtataacttgttacacaagtacactcatgacaaggacgaaaggaccagagattacttgagctatgtggtagagaaagtagcatcggaagacatctcgatggagtacgaataccacaacttgaggggtattcatatttctgtggatttcaagaagaacttgttggattgtatttgggactatatgtatttagcatacccagttgaagacgtggaggagaagaagaaggagaaggaggagaagaagaagaagaagaagaagggaacggcggagaagaagccagatccgccgatgaagccggctgagcaccacaatattgagaacattcggaaattggaagaagctctggattttcttcctgaatttcaggagtccattcttatcatgcacatcactacgaatgtcgtcttcatgtacactgaatctgaacaaaatgcagaatcgtccaagtccaaagacaatgtggagctgcgcagcctgtatgaagctaccgaggatgctcttgccaaaatatggtctaagaaagaatcttcccgctgcagctccagatcaagacaaaagtgtcttgctgacatcctgcgatgcatggagaacaaaaggagagagaaaaggccggataaatccgacaactggaggctaggctacaggacccggaactggcaaccagactatacaaccgacctttacagcattagtattgttctgtccgatgggattaaactagctgatcatttgctgcaatggctgcatcgtaattactgggttaaatttcccaaatctgaatactcgtacgaggcaaaatttgcacagatgtttccgaaattgagaaaaatcctgaacgggcgctcgatgtacgactaccccgataaatggtcgcgactgctggaacacatcttcttagagtgggtgcgtctgctgattaacgcgtccgtcaagtgtacaagagattctcacgccaagcagctgagccgtggtggtgagctcacgaccgtcgtttggatcctagttgaacacgcgggcgtatttcgcgtcgaccgtcaaaagagatga

SEQ ID NO: 40045 - DNA, 569 bp, Oryza sativa
  unsure (1)..(569): unsure at all n locations
  Clone ID: PAT_MRT4530_43526C.1
cggaatctccagctacaacgaggcgttctgctgctgcacgccgcgggagggggatcgtggatggcgtggaggagaagctggatctcggggaggagaagctggcggcgacgagggaggtgatgagcgcagtacggcaacacgcgtagctccaccatcttcttggcgatggaggagatgcggaggaggtcagaggagcgagggatggcgacggcgggggaaggcctcgagtgggggatgctcatcgccttcggccccggactcacccttggagaccatgctgctccgcgcgctgccacgcaacaattagctatgcacatacgccaaaatgtgatattgatcgaccagtactacacgaataaattaagtagggatgtgttatatttccagcattacgtgacaccagtaaataaataccaagatcgtcgtgttaattgctgcttgttagttgttactcgncggttaatttagttggtttcggaaccaactgaagtattgtggacgcctggatcattgtaataattatcctatttggaataaagttatgtgtgatcaaaaaaaaaaaaaaaaaa

SEQ ID NO: 40046 - DNA, 538 bp, Oryza sativa
  Clone ID: PAT_MRT4530_43527C.1
atgccgctcctccacatctccctcccgccgcaccgcctcctcctcgtcgccggcggccgccgccgccgccgccggctgctactcctcccgccgtctccccgccgcgtctgcgtaagggcggcggcgtcggtggagttggaggtggccgcggccgcgggggagtacgggctccccttcccgtcggagcgcgccgcccaccaccgcgagctcgccgcggccgccgccgccgtcgagcgcgcctgccgcctctgcgtagacagaaaattgggcaccggcgtctcatgttctagatttcccggcaatacactgggagaaatgtttaacgagcaactaattttcatgaagcatgctctttcgaggtcatctaatgctgataacagtagcaatgtgcttgttgagtcaatttcaagtgctgttgccgacaatgtgagtaacaccgattcacttttaactcatgatgatgtgctgagagctattgacaaaggaggcaaggatagtgcatcctttgattcaaatcccgctacttattgggtaggtg

SEQ ID NO: 40047 - DNA, 1532 bp, Oryza sativa
  Clone ID: PAT_MRT4530_43528C.1
cagaggggaacagtgtattctgtcatgcatatctgttgctgtaatgatattagaggtgataagtgatatggacatgtttgcaaggtttctctcctggatgagagaccaaatacagcttgatggtcggtgaggtaaaatgctaccccaaaaaaaatgtgtcatgtgtggagctatatatgcaacattgcagctacttagtaattcgccttgatcaattcagcaagcttgttgtgcaggacgccgttggtgatgagaatgccaccatgagggtaaatgtctctgcgcccagttaggtcagcttcaagatccaaaggttcccctctccagtcagtaaccttgaggcttttcgtccgtgctttaaggacgaaaactgaggctctcccataggctacagtaaggtacttgcacaaactgccagagaaaacatatgaagtaagaagttcattctcatctctaggtttcgattcatccgtcgttgagttgaacacaacagatagtggtatcatattccaggtttggttatcggaaaggcaatagcgtgccttgtgtacaacagaacaagaatccacgaagcatctgttccaagtatcctttgacgtagtgaactggccaaactcatcatacaggcgcttagtccaagcaccacaaccctcatgagcaatcataaggatcccacgatcataacgggaagcaatgctgtcatcttttctgttggctatggtatcactggcccaattaggacttcccatgactcctgctactacttttccattcaccacaagagccaagcccaccacatacagagtatcatccactttcgagaaaccttgtgtaccatcaattggatcaagtacccaataagtagcgggatttgaatcaaaggatgcactatccttgcctcctttgtcaatagctctcagcacatcatcatgagttaaaagtgaatcggtgttactcacattgtcggcaacagcacttgaaattgactcaacaagcacattgctactgttatcagcattagatgaccttaaagaagctgaatcctcttctgccacaagaggaattgatggaaacgatcgctggagctgaaagcagtgatctcttgacctgtcaacatgtacgatcagcattcgggccttctcttcacagtgaaatgtcaagcattcacatttgctcgaaagagcatgcttcatgaaaattagttgctcgttaaacatttctcccagtgtattgccgggaaatctagaacatgagacgccggtgcccaattttctgtctacgcagaggcggcaggcgcgctcgacggcggcggcggccgcggcgagctcgcggtggtgggcggcgcgctccgacgggaaggggagcccgtactcccccgcggccgcggccacctccaactccaccgacgccgccgcccttacgcagacgcggcggggagacggcgggaggagtagcagccggcggcggcggcggcggccgccggcgacgaggaggaggcggtgcggcgggagggagatgtggaggagcggcat

SEQ ID NO: 40048 - DNA, 1856 bp, Oryza sativa
  Clone ID: PAT_MRT4530_43529C.1
tatgggaattggcctcgagccaagaatcggcacgaggcgcgacgcgtggcacagtactctagctagctaccgcctcccggggaagaggagaaatcgaaggcatccaaccattcgtcatgcatctagcttccacaagactttcgatcgatttcactacaagaagaaccctagttagttagcaagtataattagctcactagctagtactagcagccatggttgttcaattgatgctcttcttccatgacaaattcatggctccaatggcagaggagccactgcccttcgtcctcatcatgatcatcatcttgctgctgctggtgcttcttcactactacctgtctgcatcaaccagaagatcatcggcggcgagcaagagcaacgatgatgtcctgccaccgtcgcctccgaggctgccggtgataggccacatgcacctcgtcggctccaaccctcacgtctccctccgcgacctcgccgagaagcacgccgccgacggcttcatgctcctccagctcggccaggtgcgcaacctcgtcgtctcgtccccgcgcgccgccgaggccgtcctccgggctcacgaccacgtgttcgcgtcgcggccgcgctccgccatcgccgacatcctcgcctatggctcctccaacatctccttctccccctacggcgactactggcgcaaggcgaggaagctcgtcgccgcccacttgctcagccccaagaaggtccagtcgctccgccgtggccgcgaggaggaggtgggcatcgccgtcgccaagctccacaaggtggcggccgcgggcgccgccgtcgacatgagggagctgctcggctccttcaccaacgacgtcctgtgccgcgccgtgtgcgggaagtcgtcgttccggcgagaaggccggaacaagctgttcatggagctcgccgccggcaacgctgatcagtacgctggcttcaacctggaagactacttcccgagcttggcgaaggtggatctgctgaggcgagtggtgagcgccgacaccaagaagctcaaggagaagtgggacagtgttcttggtgacatcgtaagcgagcatgaaaagaaatcgtcgctgcgtcgtgacgatcaagtacagatggatgatgatgatcaggaggagcaagagtcagatttcgttgatattctgctcgatcgtcaacaggagtacaatctaaccaggcacaatatccatgccatattgatggacatgtttgcagcggggacggacacttcatatatagcccttgaatttgctatgtccgagctcataagaaaaccacatctcatgaccaaactacaagatgaagttaggaagaacacaactaccaaaatggtaagtgaagatgacttgaacaatatgccctacctaaaagccgtcgtaaaggagacacttcggttgcatccaccagttccgctcctcctcccgcgcctctccatggctcagtgcaatgccaatggttatacaatcccagccaacacacgtgtcatcatcaatgtttgggctcttggcagagatgctagatgttgggagaattcagaagagttcatgccagagaggtttatggatagtggagacactatagataatgttgatttcaagggaaccgactttcagtttctcccatttggagctggacgaaggatttgtcctgggatgaattttgggatggcctctgttgagctcatgctatcaaaccttatgtattgctttgactgggagctcccggttggaatggacaaagatgatgtcgatatgacagatcagttcgcacttacaatggcgcgaaaagagaaactctacctcatcccgagatcacacgttatcaagatcacataa

SEQ ID NO: 40049 - DNA, 429 bp, Oryza sativa
  Clone ID: PAT_MRT4530_4352C.1
ttttgggttttttttttttttggggttttttttttttttttttttttttttttttttttttttttaaagggaacaattttcacctggagaaaaaggtaaacgggtttgcagccaattttaaacaaagggcaaacattcactttccaagaaaaccccagggggtttataaaataagcaaacaaaagattaaaaaaaaggggcaagtcgggattagataaggcctcaaccaaaaagatgggttcttgggggaaggggccccaaaaaacggggcataaaatcgggtgggatcccgggtgttttgggggggggttgggtttttgggcccgggggataagaaaagttttttggggggccaggttttttggttttgccgggcctttaacgggggggaaagggggttttggcatggccttggctgaggcccggggg

SEQ ID NO: 40050 - DNA, 231 bp, Oryza sativa
  Clone ID: PAT_MRT4530_43530C.1
tttggttttttaataattttggttttttatttattttttttttattttttttactattttatcttttcaacttctttgttacctcaaaaataactacctatacaataagattcaactataccaaagaccaacaaatacatttattaaccctttacataaaagaaaccaacactatttttaaaagcgacaactacagaccagagaagtatcctaaaatttgggctgacctta

SEQ ID NO: 40051 - DNA, 288 bp, Oryza sativa
  Clone ID: PAT_MRT4530_43531C.1
atgagggtgacggagaggctgagggctctcctctcttggtctggtcggctctgggtgtgaagtggagatgggcgacgcgtctgggagaggttgaaggcgagcttggcgatgccacgccgagtccacgcgtcgagcaggtcgttctctcggttcccctctctctttcggctgtttttcttgaatgctggtcgggtagagcggtggaggagaagatggacagggcgtgggcaagccagggaggctgccaggtgggcccagacaacggcgacgccttttggtgtcgttccc

SEQ ID NO: 40052 - DNA, 259 bp, Oryza sativa
  Clone ID: PAT_MRT4530_43532C.1
gctctgggttaaacgcaaatggcgatccataacagaacatcaattgcacatgaccgggtaggcatgctccacactgggaactgtgagccgcccaaccagtagaggcttgagatcaccatacacatagacctgaaggctgctacaagtcatacacacaatttaatttcatggctcgttccattcgacaaccatattaacatgagcttgcattacttctagcttgactatgctggggggcacgaaaaggcataccgtgcag

SEQ ID NO: 40053 - DNA, 665 bp, Oryza sativa
  unsure (1)..(665): unsure at all n locations
  Clone ID: PAT_MRT4530_43533C.1
agnacnacccgttctacgcttncttgnggtangcgncgccgcanaacgtgcngatgaccgcnatggcgcagnnnngcaggccttnatgntccagcagcagatgatgatggccgncgccgncngccgccgcntcggcgcaccccgcactcaggtgttccaaccaccaccagctgcagcagcagcatctccaggccaacccggcgaacccagttcggcaacccgttcgccgccgccgcagccgcccaccacccttacggcgccgccgccgccgccggcaacggctacacggggctcatatgatgatcatcatccagctccggcgatgtcggtcgtcgtcgcactacttccaatgtcgattcttttttggctggaaaaatttgtagctttctctcattgttgatggtttgtagcacacacaggtagaagaagaagaagaattcggtggtgttcgtccgattcggacacgtcacacgtaggtgcttggggtaatgtatgtacgtatgcatgtatgtatatgggtatgggtatttttggtatttcttcatgtgggtgggtgattcgggataagattaattattggattattcatggacattgatcgagtacgattacataataaaaaaaaaaaaaaaattatttgtagtgtaacaaaaaaaaaaaaaaaa

SEQ ID NO: 40054 - DNA, 241 bp, Oryza sativa
  unsure (1)..(241): unsure at all n locations
  Clone ID: PAT_MRT4530_43534C.1
gcgagcctngtgggcgttcggcctcgtcgtgtcccgcgctgtctggttttggtggcgctcgcgttccacccggcgaacgcgcgcctntggatggtnccccggggctcgtcctcctcggcacgcccatcctcgcgtggctctccctctgcctgtccagccgcccgtgcgccnccgtccgcgacgcgccggtgcgcgtgtaggagctcctcgcaagagtntcgcgcattgtnttggctngctt

SEQ ID NO: 40055 - DNA, 570 bp, Oryza sativa
  Clone ID: PAT_MRT4530_43535C.1
atggcacggccacggcggggcggcggccgcggcgcatcgtcggggttcaccgccaacggcaacgacgcacggcttcctctctctctcctacccatcgcgtccgtgcatgagaaatttttcatgtgctgcatggacggctgtgacgacgatgtcgtcgctagtgccaccggcctcggggcgctcgcttgcgtcgctcatcctggcgtactccgtcatgctcaacgcctcaaccgcgcctacctcctcacgccggccgtcgctgcgggcctcctcgccgccgtgctcctcatctccctcgtcgacttctccactttctccgcctcctcacagaccttattacctcgaccgttccgtgctcgtgcttatgaccctggacaaaatcgagacgcggctgccggagcagttcatggcgcgccgcattcgcgcgcacagtggaacgcggcgctggggtgcccggcgttcgcggagaagcaccgatcgtggtcgcctaacccggtggcgctgcaggaccccgaggcgacgccgtgcagcgagctgttggtacatgttcctcctcgcagcagagcatag

SEQ ID NO: 40056 - DNA, 542 bp, Oryza sativa
  Clone ID: PAT_MRT4530_43536C.1
ctgcttctctcgccgccgccgccgccgccgccgccgctcaccgtcaccggagaagagggcatgaggaggaggaggaggaggagggcggacccatggaaccccaccccgaagacgacctcatgaacgaaaacaacccacgcccgctcgacgaaaacgacctaaggcctcctacaagacctacccgtcttggaccttactaaaccaacattaaaaaggatgagaacgaaatcaaagaaatggcagaaaaagataaatgatctctgtgaaattaatgattctgacactggattggctccacctagcctgtgggaccttttctccgacatgcacatgatgcactacgagctacccctgcaggttgcaagattcacaaacatcatcagccctatcacccactatgctaagtatgccatcattgcctaccaaaatacgaagatcgtcgttcggctggtcctccccgtctagctcactgatctcgccgactgcgagcgcaccaaagccgataccaacatcacttactcttaagctgcttctgcagctat

SEQ ID NO: 40057 - DNA, 252 bp, Oryza sativa
  Clone ID: PAT_MRT4530_43537C.1
gagcgacacaaaagtcatcagatatctattggaggtaaagatgttcaacacaagatatctccagaccatgccatatatcaccagacacttcgtgattcatgattcaacaaactgatatatgatcgaatctacaaacaaacaaaaaggtacgatcttaccttatccacacattatatacataaacatatctaaaccgatgacaggaaagccttcccgacggcactagcagataggcgaccatggtaaccaaat

SEQ ID NO: 40058 - DNA, 1104 bp, Oryza sativa
  Clone ID: PAT_MRT4530_43538C.1
atgcagccgagcagccgcgacacggtcgccggcggcggcggcgaggggacgcaggatgacttcttcgaccagatgctctccacgctgccgtcggcgtgggccgacctggggggcggcggcggcggcgcggcggggaagtcgccgtgggaggtcgatccggcagcggcggcggcggcgtcgcaggtgttcgacgagtcggcgctgctcgcgtcccgcctccggcatcaccagatcggtggggctggcggcggcgggggagagaagccggtgatgctgcagctgagcgagctgcaccggcaggccggcggcggcgaggaggacgggagcggcgcgttctcgccgctgccgctgttcacggaccggacgaacgtgccgccgcgggaggagatggagggcggcttcaagtcgcccaatgccgccgccggaggcgagcacgcgctgttcaacgggttcggcgtgcacggcggcagcggcggcgccgggcagccgccgttcggccagcttcggagggagaggatagcggagcggatgaaatcgctgcaggagctagtcccaaacgccaacaagacggacaaggcgtcgatgctggacgagatcatcgactacgtcaagttcctgcagctccaagtcaaggttctcagcatgagccggctcggcggcgccgccggcatggcgccgctggtggcgagcatgtcgtcggaggggaacagcaacgggagcagcaatggcggcggtggcaaggcgagcaagggcggcaccggcggcgagggcggcggcggcggcggaggaggaggaggaggtggcaccggtggtgggatgcgggtgacggagcagcaggtggcgaagatgatggaggaggacatgggcacggcgatgcagtacctgcaggggaaggggctctgtctgatgccgatctccctcgcctccgccatctcgtcggcgacctcatcggcgtcgctcctctcccgcccgtccatccgccacgccggcgcgccgccgcagacgatgctcgatgccgccggcccgacctcgccggcggcgatgtctaacggcgatgacccacggcacgcaaaggcggacggcggcgccggcgggacgcaatga

SEQ ID NO: 40059 - DNA, 611 bp, Oryza sativa
  Clone ID: PAT_MRT4530_43539C.1
atggaaggcatgagatgtgattcgagcagattcaacgatgtcatggtatccaaaggttccgctaatcaatacggaggatggtgtaagtggaccggttcaaccgaggtggctcaacaagagacccggagacattggataaattacaccggccctttttggcaaccgtgtcggcggaggcggagagacggcgcttggagcggacagaccgaacgagcacgtcgttctcgccgctagttcccctcgccaagtacaccctctctcgcgtccctgtcctcatcctcgcgctctccgtctccgaccccaacgtcccgctcggccccgtcgtcgatgagtcctacacgctttctgtgctcctggactccggatcggccgatatctccgccaccacgccatggggcatggggcgccatccgctctgcccgccgcccgcccatcgccgctttgtccgccgaccgcgctcacttgtcgccgtcgtccgccgctcagctgccgcgcagacccgttgtctttctcgcccaccgcccgcccatcgcgctcactcagtgaagaagaagggaaagagaagaggaggagaagaaaataaagaggagaagaggacgatgtgtaattga

SEQ ID NO: 40060 - DNA, 129 bp, Oryza sativa
  Clone ID: PAT_MRT4530_4353C.1
atggcaacgagctccctactgacaaagatcaaagaggaggagacacgcatacagcagcggaggaagttgcactcggagcaatttgcaccattccacgcggacacctcccccatccgaaacatgcgatag

SEQ ID NO: 40061 - DNA, 165 bp, Oryza sativa
  Clone ID: PAT_MRT4530_43540C.1
atgctctacttcaatgcccgcctccgcttcgcctgcagcccggcgccgctccgctaccgcgcgggccagccgccgccctcgcccgtcgtcggcgttgacctggatgccacgtccgcaaaaccgggcaaaaatattgccgagggacctccggtgaacggtttatga

SEQ ID NO: 40062 - DNA, 516 bp, Oryza sativa
  Clone ID: PAT_MRT4530_43541C.1
aaaaaaaaaccccccaagggcggaacaaaggggtctttgccccagggaaccaaatgggcacccacaaatgggcggggggcggaccaaaatttttccaagccccggacaaaacccccaaagggggggaaccattgggcggaaccgggggccccaacccctttggcggtataaacccccaaaaagggccccagattccccccggggcctaaggccccaaaaaaaaaaaggaaaaccccccgacctttttatccctcggaacaaagttcccaacttataaaaccccgggggcttgaaagggggggaggccttgccccggggggttggtcagggacccaagggcccccccccccttgcggggaaaccccccccccgggcagcagggcggaagagcttgtgttatcgggaaacgccttaagcccggccccaattttccccccccccgggccccccggggcgaaggggccccccccactcggcccaagggggaagggaaagcgccccccccggggggggggc

SEQ ID NO: 40063 - DNA, 447 bp, Oryza sativa
  Clone ID: PAT_MRT4530_43542C.1
ttagaggggatcgtgcggccgcctgcgctaagctgcttgcagaaacggcaagacgcagagcttgctttaacccgtgcaggaccctgccgcgccgtcgacggcactgctgggccgacgcggctgcggtttctacgattggattgccgcgcgacggcacgcccacattctgaagtgctgtcatgctaccggacaggaagagcctgcgcgattccgccaaagggatcgaatcgcaggctgcttgactactgccattggcttggaactagattagggctctacaggatcaacaggagtggctaccggaactgaacgaaatgagcgatggcagcgctctaacattccaatcaggcatcgactgcaccctcgccacagacataacggctagcaaagagcacatgccatctttgctgacgtcagcactgaacgacgccatgacatatgatgagg

SEQ ID NO: 40064 - DNA, 366 bp, Oryza sativa
  Clone ID: PAT_MRT4530_43543C.1
atggccgaaacggggacgaaaggcgacacggacagcctgccgcctgccggctgcgtggctggctgggctggctcgacggtgacatcacgacgcgggcgtcacgctgcgccgctgtgggcaacgtcacccgtgtgggcgtcgccccgagttccccacttgccgccgtgcttcgtcaggcagcgctatagctgccgatggcgaagtccgcggatcgtaccgcgcccaagtgagcagaggaggcgaggcttcgcgggccacgtgaagttgacggatgagaaggcgatgtacgttcctccgcttccgattccgcgcgcgcgcgcgcgctcgtgcaaagcattgggcatactgggcggcccggtgcttgac

SEQ ID NO: 40065 - DNA, 870 bp, Oryza sativa
  unsure (1)..(870): unsure at all n locations
  Clone ID: PAT_MRT4530_43544C.1
gcacgccccggctccaccaccacctccatctcgcagtcgcagtgccagctaaggccttgtacagggcttcgctccccacacgttttcttctccccctccacatctcccctctcgccgccgccgccgccgcattccgttcagggacttctccgccggcgccatggctgccgctgcaaggttcttggcggtcttgctcctcgttcttgctgtcgcggcggcgtcttccgcggcggcgtcgttggctggcggcggcgaccgccacctgcagctggggatgctgtccaccggcggcgagtgccggggcacggtgggggagtgccttgaggggggagacgtcgacggcgaggagggggagctcgggtcggcgtccggcgaggcgcaccgccgcgtgctcgccgggagagggtacatcagctaccagtcgctgcgccgcgacagcgtgccgtgctctcgccgcggcgccagctactacaactgtcgccccggcgcctccgccaacccctaccaccgcggctgctcccgcatcacccgctgccgcggctgatctcctcctcctcctcctcctcctcctgcgccgccgccgctggatccgccggagaagatggcatcgtcgtcgccaggttaaaatacacaaaaaaaagagaggaaaaaacaaaataatcgagctgttgttcttgtgttcttgcagtgccactactcctacctctactatttattactattagctactactattaattaatatattcctttgtttgatttgctcctccgcttgaggcgcctcctcttgttgcgggcttcctgtttgtgctttgtaaagtaagagagatttgtgccccantatggntggcttaaaaaaaaaaaaaaaaa

SEQ ID NO: 40066 - DNA, 1806 bp, Oryza sativa
  Clone ID: PAT_MRT4530_43545C.1
gtaaaaagagattcacatcgagctagtaatatcttattgttcataaaatgcgcttcatctctaacctcgctctaatacgggacacgctagctaatacaattactactagaaagctgcataaacgcacagctttatcatcaactaacttttttttcgtacgtggagtacgtaattaattaactcgatcagcacaagcccccgccattgccatggattggagcttacgacgacgaggcgcattgctggcgccggaatccgagcctctccttctccaggtcgtactcgatgtagtaattctgctgctggaagctcccaagaatgatcgccggcccgccggaggagactccggcgccgccggagctggttgggacgtcgctcaccacggcaaggcagatggcctcggccatagccggagcgccgccgctcggagccggtccggccaccacgaagtagttctcgacggggaggttcatgacggagccgcccttgaagtggagcgacatctccggcagctccatcgtcttcgtccccggcggcatcgcgaagcaggggctgaggccgaggccctcctccaccaccttggaccggctgtacctccctcccacggccgcgaccaccgccgccgccaccggctcgaacaccgtgcggtcgaagtaggagaacgtcgtgccggagtcgacgatggcgcctcccccggcgcccccggcgacgaacgccctctccggcagctgcacgctcttcccgcccaccgtgatggcggtcagagccaggtagtagtagacggagtacggcggcctggcgctcgcgctccgagccaacggggcgtactgcatcccgacgccaccgtccttaccacccgcgccgccgaggatcagctcgccgctgacggcggcgttgtcgtcgaaccggcgagacaggaggcagtaggagaacttggtgaggccgagctgggacggcacagacggcgcgccgcggccgaaaccggcgaggccggacggcggctggtgcacggacgccaagctgcagccgatgacgaagttcctgacggcgcggccgggcgtgcgcagcgtgtcggagatgagcaggccggcggtggatcctgagccgtagacgacgaggtagggcgggcagacgttgttggcgttggcgttccgtggcgtgcagttggcgccggggcaggaggaggcggcgcggcagtcggagaggtggtcgggggagtggatccagaggcaggaagggttgcggcagccgatgaggcgggaggaggaggagttcttggggtggaagacgtggaggggggaggccgcggagagggaggagcagttgcggcactggtaggaggaggtgcaggggacccaggagaggtggctgccggtgtcgaggagcacggggaggggttgcggcggcgtgccgagggagacggtgaaggcgtagccgccgtaggagtgcgggtagagcgaggcgcggacggacggtggcggcgcggttccttggcgcgagcgcgggcgcgggcgggcgaggtgcgcggcgcgggcgagggaggcggcggcgaggcgggagagcgggtgatggtgggggtggtcggtgtcggcggggacgggcgggaggttgcggtagagcgggagcgtgatggcggtggagaggagggggaggagcagcagctgcaggaggacgactagcggtggtggattcgccatggtggtgtgcgcgtgttgatcgatcggcaatgcagggcaagctagctgctgcctacgagctctctgtgctttgcttgtgtctctcttaaaccgggaagtgagagttttc

SEQ ID NO: 40067 - DNA, 188 bp, Oryza sativa
  unsure (1)..(188): unsure at all n locations
  Clone ID: PAT_MRT4530_43546C.1
aaataaaaaaatncataactgagtcaaggggaaggaaatacaccaagntnnttagcttgctactagctacaatgtatacacacacaaacacaaccctagctagctacccagtatatacatactgtacttgaacacagcttaattaatttaattgaattgattaattaaacgatgaccaagggctagcc

SEQ ID NO: 40068 - DNA, 879 bp, Oryza sativa
  Clone ID: PAT_MRT4530_43547C.1
atggaagtgaaggggtcagaggaggatctggaccccctctccggcgacctccctccccaagcggcagtgtccggatcgcgagccatcggcggagggccccatcgtctctctgccccccgctcgcacggatctaccgccggcgacgacgggaggggcggagcctccaagctgccgttgctgctcgcgtggatccgccgtcgacggggatgggagtggcggatccgacgaattcttcccctcccgcatggatcctgtcgtctcttcggccccctctcgtgcggatcaactgtcgacggcgatgggaggggcggatccggcgacctcttcccctcccgcacatatccccgtcttctctccacccgtctctcgcgcggatccgtaggcggcggcgacgggaggggtggttccggcgacctcttcccctctcgcacggatcccatcgtctcttcgcgccggcgacgacaggaggggcggaagcggcagcctccccactgctgtcagttccggccactgccgcacagggccttactctcactaccctataggaaaattggatatggaactgcaagtgaggctttggcctgcaagctgcagtttatttttgtccgcagagattattttaatgaagagccattcttgcggattttacttgagcactaccagagcagtattgaaatgaccagaagggagttccttaatgggtactggaaactttatctactccgtgctctcacacttgaaccatgctatgatggtccaacaaatggtggtgaggcttgtagattgaaactacctagaattctggaagcagtctgggcttgtgggcttgtggatgtctggaaggtgtacatactccctcttccatattggatcatctaa

SEQ ID NO: 40069 - DNA, 803 bp, Oryza sativa
  Clone ID: PAT_MRT4530_43548C.1
cggagaggcgcagcgtggacgctgagccccgtctccgcccgagaggagccggagggagccgcgcctggaggactggagaaggagaggcgcgcgcggcagtccagcagccgacgagccatgcacaagatcgcgtgcactccaggcaacgagaaggcgctggtggagcgcgagggcgcaggcagttccagggagatggcgcacaagaagcagatgtacagacacaggcacagatcgagttcagcctccgtgggttggattcccagaaggttttcagggcaattcccgttgcccgggcgaaggcccagaagggttgttcccctcccgaagcggggcccttgttccggaaggaacccagccggaagggaaccgaaccaagaagaaccaagggaaaagttaagccccccaccttccccctcccgttccctttccttttgggttaaggttaataaccttccttaaggttaattaagccttccgaattggaaaaccaggttaaattggccggcccggaaaggccttgccttgttaagaatgccttggcctttggttccttaaaaggccttttttgaattggttttaattccaacgccaatttccaaccaaccattgttaaggcggccctccccggggggttgcccccaaagttttggaaattttttcggaattaagctgtgctactgggagaatcctctgtgtttcaaagctctgctgaagattagcagagctaatgcacctgtaaatatgtcatctctcacaagaccttaatatatgattaacaacttgcacaaaaaaaaaaaaaaaaa

SEQ ID NO: 40070 - DNA, 472 bp, Oryza sativa
  Clone ID: PAT_MRT4530_43549C.1
gctagtatgcatatatatttatactttggggtacacatatgcgtctgacttttacatgctctttccgactagggtgtattcttatgccgaatgagaattcaccctttctcttatttgtcactcgttatcctattgactggtgtgaattaagcaagacaagaaaccatatggatttactatcggcatacgaagaactattatatctaggagcctccagctcaccttcaggatcatcaacattgatctgtagcttggaatgacaacgtcatgctgtcgaggtcatgaagaaagacggaagttggcctgcatgatgttgccgatgatcgacacgtccgacgagctcattatcgccatgcagaccaaaccctcgttggggaaggtcgtgaggtagttgcctccgttcaggctcatgtccgccccgtcatcgaagtgcagcacgagcggcggcatctgcgccaccgcctgttgattt

SEQ ID NO: 40071 - DNA, 1366 bp, Oryza sativa
  Clone ID: PAT_MRT4530_4354C.1
atggccgtgctgggagtgggcgccgccgtcaggctgcggctccgcgtgctcggccgccacctccgcctccgcgggcgcaggcgcacgcggcggcggcggggaggtggtggggtggaggatgaggaggaaggagggagggaggcggtggtgctggtgtccgggatgggcgggtcggtgctgcacgcgcggcggcggtcgaaccccaggttcgacctccgcgtctgggtgcgcatcctccgcgccgacgccgacttcaggaagtacctctggtcgctctacaaccccgacaccgggtacgtggagccgttggacgacgatgtggagatcgtggtgccggaggacgaccacggcctgttcgccatcgacattctcgatccttcctggtttgtggagattctccttctgtctgttgtgtatcactttcatgatatgattgatatgcttgttgactgtggatacaagaaaggaactacactttttggatatggttttgattttcgccaaagtaagaggatagacaaagtgatagttggtttgtgagcaaaacttgagacagcttataaggcttctggtgggaaaaaggttaatataatgtcacatcctttgggtgtacccctattgagctccgtcagaagtgtgccacacaatgccagtgtacacttatgtggatggagatggcacagttcctattgagtcaactatggctgatggatttccagccaaggaaagagttggcatcgaggccgaccacccgagggctgctttgcgacgagaatgtgtttgagcttctgaagaaatggctcggcgtgaaggaagaaagcacacggcggcgtcggttgtccaagtccaaagtgacagactttgcaccatcataatgaaagtactaatcaagtcaaggtgctcaaaacaaaaccatcacaatctcttcaaggcagccattattttttgggctcttcacttgaagagaagatgaatatagcgaaacacttgtgtttaaaatgttacttgttattccggaaggggaagatgatatgaaccctaccattcgtagctgaaaattgtgacactttgtgacgttgtgacggttatttaatttgcatccagtaacggagcaaaacttaaaggaaataaataaatcgtattatttaacaaaaaaaaaaaaaaaaatggcacagttcctattgagtcaactatggctgatggatttgcagccaaggaaagagttggcatcgaggccgaccaccgagggctgctttgcgacgagaatgtgtttgagcttctgaagaaatggctcggcgtgaaggaagaaagcacacggcggcgtcggttgtccaagtccaaagtgacagactttgcaccatcataa

SEQ ID NO: 40072 - DNA, 1350 bp, Oryza sativa
  Clone ID: PAT_MRT4530_43550C.1
atggccatgagaggagatcccaagcagcggagagcttcagcttcagctccccacggcggcgccgcccaccacgtcgccgacaagctcaggaggcactccaccttcctcctcctcctcctcctcctctggttcgccctctccctctacctcttcctctccgccaccccgccgcccccacgccccgccttcctcccttccacttccaccccccgccccgccctccggatctacgtctacgacctccccgcccgcttcaaccgccactgggtcgccgccgacgcgcgctgcgccacccacctcttcgccgccgaggtcgcgctgcacgaggcgctgctggcctacgctggccgcgccgcgcgtcccgacgacgccaccctcttcttcgtccccgtctacgtctcctgcaacttctccaccgacaacggcttcccctcgctctcgcacgcccgcgccctgctcgccgacgcggtcgacctcgtccgggcccagatgccctactggaaccgctccgccggcgcggaccacgtgttcgtcgcgtcgcacgacttcggcgcctgcttccatcccatggagctgttcgtgataatccactttgaattaggggtcaatgccaagtccaacctagctctagggcaagaggacgtagctattgcggatggcataccggaattcctcaagaggtcaatcctgctacaaacgttcggcgtacagggcactcatgtgtgccaggaggcggatcatgtggtaatcccgcctcatgtgcctccggaggtggccctcgagctacctgagccagagaaggcacaaagggatatttttgccttcttccggggcaagatggaggtccaccccaagaacattagtgggcgcttctacagcaagaaagtgaggactgagctgctacaaaagtacggaaggaatcgcaagttctaccttaagcgaaagcggtatggtaactatcgatcagagatggctcgctccttgttctgcctctgcccactaggatgggctccatggagcccacggctcgtggagtcggttctccttggctgcattcctgtcataattgccgatgatatacgcctgccgttcccttctgtactacagtggttagacatctcgttgcaagtggctgagaaggatgttgcaagtcttgagatggtgctagaccatgttgtagcgaccaacttaactgtaatacagaagaacttgtgggaccctgtgaagcggaaagcactggtttttaaccgtccgatggaagaaggagatgccacatggcaagtgctgagggagcttgagattttgctagaccgttctcaaaggaggcatgttgaatcatggaagaggtga

SEQ ID NO: 40073 - DNA, 369 bp, Oryza sativa
  Clone ID: PAT_MRT4530_43551C.1
atgactgtccaactgtgggctccacgcacattaacatcaggctattgtttctcgtcgttgtacgcgaccgccacggccgtccgcggcctccgccggcatcgccggccgcgacctccgccgccgaccgcggccacgccgtcgcccgctgcgaccgccgccgcagtacgcgccgtcgtccgccacgtccgccgtcgccatctgcgttgtcaccggccgcggcctccgccggcgtccgcgccatcgccggccgtggcctacgccaccgcagtccgcgccgtcgcccgccacgaccgccgccactggcacaagctctgcagaagaatgagcagaggatgggagaagggggaggaagaagaaagaggagaatga

SEQ ID NO: 40074 - DNA, 124 bp, Oryza sativa
  Clone ID: PAT_MRT4530_43552C.1
gtcgttatcggagcggacgccttttctaggggttctgtcaaatcaagtgcacctttgacccactccaccaatagatttgtgcatccaacacacatgtcaaaatatcacatagcccattttggaa

SEQ ID NO: 40075 - DNA, 431 bp, Oryza sativa
  Clone ID: PAT_MRT4530_43553C.1
gatcccccaccccaaaccggcacgggatgcctcagcggcggccgcgcctggcgtccctcacccgccgcctctccacctgccgggacggcgacctcgccgccctcctctcggtcctccgctcgccgccagcatcctccacgtcgctcccgcgcgcactctccagtgccttcccgtccccatccgactccttccccctcggcaagctcccctccctcctcccgctcctcccctccccactcctctccctccggttcctcctgtggcgccttcccccctcctcgccgctcccgtcctcgtacgccctctcctcgctcgccgcctcgctccccgatctcccgtccgccgtgcccctcctcctctcctcgtcgccgcaacctctcccgctcaggcactacgccctcctcctgggcatctccgcacacgctggacta

SEQ ID NO: 40076 - DNA, 231 bp, Oryza sativa
  Clone ID: PAT_MRT4530_43554C.1
atggcggtggccgacgagcggtggctagcagcggatgagacgaaggcactacttcgggcctcgctgccggacactgggcatcaccttaaccagcaaggaggggctggggccggcacgacgtggtggaggtggcgccagaacgcgacaagggagttcaaggtggagcttgcgccgccggcggtggtgttccagaaggtcaagtgcaagcttgccactgccgacaagaactaa

SEQ ID NO: 40077 - DNA, 543 bp, Oryza sativa
  Clone ID: PAT_MRT4530_43555C.1
ccgggctgcaggtgcgatatcccatcatgtagctactgtagaggtccactatgctatgaatttcaggttggtcttgtttttttttctggggcaaattccgtcactgaaatatagtgggtatacacttatatccagttgcacattgcaacacaagtaataaatttgcaaaccctactccctcatgccaaatatcttgcccttatatctttgctgtatgaattattcgctgggtacatactgtgcatattgtcagacaccaatgcatcaattttagagtcaagacccaaaagttaatggctgctagctcaactgcctgttaaccagttgtgataccaggccagactgagccaagatatacccgacggtggctctttgttattactggcttgtgctggtatccaataaaccatggcttagtgggaattcataccctgctcaaaatagtactgtaaatgagattatcaaatacttctgcagcctttatgttgagtttggtattttctttcaaatcccatcagttcaaattatttcttctacttagtc

SEQ ID NO: 40078 - DNA, 402 bp, Oryza sativa
  Clone ID: PAT_MRT4530_43556C.1
atggggatggtggaggcggagcttggagagcagtggcaacaacgccgaatgagcttggggatgggggctgaggccatgggatgggagggccatcgctgtcgaccaccccaccgcctcgcctacatccagtcgccctcaccgtccaaactaaggaagacaacgcatacttcatttggtagcaagttgaagtgtgatggtcactaccagctgcatcctgcagtggctgcaaatctccatgttgagttggatccagcgatcgagtcgacggtagcggaatggagccctcgaagaagctgtcgagttccaagctcggaaatggcggctgtgtgcgacttggatagcattgccaccacaggtggcctcatgggcatggctttccacaggtgctctgctaggctatag

SEQ ID NO: 40079 - DNA, 1364 bp, Oryza sativa
  Clone ID: PAT_MRT4530_43557C.1
aactttctcgtcatccgtaagcatgtttctgaaactgttaaatggtattgttttgtgcaaaatttttctatagagaagtttttaaaaatataaataacgcgtccacctcccttgtgcgtgtctacgcgcggcttggccgcctgggcgatgcgcggaagatgttcgatggaatgccggtgaagacggtggtgtcgtggaacgtgcttcttgatgggattgtgcgagccagcgacttggatgctgcctgggaggtgtttgtggaaatgccggagcggaacgtggtttcctggaacactgtcattgctggttttgtgaggcatggttgggttcaggaggcagtggatttgtttgccgagatgacggtggtttatggtttggcaccggacgaggccacgatggtcggctttgtatcagctgttcgcgatatgggtgtgcttggaattggaaggtgcgctcacgggtacgtaattcggcgggagttctcactggatggtgctcttggtgttgctctgatcaacatgtacacaaggtgcggaagcatgggcgacgccttccggtgcttctcaagtgtcgccagcaagaatgtggagcagtggacctctgtgattggtggtttcgcagcacatggtcacccagagatggcgctgagattgttcaccgagatgaggcaattgggcattgagcctaacggagtcaccttcttggccgtcctgaatgcttgtagccatgggggcctagtcaacgaaggcttcaagtacttcaacctaatgaggagcatgggcatcaagtcgacgatgcagcactatggttgcttgatagatcttctcggccgtgccgggttcttggaagaagccttcgaactcgccagcagtctaccggaagatccgggtcttgtgatctggagctcacttctagctgcctgtcagagccatggcaatgtcgagatggcagaggttgctgctcgaaagctggcacacgcagagccaagacatggcagctcctatgtcttgttatccaacacatatgcacgagctggacaatgggaagacttgaagagaacgaggaggaagatggaggagtatggggtaatgaagcagcctgggcttagctggatcgagttagatggtcgtgtacattcctttgtcagtgcagacaagttacacacagaaagcgaagatatctatcagatgttggaagatttgaaagttaatttggtatcagctggaagtgaacctgagatatctaccattctagttcaggttagaggcatgaataaagtagtatttttgccaccctcttaggtggctaggagtcgggaacaaagcattttgcttcttagcaggaaatatattattggaatgatt

SEQ ID NO: 40080 - DNA, 273 bp, Oryza sativa
  Clone ID: PAT_MRT4530_43558C.1
acggcacgagggagataggtcgacaagtatgaccagcgtgacgtaggacggcctggatagatgacacgtcgtcctacgtggacgtcatgtgatctcgctgtctgtgtcgccagtttgcctggatgtaaaaatttgctttgacatttcggttgttgcggttgggtccatttgaaacgcaggaattctacttgattcggcttcagtaaaattcacgcgtttcaaattgattgtaacttgtaagtcgtattatgacatcataatttttttttgttt

SEQ ID NO: 40081 - DNA, 824 bp, Oryza sativa
  Clone ID: PAT_MRT4530_43559C.1
acctcgtcttctacgtgcgcgtcgacgggctcgcggatctgtgggtggcggaggaggacgcgtactgcttctgcgtggacgcgctcgccgccgcgcggctcctcgccggcgggctggacgccacggcgcgcgcgctgaggcgcgacccggcgctgggcgcgctctggggcgcgctcaccgacgggctcgtccggcgcgccctcgccgacctgtgcgccaggagcggcgtgccgctgggccgcaccctcctgtcgctccccaccgacgccatggccgccatcctgtcgaggctcgaggatggcgaggacctcatggtggtggagtgcacctgcaccgcgctccggcgcctcgtcgccgagctcgacgccgtgctctggaagcccatgtacgaggacgtggtagacgcgcggcggttcgccggagtcgtccgcgccgacgacgaatcgccggagatgagctggaaggagaggttcacggcggcgatccatcgacctatacctattaatatcggacctcatgcagccacggtgaacctcgcatggctgctcgatttggaggcggcaattgttgaaatgtggcacaatgatcatgttccagttccacctcaacatccagtcgtccctctctccgacgacgaccgctccgactcgccggagctgccgccggagagtgtccctcgtcggaggaggaggcagtggagagcaatgccgagggacttcagccatggccgtgcactggttcatggtggacacaataaccagcggcgtggcggcgccggcgcggttcactcgccgtcttcccgctaccgatggagccgccgctga

SEQ ID NO: 40082 - DNA, 234 bp, Oryza sativa
  Clone ID: PAT_MRT4530_4355C.1
atggtggagctgaccattaaagaacaccatcaaaatccaccacgaataatgcgggatagagtaggaaattatgagggaattggagaggatgaggaattcggccggaaagagagaggatggctgaaggttagggatgacgagtgggacccacatgccatcgagagggagcacacctgcccaggctggggcgcgcggagaaggaaagatggacttagtccgagggagagggaatga

SEQ ID NO: 40083 - DNA, 3996 bp, Oryza sativa
  Clone ID: PAT_MRT4530_43560C.1
ctacccgaggaccgcgaagggagtgaacgcgtccagcgcatctccaaacgctacgtgctggtagaagggaccctctatcggcgcgcggctaacggaatcctcctgaagtgcattcctcgggaacaaggcgtcgagcttcttgccgatatccatgaaggcgaatgcggagcccactccgcctcgcgcaccttggttggcaaagcctttcgacaaggtttctattggccgacagctctcaatgttgcggtcgacctggtccggcgatgcagagcgtgtcaattccacgccaagcaaatccatcagtcggcccaggcccccagaagcaacggccaagtggagcgcgccaatgcggaaatcctcagaggccttaaaaccaagaccttcaacatcctcaagaagcacgacgattcgtggatcgaggagttgccagcggtgctctgggcgaaccgaaccacaccaagccgagcaaccggggaaacgcctttcttcctcgtctacggcgcggaagcggttctcccatccgagctcaccctgaggtcctctcgggccaccatgtactgtgaggctgatcaagatcagcttcacagagatgacctcgactacctggaggagcgaaggcggcgcgcggccctccgagccgcgcgctaccagcagagcctgcggcgctaccatcagcgccacgtccgggccctcggtcaccacgctcccggcctggccagtctcgacatgtggatctccccaggcaccagccccgacccgagccatttgaggactgggacctgggcacgagcccttgttcaagtccgatgcacccgggtcgccagcctcgtcgccactgccgcccacaccgccgtcatcgccctcctcgtcggagttgagggcgaacgtgagccgaggagccgaaccctcgaagctgtggacgatatggtcggcggcatcccggacctgcgcgcgcgcgccgtcctcggtcccgggagggaactcgtccagcgctgtccagggggagaagtcggggtccctggcctggtaactcgccagtacgagctccaccgctcctcgggcgaggtccctcgaggatgacttaatcgtcccctcgagctcctcggggagccgctggagagtcccggccatctccgagaggcgctgggcgaggcccccctggttggcggcgtacttcacagtccgcccgccccagagacccgcctgccgcccggcgcggtctagacgggagacggcgtcccgaagcatgccgggccctacctcacctgccaagcggagggcctcgacctccccggcggacgagtctagcgcgccctgcagatcggcgatggtgtgttcggcagctgcgaggcgggcggctaagtcgttttcgcccgcagccgccccgccgctgcgcgccctcgcgtccagttcccttgcctgcgcctcgagttcagcggcccgctggttcagtgcggccctctcggcgcgggcaccttccagattgcggcgcgcctgctcctcccgcgctgcctcgcggagggacaggctgtccgccagccgttgcgccgcggcctcggcctcctcgagagctcgctcccgctcggtgagcgcgtcctcgcggaggcggagcgcggactcctcttcggcgcaagcggcctcgtgcgccgccagcgttgcctcccggatggcaacggcggcctcgcggtccgccaggtccctctccacgacgcaggcgcgctcttccagcaccatggcacgagcctcaagggcctcttcgcgccgccgggacgccgcttcggtctccgccgcccgccgtcctcgggcagcagcagcgtcaaggaccccccgggcggcgtcgagcttcttccctagctccgcctcccagctcccgtattgaaggcggagggtgtcctgcgcctcgttcatcacggtagtggcgatgagggcagccccccgctcctcctccacctccttggcgatctccctcagcaccttccgacgggcttcgagctctgaggcgtgccggcggtgtgcgttgcggcccacctccaccatggcctccaccgagcgtcgcccctcctcgacacgcgcccatgcggcgtcgagctccgcccgctctgcttgcagggcctccatctgagcacttaacccgtccaacaccgtggtgtttgcgacggccaaggcctgcagaaggggctctgcgctcagtggggcaacggaaggcgtggggaagagccgcctcggagaggatgccgcgcggctcggcccgccgatggacgtgccggactcggggacgtcccccggacccggcttgtcctgagcgtcgcccgagggagtgggcccaagcgatgcacccgcggcctcgtcgcgagctgccttggaagtcgtcgtcgcctcagcctggcgaagtctggcctcctcccgagcggcttcttcagcttggcgagctcggacggccacccgggcagcttcctcggcttcccgaaggcggtccgcggcttcttgccggtcagtctcacgggttgcctcggaggacgtcgtcgcctcggcctggcggagtctggcctcctcccgagtggcttcctcggcctggcgagcccgggcggcctcccaggcggcctcctcggcttcccgtaggcgatccgcggcttctcgccggtcagattcccgcctccgggcctctgcggccgccggatcctcggcctcagactggccggacttggaatggcgggagggacgcgacgggatctcgctgcgagggggtcggttaaacgaccaccttggaggggaaataaggtttccccgggatggttctgtcccccccatcttgcggagccgtttcttcttccgctccccctcgggctgcgacgacggcacggcaccctccgggcgcctgctgctggcacgcgccgccccgccccctcggggaggagatggggaaggggttccttcctgcttcctcttcccccgggcgtcggtagggcggctgctccccgggccctcgtcgcggggcccagaagcacgaccccctcccggggtagattgttcccccctgcggctcccgcccgcgccatcgtggcctcgaggagcccgctcctccgacgccccgaccgcctgcatgatggtcaggatggaggcgcggtctggatcgctgcagagggggaggactccttggggaatgagggatgcctccacggagctgagattcagcacccgttggaccactatcttgaagtccttaggggcccagtcccatctgaccccctggtgggtcctcatgtagtcttcggacccggtgtactcccaggcgccccgggcgcgccgctggagcgctgcaatccagcgacgaaggtagtcgccgtacaccatggcccctgtgagcccctgggatcgcaggcccgccaggcggtcgaggatggcgtcatagccatctcccagatctaccggcgcccgccagctggaggcctgcgccgggggctggctcggaagtcggaggcacgcttcgtcggcgaggggggtgtagaaccagtcgctcttccagtcatcccacttcttgcggaggacgcaggggatgtagcggttcagcaccggcccccgcggctggaagtagcagccaccaaccaccgacggcggcgacaccggctgtacggtgaagaaccaccggaacagccgaagggatgggcgcaccccgatgaacatctcgcacaggtgcgcgaagatggccaatgtcattaccgcgttgggggtgaggtgcgccatctggagatcgtaaaactccagaacttccatgaagaaagaagaaaatggcggaaccagccctgccattgcaaaagggaggaagaagacggaccgccccgggtagcatggcgccgggcgtccctcgcccagcgtgactatctcccggccggtggcagattccggcatgaagcggcgtggcagcccggcctgcctctcgctcacgatgcgggaaggcggcagcacgctaccatcgagcagagcggagccccgtgccat

SEQ ID NO: 40084 - DNA, 3138 bp, Oryza sativa
  Clone ID: PAT_MRT4530_43561C.1
atggcacggggctccgcaccgctcgacggtagcatgctgccgccttcccgcatcgtgagcgagaggcaggccgggctgccgcgccgattcatgccggaatctgccaccggccgggaggtggtcgcgctaggcgagggactcccggcgccacactacccggggcggtccgtcttcttcctctctttcgcaatggcggggctggtcccgccattctctatttttttcatggatattctggagttttatgatctccagatggcgcacctcacccctaacgcgataatgacgttggccatcttcgcgcacctgtgcgagatgtttatcggggtgcgcccatctctccggctgttccggtggttcttcaccgtacagccggtgtcgccgccgacggtagtcggtggctgctacttccagccgcgggggcaggggctcacgggagccatggtgttcggcgactaccttcgtcgccggatcgcgccgctccagcggcgcgcccggggcgcctgggagtacaccgggcccgaggactacatgaggacccaccaggggcgcaaatgggactgggaccctgaggacttcaggatggtggtccaacgggtgctgaatctcagctccgtggaggcatccctcatcccccaaggggtcctccccctttgctgcgatccagagcgcgccaacatcctgaccatcatgcaggaggtcggggcgtcgggggagcgggccccccgaggccacgatggcgcgggcgggagccgcaggggggaacaatctaccccgggagggggtcgtgcttctgggccccgcgacgggggcccggagggcagccgtcctgccgacgcccgggagaagaggaagcaggaggcgagatcctgtcgcgccccccccccccccgcccgccatcccaagtccggcgggtctgaggtcgaggagacggcgaccgcggaggcccggaggcgggaagctgaccagcgagaagccgcggaccgcctccgggaagccgaggaggctgcccaggaggccgtccgggttcgccaggctgaggaggccgctcgagaggaggccagactccgccgggccggggagtccgtccgggaggcagaggcggcgcgcgcacgccaggcggcctgccaagcccccgacccgactccgcccgaggcgacgacgacttccgaggccacccacgacgaggccgcgggcgcgccgctcgggcccgacccctcgggcgacgcttgggacgagccagcttcgggggacgcccccgagtctggcacgtcgatcggcgggccgagccgcgcggcacccacaccgagacggctctcccctctgccttccgctgccccactgagcgcggagtccctcctgcaggccttggccgccgcgaacagcacggtgctggacgggttaagtgcccagatggaggccctgcaggcggagcgggcggagctcgacgcggcgtgggcgcgcgtcgaggaggggcggcgctcggtggaggccatggtggaggcgggccgcaaggcacaccgccggcacgcctcacagctcgaggcccgtcgtagggacctggcggagatcgccagggaggtggaggaggagcgggagactgccctcatcgccaccgccgtgctcgacgaggcgcgggacgacctccgcctccaatacgggagccgggcggcggagctagaggagaagctcgacgccgcccggggagtccttgacgccgccgctgcccgggaacggcgggcggcggagaacgaggcggcgtcccggcagcgcgaagaggcccttgaggctcgcgccacggcgctggaggagcgcgcccgcgccctggacgcgaaggagagagacctggcggaccgcgaggccgccgtcgccgcccgggaggcaacactggcggcgcacgaggccgcctgcgccgaagaggagtccgcactccgcctccgcgaggacgagctcaccgagcgggggcgagctctcgaggaggccgaggccgtggcgcagcggctggcggacagcctgttcctccgcgaggtagcgcgggaggagcaggcgcgccgcaatctggaaggcgcccgcgccgagagggccgcgctggatcagtgggccgcagagctcgaggcgcgggcgaaggagctggacgcgagagcgcacagcggcggggcggccgcgggccagggcgacctagccgcccgccttgcagccgccgaacacaccatcgccgagctgcagggcgcgctggacttgtccgccggggaggtcgaggccctccgcttggcgagcgaggtagggcccggcatgcttcgggacgccgtctcccgtctagaccgcgccgggcggcaggcgggcctctggggcaggcggtacgcgaagtacgccgccaaccaggggggcctcgcccagcgcctctcagagatggccgggaccctcaagcggctccccgaggagctcgaggagacgatcaagtcatcctcgagggacctcgcccggggggcggtggagctcgtactggcaaggtaccaggccagggaccctgacttctccccgtgggcagcgctggaagagttccctcccggaaccgaggacggcgcgcgcgcgcaggtccgggacgccgccgaccacatcatccacagcttcgagggtacggcccctcggctcgcgttcgccctcgactccgacgaggagggcggtgacgacggtgcggacgacagcgacgacaaggagggcgcgcgcggctcggagggccgcgcgccgtcttcactcttccaaatagtcgaggtcgtctcggcgaagctgatcttgatcagcctcggaatacatggtgacccgaggggacctcagggtgagctcagatgggaggaccgcctccgcgccgtagacgaggaagaaaggcgtttccccggttgctcggcttggcgtggttcagttcgcccagagcaccgctggcagctcctcgatccacgagtcgccgtgcttcttgaggatgttgtaggtcttggttttgaggcccttgaggatttccgcgttggcgcgctccacttggccgttgcttctggggtgggcgggggaggcgaagcagagcttgatgcccatgtcttcgcagtagtcaccgaagagttcactagttgtcacgaccgaaaataa

SEQ ID NO: 40085 - DNA, 1786 bp, Oryza sativa
  Clone ID: PAT_MRT4530_43562C.1
agcaggaaaaaaaatcgatttctctacagagaatttgtacaagataatggttaaatctttagtctttacacatggttcagtcaaaggtactactaatggttagtagatcttttcacaggaatcagagcttaagtatcaaggttttattcactttctaggatttaatcacctgtacaaacattttcagatttcacaagaacatgcacaagaattagctagctaacctctacttctacatgacatcacaaccgttgtgaggaaccctcttcttatacacgtaaacgcgcgacacgaacacgaacgcgacgagctcgacggcgcagaggccggcgaggagccagtagaagtagtcgaggtgggcgcggttgaggttgttggcgaaccagctcgccccgctcttcttggtggcgccgtcaatggcggagatgatgaagctgctgaagaagtgacccaccccgaatatgctgaggaagaaggcgagccccaggctgcgcagcgcgtcggggacctggtcgtagaagaactcctggaggccgatcatggcgaacacgtcggagagcccgaacagcacgtactgcggcaccatccaccacaggctcatcggcagcgccgccttggggtcgtccaccatgccggcgtccctggcgacgccgagccgcctcgcctccaccagcgccgcgacgaccatggcggcgagcgccagcacgaggcccgtgccgatccgctgcagcatggtgatccccgaggacgcgcgcgtgaaccgccgcgccacgggcacgaacgcccggtcgtacaccgggatgaaggcgatgatggtgacgctgatgaacgtctgcagcgccgccggcggcaccctgaagctctcgccgatccgccggtccagcgtcgccgcctgcttcgtgaagaacgtcgacgaatcaacatcagacaagaaatcgattagaacatactcgtctttggatcctctgatgagcgcgacgaacgctctggcgaggcgagcgaaggggctggactgggtggagacgtagtagcggtagttccttgtcccgagcaagaacattgcgagggcgaacgccatgacgaggcaggggatgccgaagccgaggccccagccgatgttgtcctggatgtaggaggacaccatggtggtcatgacggtgccggagcacatgccgaagtaccaccagttgaagaaggagctcctggagacggactccttggcgtcgttctggtcgaactggtcggcgccgaacgcctgcgcgcacggcttgtgcccggcctcggcgagcgccaccaggtacagcgacacgtagaagatggccacctgcgcggtggagggagcgcaggacagcgacttggaggtgtagctgcagccgccgccgtcgccgtggaacgccgggagcgccgacgagagggttaacatccccatgctcacgacgaagaggagggaggcgagcacgatggtgcggtagcggccgagccaggcgtcggcgacgcaggcgaccagcagcggcagcatcgtcgcgacgccgctccacaggttgatcgccgccgccgcccccgccgtcgactcccccagcggtcccgtcaggtagctgatcaggttcgccgacacgccgtggtacgcgaacctctccgcgatctccaccccgaggacgaacattgcggcggaccagcggccggtggaggcgcgggaggccgggcggccgcggaagtcgacggccccggcgacggcgccctcggagcgcggcaggaggagcgcatcggtgacggcgtggctggccat

SEQ ID NO: 40086 - DNA, 5196 bp, Oryza sativa
  Clone ID: PAT_MRT4530_43563C.1
atgggttccgtcttcggcatcgacgacttcgtcttccctcccgggcaagtgttccggttcggcaacctagacttcatcaccaacgacttcggcaagatttctctcctcgactcagattcgaaccagtcgggaagaggccagatctccgccccgttcggtatcccgaactcggccgaggtctaccccaaggtcatctccgccgagttggtttcaaaccactcggacaagatccaatctactccaacacgaccagatcaagacgatggggcctatccgccaatcttgatgaaactccccgacgatttggctgctgtcttcactacaagggcgtcttctccccgtaggcctaggcgggatccggcttcagccccggtccggcctagctccagcgaagtcggcatcatactccagccactcggcacagtttcgacggaccaactggacggctaccttagctcccccggcgtcgagtcacgaccaaccgagaacgtagagtacgatgacttcggctatcgctacgacaaccgcaacctcgacgacttcgacgagggctttgaagataactacacccctctctacctcggtgttttcatggctgacaacgagacggaagaacagcgccaagcccgagaagcagaagggcgacatactaagaccatgatcgccgcctcggtcctggttaactccgcaagcgtccgcacgccgactggcagccgagttccccatcttcgatctcaagattatcaccagccaagcctcagtatcgccggcgcgggatccaattgcaggagcaggggccacgaggagcgatctgtccactcgcctcccgaacgacacagggagcgccgagttgaacggccacgctccccacctcgcaggcgccccgtcgatcttcgtgatactatcaaccagcgccgcgcggcacgaggctacgccccccaccattcaccgaatcgctatgacgacgacgtggatggagtcgctgccttttcaagtgacctgcgtcgagtggattggccagctggcttcaagccgactagaatcaagaagtatgacggcaccaccaatccggagtcttggctcaccgtctacggtctcgcgattcgtgcagcaggacgagatagcaaagccatggcaaactacttgcctgtggctctagcggattctgcccgatcctggcttcatgggttaccccatggcacaatcggatcatgggcggaactttgcgaccacttcatcgccaacttccatggcacctttgaatgccctggcacacagtttgatctctacaacgtcattcagaagtctggagaatcccttcgagattatatccgacgcttttctgagcaatgcaacaagatctccgacattaccgatgatgtcatcattgctgctttcaccaagggaattcgtcacgaagatttagtcggcaagttcgggcgcaaaccgcccaggacggtcaagcagatgttcgaaaaagccaacgagtatgccaaagacgaagatgccattatcgcgtccaagcagtcgagcaccacttggaagccgaagaaagatacgccgactacgggagggagtggaagtaccaatcgcaaggaccgtaagcgtaagcccgaggaacttgttgcaactactacacattcctcccgacaacgttcgcgcgtcaacacttttgacaagatcatgaactcccaatgtccgcatcatcccaattccaatcacgcgaccaaagattgcttcgtctacaaacagattgcagaacaatacgccaagaacgcacgaaaggcctccgatggagatcaaagtgcatcgaaaaagaaggacgatgatgacgatgccccgacaggttttcaagaccatcgcaaggagctcaatcacatctttggcggacccttggcttatgaatctaagagaaaacaaaagctgaccgaacgggagatcaacgctgttcagcccgatacgccccaatatcttcggtggtcggagacaacaatcaagtttgaccgctcagatcatccagaccgagtggtccacccggggcggtaccccttggtactagacccagtggttcgtaatgtcaagcttcgcagatccctcatcgatggtggcagtgcactcaacatcctcttcgccaaaaccctagacgacatgcaaatccctcgcacagaattaaaaccgagtaatgcgccctttcacggagtcattccagggctatccgctatgccgctcggccagatcactcttccggttactttcggtactcgggagaacttccgcacagaaaacgtctgcttcgaagttgctgatttcgagaaaccgtatcatgccatacttggacgcccggcgttagccaagtttatggctgtcccgcactatacctatatgatgatgaagatgcctagtccgcgaggagtcatatccctgcggagcgacatcaaacaagctatcacatgcgacaaggaaagctgcgagatggcccaaacccgcgagatcacgatcgcccgagaagatatccgactggctgcaactacggcaagcgaaggagaagtgcctgcaaccaagatgccaaagagtggagaaagcgacgccaagaccaagaaaattcctctagatccctctgattctactaagaaagctgtaataggcgctgagttagattatatctttgcatggaaaccatctaatatgcctggtattcctagaaaggtgattgagcactctttacatgttaaggaagatgctaaaccaatcaagcaacgactccgccgcttcgcacaagataggaaggatgcgatcaaggaggaactgactaagctgttagcagcaggcttcatcaaggaagtccttcatcccgactggctggccaacccaatcctggttcggaagaaaatgggacaatggcgcatgtgtgttgactacaccgacctcaacaagttctgtcccaaagatccttttgggttgcctcgcatttaccaggttatcatcaaatccgactgcttaaagacttcattcatcacgcccttcggggcctattgctacatcaccatgcctttccgattaaagaatgcaggagcaacctatcaacgcatgatccagagatgtttttcaactcagatcggtcgcaacgttgaagcttatgtggatgatgtagtcgtcaagaccaagcagaagtatgatttgatcacggatctagaagaaacctttgcaagtatctgcgctttcaggattaaattaaaccctgacaagtgcatcttcggagtaccgtcagggaagctgcttggatttatggtctctcatagaggcatacaagccaacccggagaaaatcaatgccatcctcaacatgaaaccgccaagttcccagaaagatgttcaaaagctaactggttgcatggcggtgctcagccggaaactatctcactatttccaaggtcactcggttacgttggtcacatcgttcccattcggcgatatacttcataatcgcgaagcaaatgggcggatcacaaaatgggccatagaattgatatccttggatatatcgttcaagccgcgaacttcgatcaagtcccaagctttagctgactttgtcgccgagtggaccgagtgccaagaagatatgcccgaggagaagatggagtattggaccatgcactttgatgggtcgaagaggctttctggcgctggggccggggttgttttaattttcccgactagagaaagactgagctacgtattgtggatacatttttctgcatctcacaacgtagcagaatacgaggcgcttcttcacggactaaggattgcaatctctttgggaattcagcgtctgatagttcgtggagattctcagttggtcgttaatcaagttatgaaagagtggtcctgccttgatgataacatgaccgctaatcggcaagaggtgcgcaagttgaaagacaaattcgatgggctcgaactcacccatgttcttcggcacaataacgaagcagctgacagactggctaattttggttcaaaacgagaagcagctccttctgacgtgtttgttgaacatctttacgaaccaaccgtaccaaggaaagaaacaatcgaagccacggacgctcaaaacgtagaactcccccaagataaagatgaagccgagcggatctccaggcgcagcaggctctatatcattcatgaaactgagctgtacaagaaaagtccatcaggaatcctgcaacgctgtgtatctttagaggaggggagacaattgttaaaggatatacattcaggcatctatggcaatcacgctgccgcacgaaccattgttggcaaggcttatcggcaaggttttttctggcccacagctgtgtccgatgccgacaagattgtacggacatgcgagggttgtcaatttttcgccagacaaactcatctacctgctcaagagttgcagaccatccagttgtcttggccgtttgcggtttgggggcttgacatggttggcccgtttaaaaaggcagtcggcggttatactcacctctttgtggctgttgacaaattctccatgtggattgaagctaaaccggtcatcacaatcacggcagacaaggctagagatttcttcatcaacattgttcatcggttcggggtacccaatcggatcattaccgataacggcactcaatttactggcggagtatttaaagacttttgtgaagacttcggcatcaagatttgttacgcctccgtagcacaccccatgagtaatggacaagttgaacgcaccaatggcatggtacttcaagggataaaagcgcgagtcttcgaccgactgcatccctatgccgacaagtgggtggaacagctgccatctgtactttggtccctgcgcaccactcccagtcgagccacgggccagtcaccgtttttcttagtctatggagcggaagcaatgttgcctagtgaggtggaatttgaatctttacgtttccgcaacttcagcgaggagcgctatggagaagaccgagtagatgatcttaaccgattggaaaaagcccgcgaagcagccctaattcagtcggcacggtacttgcaagggttgcgttgttatcataatcgcaacgttcgatcacgagcttttttagtcggtgacctggttctgagaaaaattcaaactacacgagataagcacaagttatcccccttatag

SEQ ID NO: 40087 - DNA, 800 bp, Oryza sativa
  unsure (1)..(800): unsure at all n locations
  Clone ID: PAT_MRT4530_43564C.1
nggaggcacagaccgngtgtttccnttacttcaaatngtatttcttccattntgtggctggtactgnaacttntcttaggttaactggacctgnaagtagtngtacctgncaacagttggctcctaacatggattttgggcaatgcttaagttatgagggtacctcgcggccgccccgcttcagtttccgagtccgcctcccccgccctggccctcagctacccccccctgcgccgcccctctgagctgatcccccgctgcatcgggtccaggctttgggcattcctgatgggggtcggggagctcggcggcgctccctgtgggttccgggcctccgccctcttgcgcctcctggccgttgcggggtgtgctgccacgcctgtaggccggcgcacaccagggcttgcccagtcacgccgtagcggcaccacggccgctgtgcgcgcgcctggcggctcccccccagggcgggctggggcccgcgcccccccgcgaggccggcccgcgcctccgggaggcacagaccggtgtttccttacttcaaatgtgtttcttccatttgtggctgtactgaactttcttagttaactgacctgaagtagtgtacctgcaacagttgctcctacatgatttggcaatgctaagtatgaggtacctcttgtagctgtttattaccattcttctgcaacctgactcagtaaacactaggtggttgaagaaacctgataatggagagcatatctgcaatggttgtatttgtggttcagcagtgttggacttgataatcttttcctcgtgcc

SEQ ID NO: 40088 - DNA, 5665 bp, Oryza sativa
  Clone ID: PAT_MRT4530_43565C.1
tcatggggtgtgccacgtactcatggggtgtgccacggaggcataacaaactttaatgccaaagtcttcacaaaagtctttaaatgctccgctagtgaattgagtgccattatcagtgatgatccgattaggtaccctaaaccgatgcacaatgctgatgaaaaaatttctagctttatctgctgtgatcgtgatgaccggtttagcctcaatccacttggagaatttgttgatagccacaaagagatgcgtgtaaccaccgactgcccttttaaacgggccgaccatgtcaagcccccagaccgcaaacgaccaggacaacgggatggtttgcaactcttgggctggcagttgaatttgtctggcaaaaaattgacaaccttcgcatgtccgcacaatcttgtcagcatcagacacagctgtaggccagaaaaaaccttgccggtaagctttgccgacaatggtgccttgagtatccatggcttcaattgtttcttttctgggcacggttggttcgtaaagatgttcgacgaacacatctgaaggagctacttcccgtttagaaccaaaattggccagtctgtccgctgcctcattattatgtcggatgacgtgggtgagctcgagtccatcgaatttatcttccaacttgcgtacctcttgtcgataagcagccatattatcatctagacaagacaactctttcatgacttgataacaaccaactgagagtcggcgaatgcctagagagattgcaatccttaatccatggagtagcgcctcgtattccgccacgttgtgggacgcagaaaaatgtatccacaatacgtagctcaatctttctccggtcggggaaattaatacgaccccagctccagtgcctgtaagcctcttcgacccatcaaaatgcatagtccaatattccatcttttcctctggcatgtcttcttggcactcggtccactcggcaaggaaatcagctaaagcttgtgacttgatcgaagttcgtggcttgaacgatatgtccaaagacatcaattctaaggcccacatcgcaatccgtccgtttgcttcgcggttatgaagtatatccccgagtggaaacgatgtgaccaccgtgaccgagtgactttgaaagtagtgagataatttcaacctgggaggttgaactttttgaatatggccttcctcttcacgctcgacaaccaggaccgtgctcacaacctgggaggttgccgacacatataacagtagcggctcttgtggatgtggcgaggccaaaactggtggagtagtgagaagtttcttcaagtcttcaaaggctttttgtgcttcgggtccccactggaaattgtcagtcttcttcagcagcttgaaaaagggcatcccccactcgccggttcgtgagacgaaccggctgggtgctgccatgcaaccagtcagcttttggacgtctttttgggagcttggcggtttcatgttgaggatggcattgattttctccgggttggcctgtatgcctctttgagataccataaatccgagcaacttccctgacggtactccgaagatgcacttttcagggtttagtttcatcctgaaagcatgaatgcttgcaaaagtttcttctaagtccgtgatcaggtcatccttctgcttgatcttgacgactacatcatcaacataagcttcaacattgcggccgatctgagttgaaaaacatctttgaatcatgcgttgataggttgctcctgcgcttttcaatccaaagggcatggtgatgtagcagtaggccccaaagggcataataaacgaggtcttcaagcagtcggattcttttagtcggatctgatgatatcccaagtagcagtccaagaaattgagtaactcgcagccggctgttgagtcaaccacctggtcaatgcgaggtaacccaaaaggatctttgggacaagacttgttgaggtcggtgtaatcaacacacatgcgccactgtccggtcttcttccgaaccaagactgggttagccagccagtcgggatggaggacctctttgatgaagcctgctgctaacagcttggttagttcttccttgatcgcatccttcctgtcctgtgcaaaacggcggagtcgttgcttgatgggtttggcgtcttccttaacgtgtaaagagtgctcaatcacctctctaggaataccaggcatgtcggatggtttccacgcaaaaatatctttattattagcagtcttgttaggatcagagggatctaaaggaatctttttggtcttggcatcgctttctccgcttttgggcatcttggttgcgggcagttctccttcgcttgccatggtcaccgctagtcggatctcttcttggtcgagtgtgatctcgcgggtctgggccatctcgcaactttctttatcacatgtgacggcttgcttgatgtcgctccgtagggatatgactcctcgaggaccaggcatcttcatcatcatgtaggtgtagtgggggacagccatgaatttggctagggttggtcgtccgagtatagcatgatatgctgtttcgaaatcagcaacttcgaaacaaacgttttctgtgcgaaaattctcccgagtgccaaaagtaaccggaagagtgatctggccgactggtgtagctgataaacctgggataacaccgtggaagggtgcattactcggctttaattccgtgcgaggaatctgcatatcgtccagggtcttagcgaaaaggatgttgagtgcactgccaccatcgatgagagtccgtcggagcttgacattgcgaaccactgggtctagtatcagggggtaccgccccgggtggaccactcggtcgggatgatccgagcggtcgaacttaattgctatctctgaccaccgaaggtattggggtgtgttgggctgaaccgcattgatctcccgttcagttagcttctgctttctcttagattcataagccaggggtccgccgaagatgtggttgagttctttgcgatgatcttgaaaaccagtcggggcatcgtcttcatcatctttcttctttgatgtgccttgatctccgtctgaaggcttacgcgcgttcttgacgtattgctccgcaaagtggttggagttgggatgatgcggacattgggagttcattatcttgtcgaaggtgttgacgtgggaacgttgtcgggaagatggagaggttgttgccacaagctcttcgggcttacgcttgtgatccttgtggttgttacttccactccctcctgcggccggcatatccttctttggcttccaagtggtccccgactgcttggacgcagtaatagcatcttcggctttgccatactcgttggctttttcaaacatctgcttaaccgtcttgggaggtttgcgcccgaacttgccaactaggtcctcgtggcgaatgcctttagtaaaggcggcgatgatgacatcgtcggtgatgtcggagatcttgttgcgttgctcggagaagcgtcggatgtaatctcgaagggattctccagacttcaggccgttcaaaagtgccttggaagttggcgatgaagtggtcgcgtagttctgcccatgatccgattgtgccgcggggtagcccgtgaagccaggaccgggcagaatctgccaaggccacgggcagatagttcgccatggctttgctgtctcctcctgctgcgcggattgtgagaccatagacggtgagccaagactcagggttagtggtgccgtcatacttctcgattccagtcggcttgaagccggccggccaatccactcgacgcaggtcgcttgtgaaggcagcaattccatccacatcgttgtcgtaacgatctggtgaatgggggacgtagcctctttgccgtgcggcgctggttgatagtttcgcgaagatcgacggggcgcccctgctcctgcgactggatcccgcgccgacgacgctgaggcttggttggtgatagtcttgagatcgaagagggggaactcggctgccagtcggcgtgcggacgcttgcagagttaaccgggaccgaggcggtgatcatggtcttgatctggttcaagatgttgacgacgtgattggcttgattgagtgcgtcttccttgaggagggtgtcgaggagggtgatcgctgcaaccgcgttcttttgaggggtgcgaaaaaccgtcgttccctcgacgtcttgctgcccgataagttctcgtgctagtcgcctggcatccaaggcgtgctgtcgccggtcctcagcctcttttgcagcccgttcgcgttcctgttgctcacgctgcagccgttctcgctcttgtgcttggcgctcctcttccagtcggcgtcgttcggcttcctgttgcacgcgttgttcttctacttctcgggctttacgctgttcttccatctcgttgtcagccatgaaaatgccaaagtagagaggcgtgtagttatcttcaaagtcttcgtcgaagtcgtcgaggttgcggtagtcgtagcggtagccgaagtagtcgtactcaatgatctccgttggccgtgagtcgacgccgggggagctgaggtagccatccagttgttccgtcgaaaccgtgccgagaggatggagtatgatgccgacttccctggagctaggctggatcggggccgaggccggatccggcctagtcctacggggagaagacgcccttgtggtgaagacagcagccaaatcgtcggggagtttcatcaggattggcggataggccccatcgtcttgatcgggccgtgttagagtagattggatctcgtccgagtggtttgaagccaactcgggggagatgatcttggggtagatctcggccaagttcgggataccgaacggggcggagatctggcctcttcccgactggttcgaatccgagtcgaggagagaaatcttgccgaagtcgttggtgatgaagtcgaggctgccgaaccagaacgcctggtgcgccattatgtttctcagaagaccggtgacagcaccaccacgctggtggccggagctagctggaggagctcctgcggcttcccgcctccggtcaagcgagctgggagggatggaggaggcgacgggcgccgaagatgtagcgccgtctaatggtgctccgccaccggtggtgaagacgacgacggaaggcgggaatgcagcggcggcagaaggaggatgaggaccggagctgtcgtcactccttgcgacgataaggatggcctcgagtccgccgagagcggcggcaaggctcgtgagtccacctctgcgcccattgccgcagcgcccggcccgccgccgctcgtcgccggcctcccagctcctcccccaccgcccgcgcgccgctcctcccctgtcgcccgctgccgccacattcccgccttccgtcgtcgtcttcaccaccgccggagcaccatcaacggcgccacatctccggcacccgtcgcctcctccatccttcccagttcgcttgattggaggcgagcagccgcaggagctcctccagctccggccaccggcgtggtgctcatgctccgcttccgcagcattctctcgccggaaaaagaaccaaggaaagtaagagagagagaggaggaaccaaggaagagaagatggaggggagagatgacgtggcat

SEQ ID NO: 40089 - DNA, 4140 bp, Oryza sativa
  Clone ID: PAT_MRT4530_43566C.1
atgggttccatttctggcatcgacgacttcgccttccctcccgggcaggcgttccggttcggcagcctcaacttcatcaccaacgacttcagcaagatctctctccttgactcggattcgaaccagtcagggagagaccaggtccccgtgccgttcggtattccgaactcggccgaggcctactccaagatcatatcttccgagtcggcttcaaaccactcggacgagatccaatctactcctccgcgaccagatcaagacgacgggtcctatccttcaatcttgatgaaacttcctgatgacttggacgccgtcttcacagtcaaaacatctcccactcagagatctaggcgagctccggcatcggccctgatccagtctagatccagggaggttggcgttatactccaacttcttgggacagtctcgacggaagatttggatggctacctcagctcccccggcgtcagttctcgaccaaccgagatcctcgactacgacgaccacgacgacctcgacaacttcgacgacagctatgaggataactacacgcccctcttcttcggtgtattcatggctgacaacgaaacggaggaacagcgccgagcccgagaagcggaccaagatcgcgcacggcaagaagctgaacatcgttacgacaacgatgtggacggagttgctgccttcacaagcgatctgcgtcgagtggattggccagccggctttaagccgactggaattgagaaatatgatggcaccaccaaccctgagtcttggctcaccgtctatggtctcgcaatccgcgcagcaggaggagacagcaaggccatggcaaactatctgcctgtggctctagcggattccgcccgatcctggctccacggactaccccgtggcacaatcggatcatgggcagaacttcgtgatcacttcatcgccaacttccagggcacctttgaacgccccggcacacagtttgatctctacaacgtcgttcagaagtctagaggatcccttcaagattacatccggcgcttctccgagcaacgcaacaagatctccgacatcaccgacgacgtcatcattgctgcctttactaaaggcattcgccacgaggacctagtcggcaagttcggatgcaaacctcccaagacggtcaagcaaatgtttgaaaaagccaacgagtatgccaaagccgaagatgctattacagcgtccaagcagtcgggcaccacttggaagccaaagaaggacacgccgaccgcaggagggagtggaagtaacaaccgcaaggatcgcaagcgtaagcccgaagaacttgtggcaacaacctctccatcttcccgacaacgtccccgcgtcaacacattcgacaagataatgaactcccaatgtccgcatcatcctaactccaaccacgtggccaaagactgcttcgtctacaaacaatttgcggagcaatacgtcaagaatgcacgtaagccttcagacggagagcaaggcacatcaaagaagaaagacgatgaagacgatgcctcgactggttttcaagatcatcgcaaagaactcaatcacatcttcggcggacctctggcttatgaatctaagagaaagcagaagctaacagaacgggagatcaatgcggttcagcccaacacgccccaataccttcggtggtcagaaatagcaatcaagtttgaccgctcggatcatcccgaccgagtggtccacccggggcggtaccccctagtactatacctagtggttcgcaatgtcaagctccgaagaactctcattgatggtggcagtgcactcaacatccttttcgctaagaccctggacgatatgcagattcctcgcacggaattaaagccgagcaatgcacccttccacgaaaatgtttgtttcgaagtcgctgatttcgagacagcataccatgctatacttggacgaccggccctagccaaattcatggccgtcccacactacacctacatgatgatgaagatgcttggtcctcgaggagtcatatcactacgaagcaacatcaagaaagccgtcacatgtgacaaagaaagttgcgagatggcccagacccgcgagattacactcgaccgagaagagatccgactggctgcgaccatggcaagcgaaggagaagtgcccgcaaccaagatgctcaaaagcggagaaagcaatgatatctttgcatggaaaccatccgatatgcctggtattcctagagaggtgattgagcactctttacatgttaaggaagacgccaaacccatcaagcaacgactccaccgttttgcacaggacaggaaggatgcaatcaaggaggaattaaccaagctgttagcagcgggcttcatcaaggaagtccttcatccagactggctggctaacccagtcctagttcggaaaaagacggggcaatggcacatgtgtgttgattacaccgacctcaacaagtcttgccccaaagacccttttgggttacctcgcattgaccaggtggttgactcaacggccggctgcgagttactcagtttcttggactgctactcgggatatcatcagatccgactgaaagaatccgactgcttgaagatctcgtttattacacccttcggggcctactgctacatcaccatgccctttggatggaagaacgcaggagtaacctatcaacgcatgattcagagatgtttctcgactcagatcggccgcaatgttgaagcttacgttgatgatgtagttgtcaagaccaagcagaaggatgacctgatcacagatttagaggaaacttttacaagcattcgtgctttcaggatgaaactaaaccctgaaaagtgcatcttcggagtaccgtcagggaagttgctcggatttatggtatctcaaagaggcatacaggccaacccggagaaaatcaacgccatcctcaacatgaaaccgccaagctcccaaaaagacgtccaaaagctgactggttgtatggcggcgctcagccggattgccatctctctaggcattcgccgattaattgtccgaggggactctcagttggttgttaatcaagtcatgaaagagtggtcctatctagatgatactatgactgcttatcgacaagaggtacgcatgttggaagacaaattcgatggactcgagctcacccatgttctccgacataacaatgaggcagccgacaggctggccaattttggttcaaaacaggaagctgctccttcagatgtgttcgttgaacatctttacgaaccaaccgtgcccagaaaagagacaattgaagccatggatactcaaggcgtaagcatgatcgaagccgactggagagaaccgttcataaaatttttgagcaaacaagaacttcctcaagacaaaaatgaagccgagcagatttcccggcgcagcagactttacattattcatgaaactgatatgtacaagaaaaatccatcaggaatactgcaacgctgtgtgtctttggaagaaggaagacaattgttgaaggatatacattctggtatttgtggtaaccatgccgctgcatggactattgtcggcaaagcttaccggcaaggttttttctggcctacagctgtatctgatgctgacaagattgtgcggacgtgcgagggttgtcaattttttgccagacaaattcacctaccagcccaagagttgcaaaccatcccgttgtcctggccgtttgcggtctgggggcttgacatggtcggcctgtttaaaagggcagtcgggggttacacgcatctctttatggctattgacaaattctccaaatggattgaggctaaaccggtcatcacgattacggcagataaagctagagattttttcattaacattgtgcatcggtttggggtacctaatcggatcatcactgataatggcactcaattcactggcggagcatttaaagacttttgtgaagacttcggtataaaaatttgctatgcctccgtggcacaccccatgagtaacggacaagtcgagcgtgctaatggcatgatacttcaagggataaaagcacgagttttcgaccgactacatccctatgctggcaagtgggtcaatcagctgccgtccgtactttag

SEQ ID NO: 40090 - DNA, 10187 bp, Oryza sativa
  Clone ID: PAT_MRT4530_43567C.1
atgcccgttgggttatttccggtcgtgacagccaccaagacctctggcgctgctaccaccggctccgtgtcgtcaaggcggagggcgcggcgagcggcggctgttgctcgccgttcggctgccactccctcgtcagcacctctgacccgggaagatcagcgtggagggccagatgcccgcatcggtatcgagcgccggcgtaatggtcgacgtgctacccacgcaacggagggtgcctcctcgtccggagtgtcacctcaacacggacgcggggatcagccctccgtgcccccggttggtggtgtcggctgtagagcctttgtagcgagccttcggaacgtccgttggcccccaaggttccggcccaccatcgccgaaaaatatgacgggagcgtcaaccccgccgagtttctccaggtctacacgaccgggatcgaggccgccgggggtgatgacagggtgaagaagcggacttacacgcagtacagcgaagggatgatgagtcacttcgctcatacattcagcggtctgtcaagtccgcaacaccataccatgcatccctgcacacgcggtgatctacgcgttcaggggggtgtgcggcacaaccgcatgctcgaaaagatcgcctccaaggagccccagactaccgcggagctttttcagctcgcggaccgagtggctcgtaaggaggaggcctggacctggaacccctccggttccggtgtggcaacttcggccgcccccgggtccgctgctcagacagggcgacgtgacaggaggaggaagaagaggtcagcccattccgacgacgagggtcatgtcctcactgtcgagggcgcttcgcgggccacccgaaaggggaggcctgcgagcgacaaaaagaaggaggccggcgctcccagcagggagcgcccaaccggcaagtggtgcatcgtccacaacacctccctccacgacctcgcggactgccgcgcagtcaaaagtttggctgagcggacgagaaagtgggaggaggagaggaggcaggagcgccgagagggtaagtccccggcggtaccctccggcaatcggcgaagtgaggccaagcagaaggcccccgtcgaggacatcgatggcggcgatgatgacctaggctttcaggagcctggggccaccattgccactgtcgatgggggagcgtgtgctcacgtttctcgccggagcctcaaggccatgaagcgagagcttctggccgcggcccccactcatgaggcgacgcgtcgggcgcggtggtcggaggttgccctcaccttcgaccagaccgaccacccaccgtgtgttgcccggggaggacagatcgcgatggccccggggatggtgctctggccgtcccagccgattatcggtgtgacgccggggcacacatggccgttaggtcatatcgacctaccggtcaccttcggtggatccgtcaacttccgcacggagcgggtaaacttcgatgtggcggacctaagtctgccctacaacgcggtcctagggaggcccgcgttggtgaagttcatggcggcggtccattacgcttaccttcagatgaagatgccgggccccggtggccccatctctgtccatggcgacctcaaagtcgcgcttgcttgtatggagcagcgcgcggatcacctcgccgctgcgtccaagcccgagggtggcgacgagaggcttggcacctccgttcccgccgccccgaggcagaggatgatcacatgcgacgaggtcccggaagacgcgctcgtctccttcctgcgggcaaacgctgacgtcttcgcatggagaccggcggatatgcccggggtccccagggaggtgattgagcaccgtctcgccgtacggccgggcgcaaggccgatccggcagaaagtgcggcggcaggccccggaacgtcaagccttcatccgcgaggaggtggcgcgacttctggaggccggattcatccgcgaggtcatccatccggagtggctggcgaacccggtggtcgttcccaaggcgaatggcaaacttcggatgtgcatcgactacaccgaccttaacaaggcatgtcctaaggacccttaccccctgcctcgcatagatcagattgtcgactccacagcggggtgcgaccttttgtgttttctagatgcatactctggttaccatcagattcgcatggctagggaggatgaggaaaaaactacattcattacccccataggaacttattgttatacgacaatgcccttcgggttaaagaatgcaggtcctacttttcaacgtactactcgaatttctttgggtagccaaataggacgtaatgttgaggcttatgtcgatgacttggttgtgaagacgcgcgaccaagaaactttactttcagatctggcggaaactttcgagagtctccgctccgcccgcataaagctgaaccctgataagtgcgtgttcggtgtacctgcgggcaagcttctcggcaagcttagggatgtgcaatgcgtcaccggttgcatggccgccctaagtcggttcatatcgaggctgggagagaaggcgctacccttatttaagctcctcaaacgctccgggccgttcacttggacggaggaagctgaacgtgccctcactcagttgaaggcgtatctcagctctcccccagttttgatcgccccggagccagatgaacccttgctactctacttagcggcgaccccgcaagtagttagtgcggcgttggttgtggagcgcgatgaggacaatcctcattccgcgcatccccaccctgtgctggcttggcccgggagagagcagggaggagaggcccccgagccgaacggtggcccaaggcccccgacgaccggagctggccctctgcccgcttgtcagacggtgccaggtgcccccgacccccaggatggcccgggggccactgcgggaaggccgcacctatcgccctctgaccccgaggttaaccctgtgccgactcgacccgggagagagcagggagaagaggcccccgagccgaacggtggcctaaggcccccgacgaccggagttggccctttgcccgcttgtccgacgatgccaggagcccccgacccccaggacggcaccgaggccactgtgggaaggccgcgcctgtcgtcctccgaccccgaggtcgtcggcacagaagacgagtgcgccccgcgaggccgcttggacgaagagcgccccagggatgcggcccctggcgaagaggatcggccccaccgaaaggtgcagcggcccgtctactttgttagtgaggccctccgggacgccaagacccgataccctcaggcccagaagatgctttatgctattctgatggcttcgaggaaactgcgccattatttccaggcgcatcgggtcacggtggttacgtcttaccccctcggccaaatcttgcataatcgagagggtacaggacgggtggtctgtatggagtaccggtgctctgacccgcagatggatgcttacgtacgccaagtacggcgtatggagcgccatttcgacgggatagagcttcggcacgtgcccagacgggataacacgattgccgacgaactctcacggctcgcttcctcgcgagcccagaccccaccgggcgcctttgaagaaaggcttgcccagccgtcggcgcgacccgaccccttaggggagacggacgcgcctgaccggcccccgaggcccgtcggagtccaggcctcgggacccgaggggagtgctcccagctcccttagattgattgcttggatcgctgagatccaagcatacctcacagataagactctacccgaggaccgcgaagggagtgaacgcgtccagcgcatctccaaacgctacgtgctggtagaagggaccctctatcggcgcgcggctaacggaatcctcctgaagtgcattcctcgggaacaaggcgtcgagcttcttgccgatatccatgaaggcgaatgcggagcccactccgcctcgcgcaccttggttggcaaagcctttcgtcaaggtttctattggccgacagctctcaatgatgcggtcgacctggtccggcgatgcagagcgtgtcaattccacgccaagcaaatccatcagccggcccaggccctgcagatcataccactttcatggccatttgctgtctgggggctcgatatcctgggaccgtttaggcaggccccgggcgggtttgagtatctgtatgtcgcgatcgacaagttcactaagtggcccgaggcttatccggtcgtcaagatcgataagcactccgcacttaagttcattaagggcattacagcccggtttggggtgcctaaccgtattattacggataatggcacccaattcactagtgaacttttcggcgatcactgcgaagacatgggcatcaagctctgcttcgcctcccccgcccaccccagaagcaatggccaagtggagcgcgccaatgcggaaatcctcagaggccttaaaaccaagaccttcaacatcctcaagaagcacggcgattcgtggatcgaggagttgccagcggtgctctgggcgaaccgaaccacaccaagccgagcaaccggggaaacgcctttcttcctcgtctacggcgcggaagcggttctcccatccgagctcaccctgaggtcccctcgggccaccatgtactgcgaggctgatcaagatcagcttcgcagagatgacctcgactacttggaggagcgaaggcggcgcgcggccctccgagccgcgcgctaccagcagagcctacggcgctaccatcagcgccgcatccgggcccgatcactctgcgtcaacgacctcgtcctacgccgcgtccaaacgcgtgctggattgagcaagctctcaccaatgtgggagggtccgtatcgagtgatcagcgtcccccggccgggctccgttcggctggccgcgggcgacggcacagagctgcctaacccgtggaacatcgaacaccttcgtcgcttctacccctaataggggctcgagtcggctaaaatcgccaaaaggggcccagaaccgagccgtgccccggggcgtggttaactccgggggggaatcggcaaaaacccacaaccgggtcacccataaccctcggtcaccacgctcccggcctggccagtctcgacacgtggatctccccaggcactagccccgacccgagccatttgaggactagaacccgggtcgccagcctcgtcgccactgtcgcccacaccgccgtcatcgccctcctcgtcggagttgagggcgaacgcgagccgaggggccgaaccctcgaagctgtggacgatatggtcggcggcatcccggacctgcacgcgcgcgccgtcctcggtcccgggagggaactcgtccagcgccgtccatggggagaagtcggggtccctggcctggtaactcgccagtacgagctccaccgctcctcgggcgaggtccctcgaggatgagttaatcgtcccctcgagctcctcggggagccgctggagagtcccggccatctccgagaggcgctgggcgaggcccccctggttggcggcgtacttcacagtccgcccgccccagagacccgcctgccgcccggcgcggtctaaacgggacacggcatcgcgaagcatgctgggccctatctcgcctgccaggcgaagggcctcgacctccccggtggacgaatccagcgcgccctgcagatccgcgatggtgtgttcggcagctgcgaggcgggcggctaagtcgctgtcgcccgtggccgccccgccgctacgcgcccttgcatccagctcccttgcctgcgcctcgagttcagcggcccgctggttcagtgcggccctctcggcgcgggcactttccagattgcgacgcgcttgttcctcttgcgcagcctcgcggagggacaggctgtccgccagccgttgcgccgcggcctcggcctccttgagagctcgctcccgctcggtgagcgcgtcctcgcggaggcggagcgcggactcttcttcggcacaggcggcttcgtgcaccgccagtgtgacctcccgaatagcaacggcggcctcgcgatccgccaggtccctctccacggcgcaggcacgctcttccagcgccatggcacgggcctcaagggcttcttcgcgccgccgggatgccacctcggtctccgccgcccgccgttctcgggcagcggcagcgtcaaggaccccccgggcggcgtcgagctttttccctagctccgcctcccagctcccgtattgaaggcggagggtgtcctgcgcctcgttcatcacggtggtggcgatgagggcagccccccgctcctcctccacctccttggcgatctcccccagcaccttccgacgggcttcgagctctgagacgtgccggcggtgtgccttgcggcccacctccaccatggcctccaccgagcgtcgcccctcttcgacacgcgcccatgcggcgtcaagctccgcccgctctgcttgcagggcctccacttgggcacttaacccgtccaacaccgtggtgtttgcgacggccaaggcctgcagaaggggttctgcgctcagtggagcaacggaaggcgtggggaagagccgcctcggtgaggatgccgcgcggctcggcccgccgatggacatgccggactcagggatgtcccccggacctggcttgtcctgagcgtcgcccgagggagtgggcccaagcgatacgcccgcggcctcgtcgcgagctgcctcggaagtcgtcgccgcctcggcctggcgaagtctggcctcctcccgagcggcttcttcagcttggcgagctcggacggccacctgggcggcctccccggcttcccgtaggcgatccgcggcttctcgccggtcagattcccgcctccgagcctctgtggtcgccgggtcctcggcctcagactggccggacttggaatggcgggagggacgcgacgggatctcgcttggaggggaaataaggtttccccgggatggttctgtcccccccatcttgcggagccgtttcttcttccgctccccctcgggctgcgacgtcggcgtggccccctccgggcgcctgctgctggcacgcgccgccccgccccctcggggaggagatgggggaggggttccttcctgcttcctcttcccccgggcgtcggcagggcggccgctccccgggcccccgtcgcggggcccagaagcacgaccccctcccggggtagattgttcccccctgcggctcccgcccgcgccatcgtggcctcgaggagcccgctcctccgacgccccgaccgcctgcatgatggtcaggatggaggcgcggtctggatcgctgcagagggggaggactccttgaggaatgagggatgcctccacggagctgagattcagcacccgttggaccactatcttgaagtcctcaggagcccggtcccatctgaccccctggtgggtcctcatacagtcctcggacccggtgtactcccaggcgccccgggcgcgccgctggagtggcgcgatccggcgacgaagatagtcgccgaacaccatggcccctgtgagcccctgggatcgcaggcccgccaggcggtcgaggacggcgtcgtagccatctcccagatctaccggcgcccgccagttggaggcctgcgttggaggctggctcggaagtcggaggcgcgcttcgtcggcgaggggggtgtagaaccagtcgctcttccagtcatcccacttcttgcggaggacgcagggaatgtagcggttcagcaccggccctcgcggctggaagtagcaaccaccaaccaccgacggcggcgacaccggctgtacggtgaagaaccaccggaacagccgaagggatgggcgcaccccgatgaacatctcgcacaggtgcgcgaagatggccaatgtcattaccgcgttgggggtgaggtgcgccatctggagatcgtaaaactccagaacatccatgaagaaagaagaaaatggcggaaccagccctgccatagcaaaagggaggaagaagacggaccgccccgggtagcgtggcgccgggcatccctcgcccagcgagactatctcccggtcagtggcagattccggcatgaagcggcgcggcagcccggcctgtctctcgctcacgatgcgggaaggcggcagcacggcctcgccccgtcctgtcaggatgagagtctctaggcactcgtccctagccggagccagcgtgctagctcctggagatggcacgttggtcatcaccgacgacggcggcggctcggcgaagaagacggctcgggcggcggacactcgccggcgaacggcggcaccacggcaccaacggagggcaccagcacgtagaggacaacgcggcgaacacaccggtgaccaaaacggcggcggagaaggaacggacgacgacggcgacgagaaggaagcggcggctaccttcgggttgtcgacggcgacgaagctccggcgggttccgacggctgcgaaggggcggacgaggacggcggcgacttggcgatgacgacggcggtcttcccgagcgacggcgacggctggaacgacggcggcgcacggagttccgtgctcatcctccaagaaaccaatagcttttcctcttctcatattcttcttgatctcttgaatatcaggatcattaatttgggcttctctaacttgatcaattagagtgggcttcgcttctaaggattcttccgaccacttgtactttacatctttctgaagcagtcgtgtcatgggcttagcaatcttggaaaaattctctataaacctccggtaatatcctgcgaggcctaggaaactagtggtaaaagctgtcttaggtatatcttcctctttgattctcaactggtgataccctgatcgaagatctatcttggagaaaacagtggcacctttaagcggagctccccatggtgatgaacttggtctgatgtatcctttctgtagcaaatcatctacttgcctcttaacttctgccaactcattggcaggtaaatcatctgggaacacatcaggatactcccggaccaaaatcacatctggagcatcttgagcttctgcagcagcaacatgattgacacgggcctttgatgctggtacagcagagttattctgggtagggacaaccttcacacgtcggggcttcggacacttgtcagcataatgtcctggatctccacagttgaaacacaccacgggcttgctgccttgctccctcttggcaggttgttgctgtgctggagctgcaacaggacgtggagcttgattacggatgttgttgccagcattgttgttgaagaactgacgctgcggacgaacaacagacgaagaacctccctgtgacatgggctggggtcctaaagtaagacgcggcttctgattatttccctgttgtgtcttgaattgagcaatccgacgtttcttctgctccatgcgattatacttgtcctcctgacgaatagccttatccactaatttctggaaatcaggataatctccaaccatgagtgggtaagaaagctcatcattaagtcctcccaaaaacttctcctggcgctcttcatcattgcacacatcttccggagcataacgagcaagacgattgaactcgtgcagatactccgtaacagagcgagatccctgagtaagcgacctgaactccttcttcttgagagacactactcccgatggtatatgcgtctttcggaaagcagcggtgaattcaagccaagtgataggttcatcagtagtcctgttaaggcggaagtgatcccaccattcagaggcagggccatgcaactgatgtgatgcaaatgagaccttctcctgatcagtacactgaagtaaatccaacttcttctctatggcatgcagccaatcactagcttcaacaggattagtggtactagagaaaacaggcggcctcacacgaagaaattctgctaacttgttctgtggaggtgcatgattattcccttggttttgctgattctgaaattgctgcatcatcatgttcataagctgagtctgttgagcaagaacttgggccagagtgggattctctccattgttgttgttattggggttgttgggaccattcccattgctacgagtattcaccat

SEQ ID NO: 40091 - DNA, 391 bp, Oryza sativa
  Clone ID: PAT_MRT4530_43568C.1
gtaaaaaaaaacccccccttaaaaaggaaaaaaaaacgggggaaagggccaactcggggaaaaaaaaaatggcccaaagaacaaacatttccccgggggaggggacacccacggccaaacaaggggggatactatttccccccgacaaaaaaaaaacaaggtcctgggggagggaagcgagcggcttcaaattggaacgcttaatggttggccagggggaccccgtttaaaaagaaagggaggaatccgaggggaacccgggtgggggggaaaaaaacgggcacgggaaaaaaaaaaaagggttttgcacaaaaaacattgcgcaggaaaatcccgggatttccgcgggggaccaagaatatcaaaaacccccttatttttttctccaaaa

SEQ ID NO: 40092 - DNA, 486 bp, Oryza sativa
  Clone ID: PAT_MRT4530_43569C.1
tcggttgatatcatcaactcggtcttctccatagcgctcctcgctgaagttgcgaaatcatggcagctgttctacccacttgccggcataaggacacaatcggtcgaaaactcgcgcttttattccttgaagtaccatgccattggcacgttcaacctgtccattgctcatggggtgcgctacagaggcataacaaattttgatgccgaagtcctcgcaaaaatctttgaatactccgcctgtgaattgggtgccgttatcagtgatgatccgattgggtaccctgaaccggtgtacaatgttgatgaagaaatctctagccttgtctgtcgtaattgtaatgaccggtttagcttcgatccacttggaaaatttgtcaacagccacaaagtggtgagtataaccgccgactgcctttttgaacgggccgaccatgtcaagcccccaaaccgcaaacggccaagacaacgggaggggatcctctag

SEQ ID NO: 40093 - DNA, 2892 bp, Oryza sativa
  Clone ID: PAT_MRT4530_4356C.1
cgccccccccgcgctgcccctagccgcccgccgcccccccgcccccccccctcggccgcccccccgcccccgcagcgcgagcccgaccccgccccctccccccgccgggcggccgtcggcgcctgccgcagcctccggggcgaggtcgaccgcgccctcaaggcggtccaggagggcgtcgtcgtcgccgaccgcatctgggacatcgtctacctcccccgggttccgggcccggagcaggacgtcgagcccgtcctccgggagcagggccaggagcgcccgcggggctgcccccaggccgagtcgtcgcgccaggccaccgtgttcggggtctgggagggaccctaaaacgaaggccttttccaaggaagggtttggccaacaaccgaaaactgatccaaaagagaaggcaaaagctgaaacaagagattggcttaacaatgtggttagtgatttggaaaaccaaatcgataacttcgaagctgaggttgaaggactttcaattaagaaaggaaagcaaagacctcctcgattggtacatttagagaaatctatcacacggcataaagctcacataaagaaattggagtcaatattaagacttttggataatgatgagttgagtcctgagcaagttaatgatgtgaaagatttcctggatgactatgttgaacgtaaccaggaagattttgatgaatttagtgatgtggaagagctctatagcacattacctatggagaaggttgaagcactagaagacatggtttcacttgccccttccagtcttgtcaagggtgttgcttctgtttctactactgcagttttgagtacgaagagttctgtagcaacttcacctactcaggctactgtatcagcagctccttcgctaagtgtatcacaagatcaagcagaggaaacggcttcacaagaaagcaatcctgaatcggcaccacagacaccaccttcaaaagttggaagtcaaccttcagtgccagtcgtgccgactaccatcagtactagtaccgctgctgtctctgtttcagctgaaaccattagttcccctgtacgcccaattgttcctaccacaacagctgcagtacttcctgcttctgtcactgctcgaagtgctccagagaacataccagctgttacttcagctcctgcgaactcatctagtaccttgaaggatgatgacaacatgagctttcctccacgtagatcatcacctgcagtcaccgaaattggccttggcaggggtattactcgtggattaactagtcagggattaggttcagctccaataagtataggtccagtatcagggaatggatcagttagtgcacttactgacttgtccaaaagaaacatgttgaatacggatgagaggattaacagtggtggtatttctcagcagttgatttcaccacttggtaataaagctcaacctcagcaggttctgaggactactgatacaattagctctgattctagtaacacaaatgagagtactattcttggaggaagaatcttttctcccccagttgtttctggggttcaatggaggcctcaaaacactgctggtttgcaaaatcaaagtgaagcgggccaatttcgtggaagacctgaaatttctgcagatcaaagggagaagtacctgcaaagattgcagcaagtacaacaacaaggcagccttcttaatgtttctcatataacgggcataagtcagaagcaatttccatcacaacaaccaaacccgctcttacaacagtttaactctcagagttcctctatttcctcccaagcgggtattgggcttgggcaggtacaagtaccagaatctgggcatacaaaaagtgaggaacaacaacaaagttttgcagaagatgttagtgtggaatccgttgcaacagctggagcaaacaaacacatgagtgaagatgatacaaagattccattttcgaatccgtcagcatccataacagaaggtactcaactatctagagaccctgatctaccagctgggcagcctttgcaacctggcatgtcatcatctggtgttggtgttatcggccggaggagtgtatctgatcttggtgcaattggtgataacctcagtgtagcttctgcaagtactagtcatgatctgctttataatctgcaaatgcttgaagctgctttccataggcttccacaaccaaaggactcggagcgagtcaaaaattatattccgaagcaccctgcagtcacccctgccagcttcccgcaaattcaggcacctgtagtatcaaatcctgccttttgggaaagaatgggtggcgattcattatctacggatttgttgttctttgctttctactatcagcaaaacacataccagcaatttttaagtgccagagaactaaagaagcaatcgtggagatttcacagaaagtacaatacttggttccaacggcacgtggagccacaagttacaactgatgagtatgagcggggatcttatgtgtactttgatttccatgtcatagatgacggcacaggatcaggatggtgtcagagaatcaagaacgacttcacatttgagtacaacttccttgaggatgagctgtcagtacagacaaattagagagccaggatattagggctaatcaaatcattttcaccattgtgaatcttgtaacttttagaacggaactgctggaatctggaacacttacagattaactttgtggttggatttaaaagctgttctgtgccttcctttccattcatattcaaaaaaagaaacttccaatgaggtataaactgattgctatttctccgggcattttctgttgttctcatagaacacacacccccaattttttagagccgccgaactctagaagcgctttt

SEQ ID NO: 40094 - DNA, 2145 bp, Oryza sativa
  Clone ID: PAT_MRT4530_43570C.1
atggagtgcgagaacgggcacgtcgccgccgccgccaacggcagcagcctgtgcgtggctaagccgcgtgccgacccgctcaactgggggaaggcggcggaggagctgtccgggagccatctggacgcggtgaagcgcatggtggaggagtaccgcaggcccgtggtgacgatcgagggcgccagcctgaccatcgcgcaggtcgcggcggtggcctccgccggcgccgccagggtggagctcgacgagtccgcccgcggccgcgtcaaggccagcagcgactgggtcatgaacagcatgatgaacggcaccgacagctacggcgtcaccaccggcttcggcgccacctcccaccggaggaccaaggagggcggcgcgctccagcgagagcttatccggtttcttaatgccggggcgttcggcaacggcgacgacggccacgtgctgccggccgcggcgacgcgggcagccatgctcgtccgcatcaacactctgctccaggggtactctggcatccggttcgagatcctcgagacgatcgccacgctgcttaacgccaacgtgacgccgtgcttgccgctccggggcacgatcaccgcgtccggcgacctcgtcccgctctcctacatcgcgggactcgtcaccggccgaccaaactctgtggcggtgacgcccgatggcaggaaggtggatgccgcggaggcgttcaagatcgccggcatccagcacggcttcttcgagctccagcccaaggaaggcctcgccatggtgaacggcacggccgtcggctccgggctcgcctcgatggtgctctttgaggcgaacgtccttggcgtgctcgcggaggtcctctccgcggtgttctgcgaggtcatgaacggcaagccggagtacaccgaccacctgacgcacaagcttaagcaccacccgggacagattgaggcagccgccattatggagcacatcttggaggggagctcctacatgatgctggcgaagaagctcggcgagctcgacccgctgatgaagcccaagcaagacaggtacgcgctccgcacgtcgccgcaatggctcggcccccagattgaggtcatccgtgccgccaccaagtcgatcgagcgcgagatcaactccgtcaacgacaacccgctcattgacgtctcccgtggcaaggcgctccacggcggcaacttccagggcacacccatcggcgtgtccatggacaacaccaggctcgccattgccgcgatcggtaagctcatgttcgcgcagttctctgagctcgtgaacgatttctacaacaacggcctgccgtccaacctgtccggtgggcgcaacccgagcttggactacggcttcaagggtgccgagatcgccatggcatcgtactgctctgagctccagttcttggccaaccctgtgaccaaccatgtccagagcgcggagcagcacaaccaagacgtcaactctctcggcctcatctcgtccaggaagacggccgaggccatcgacgtgctcaagctcatgtcctcgacgttcttgatcgcgctatgccaggccatcgacctgcgccacctcgaagagaacgtcaggagcgccgtcaagggctgcgtgacgacggtggcgaggaagaccctgagcaccagcgccaccggcgacctccacaaggcccggttctgcgagaaggacctgctccaggcgatcgaccgcgaggccgtgttcgcgtacgcggacgacccctgcagcgccaactacccgctgatgcagaagatgcgcgccgtcctcatcgagcacgcgctggccaacggcgaggcggagcgcaacgtcgacacctcggtgttcgccaaggtcgcgacgttcgaggaggagctccgcgtggcgctgcccagggaggtggaggctgcccgtgcggccgtggagaacggcaccgccgcaaaggcgaacaggatcaccgagtgcaggtcgtacccgctctaccggttcgtccgcgaggagctcgggacagagtacttgaccggggagaagacgcggtcgcccggcgaggaggtgaacaaggtgttcgtcgccatgaaccagggcaagcacatcgacgcactgctcgagtgcctcaaggagtggaacggcgagcctctgcccatctgctga

SEQ ID NO: 40095 - DNA, 150 bp, Oryza sativa
  Clone ID: PAT_MRT4530_43571C.1
atgtcgatcgctgctgcctccgaccttgacgcctcaacctacgcctccagcagccttctcctcgtgacgtacgagtttcgcgtcacgaggttcatcatcttcaagcgttgtgacgagctgggccgcacaggcttggctccgattcagtag

SEQ ID NO: 40096 - DNA, 3483 bp, Oryza sativa
  Clone ID: PAT_MRT4530_43572C.1
atggaagaggagcgccaagcacagagcgagaacagctgcagcgtgagcaacaggagcgcgaacgggctgcaaaagacgctgaggaccggtgacagcatgccttggatgccgggcgacgagcacgagaacttatcgggcagcaagacgtcgaggaccaagaccatgatcgccgcctcggtcccggttaactcagaaagcgtccgcacgctgactggcagccgagttccccctattcgatctcaagactatcgccaaccaagcctcagcgtcgtcggcgcgggatccagtcgcaggagcaggggtcacgacaagcgatctatccactcgcctcccgaacgacacagggagcgtggagttgaacgacctcgctccccacatcgtcggcgccccgtcgatcttcgcgatactatcaaccagcgccgcgcggcaagaggctacgttccccaccattcaccagatcgctacgacgacgacgtggatggagttgctgccttcacaagtgacctgcgtcgagtggatttgccagccggcttcaagccgactggaatcgagaagtatgatggcaccactaacccggagtcttggctcatcgtctacggtctcgcaattcgcgcaacgggaggagacagcaaagccatagcaaactatttgcctgtggccttagcggattctgcccgatcctggcttcacaggttaccccgtggcacaatcggatcttggggtacctctgaacgctctggtacacagtttgatctctacaacattgttcagaagtctggagaatcccttcgagattacatccgacgcttttctgagcaacgcaacaagatcttcgacatcaccgacgacgtcatcatcgccgccttcaccaagggcatttgccacgatgatctagtcggcaagttcgggcgcaagcctcccaggacggtcaagcagatgtttgcaaaagccaatgagtacgccaaagccgaagatgccattaccgcgtccaagcagtcgggcaccacttggaagccgaagaaagatacgccgactacagggggagtggaagttccaatcacaaggatcgcaagcatcactcttccagtcactttcggcactcgggagaacttccctacagagaacatttgttttgaggtcgctgatttcgagacagcgtatcatgccatactcggacgcccggcgttagccaagttcatggctgtcccgcactatacctacatgatgatgaagatgcctggtcctcgaggagtcatatccttgcggagtgacatcaagcaagccgtcacgtgtgataaggaaagctgcgagatggcccagacccacgagatcacgcttgcccgagaagaaatccaactggctgcgtccacagcaagcgaaggagaagtgcctacgaccaagatgccaaagagcggagaaagcgacgccaagaccaagaagattcctctagatccctctgatcctactaagactgttgtaatagatatctttgcatggaaaccatctgatatgcctggtattcctagagaggtgattgagcactctttacatgttaaggaagacgctaaaccaatcaagcaacgacttcgtcgttttgcacaggataggaatgatgcgatcaaggatgaattgaccaagctgttagcagcaggcttcatcaaggaagtccttcatcccgactggctggccaacccagtcctggttcggaagaagatggggcaatggcgcatgtgtgttgattacaccgacctcaacaagtcttgtcccaaagacccctttgggttacctcgcatcgaccaggtagttgactcaacggccggctgcgagctactcggttttttggattgctactcaggatatcatcagatccaactaagggaatccgactgcttaaagacttcattcatcacgcccttcggggcctactgctacatcaccatgccttttggattaaagaacgcaggagaaacttatcaacgcatgatccagagatgtttttcaactcagatcggccgcaacgttgaagcttatgtggatgatgtagtcgtcaagaccaaccagaaggatgatttgattatggatctagaagagacctttgcaagcatccgcgctttcaggatgaaattaaaccctgaaaagtgcatcttcggagtaccgtcagggaagctgcttggatttatggtgtcccatagaggcatacaagccaacccagagaaaatcaacgccatcctcaacatgaaaccgccgagctcccagaaagatgttcaaaagttaactggctgcatggcggtgctcagccggtcgaagaggctttcaggcgctggagcgggagttgttctaatttcctcaactggagagaggctgagctacgtattgtggatacatttttctgcgtctcacaacgtggcagaatatgaggcgcttcttcacggactaaggattgcaatctccttgggaattcggcgtctgatagttcgtggagattctcagttggttgttaatcaagtcatgaaagagtggtcctgccttgatgataacatgaccgcttaccggcaggaggtacgcaagttggaagacaaattcgatggacttgagctcacccatgtccttcgacacaataatgaggcggctgacagactggaaaattttggtccaaacccgtttaaaaaggcagttggtggttatactcatctctttgtagctgtcgaaaagttttccaactggattgaagccaaaccggttatcacaatcacggcagacaaggctagagatttcttcatcaatactgtgcaccggtttggggtaccaaatcggatcatcactgataacggcactcaattcacgggcggagtatttaaagatttatgtgaggacttcggcatcaaaatttgttatgcctctgtagcgcaccccatgagcaatgggcaagtcgaacgcgccaatggtatggtacttcaaggaataaaagcgcgagtttccgaccgactgcatccctatgccggcaagtgggtagaacagctgccatccgtactttgttccctgcgcaccacccccagtcgggctacgggacagtcgccgtttttcctagtctatggagcggaagcgatgttgccaagtgaggtggaatttgaatctctacgatttcgtaactttagcgaggagcgctaccgagaagactgggtagatgatctcaaccgactggaagaagtccgtgaagcagccttaattcagtcggctcggtacttacaagggatgcgccgttatcacaatcgcaatgttcgatctcgagcttttttagtcggtgacctggttctgagaaaaattcaaactacacgggatcggcacaagttatctcccttgtgggaagaaccattcataatttctgaagttattcggccaggttcctaccgactcaagcgtgaagacggtactcatatcgacaactcttggaatatcgagcatcttcgtcgtttttatgcttag

SEQ ID NO: 40097 - DNA, 5253 bp, Oryza sativa
  unsure (1)..(5253): unsure at all n locations
  Clone ID: PAT_MRT4530_43573C.1
ctacgcgttcaggggggcgtgcggcacaaccgcatgctcgaaaagatcgcttccaaagagccccagaccaccgcggagctttttcagctcgcggaccgagtggctcgtaaggaggaagcgtggacatggaactcctccggttccggagtggcagcttcggccgcccccggatccgccgctcagacagggcggcgtgacaggaggaggaagaagaggtcggtccattccggcgacgagggtcatgtcctcgccgtcgagggcgctccgcgggccacccgaaaggggaggcccataaccctcggtcaccacgctcccggcctggccagtctcgacatgtggatctccccaggcactagccccgacccgagccatttgaggactagaacccgggtcgccagcctcgtcgccactgtcgcccacaccgccgtcatcgccctcctcgtcggagttgagggcgaacgcgagccgaggggccgaaccctcgaagctgtggacgatatggtcggcggcatcccggacctgcacgcgcgcgccgtcctcggtcccgggagggaactcgtccagcgccgtccatggggagaagtcggggtccctggcctggtaactcgccagtacgagctccaccgctcctcgggcgaggtccctcgaggatgagttaatcgtcccctcgagctcctcggggagccgctggagagtcccggccatctccgagaggcgctgggcgaggcccccctggttggcggcgtacttcacagtccgcccgccccagagacccgcctgccgcccggcgcggtctaaacgggacacggcatcgcgaagcatgctgggccctatctcgcctgccaggcgaagggcctcgacctccccggtggacgaatccagcgcgccctgcagatccgcgatggtgtgttcggcagctgcgaggcgggcggctaagtcgctgtcgcccgtggccgccccgccgctacgcgcccttgcatccagctcccttgcctgcgcctcgagttcagcggcccgctggttcagtgcggccctctcggcgcgggcactttccagattgcgacgcgcttgttcctcttgcgcagcctcgcggagggacaggctgtccgccagccgttgcgccgcggcctcggcctccttgagagctcgctcccgctcggtgagcgcgtcctcgcggaggcggagcgcggactcttcttcggcacaggcggcttcgtgcaccgccagtgtgacctcccgaatagcaacggcggcctcgcgatccgccaggtccctctccacggcgcaggcacgctcttccagcgccatggcacgggcctcaagggcttcttcgcgccgccgggatgccacctcggtctccgccgcccgccgttctcgggcagcggcagcgtcaaggaccccccgggcggcgtcgagctttttccctagctccgcctcccagctcccgtattgaaggcggagggtgtcctgcgcctcgttcatcacggtggtggcgatgagggcagccccccgctcctcctccacctccttggcgatctcccccagcaccttccgacgggcttcgagctctgagacgtgccggcggtgtgccttgcggcccacctccaccatggcctccaccgagcgtcgcccctcttcgacacgcgcccatgcggcgtcaagctccgcccgctctgcttgcagggcctccacttgggcacttaacccgtccaacaccgtggtgtttgcgacggccaaggcctgcagaaggggttctgcgctcagtggagcaacggaaggcgtggggaagagccgcctcggtgaggatgccgcgcggctcggcccgccgatggacatgccggactcagggatgtcccccggacctggcttgtcctgagcgtcgcccgagggagtgggcccaagcgatacgcccgcggcctcgtcgcgagctgcctcggaagtcgtcgccgcctcggcctggcgaagtctggcctcctcccgagcggcttcttcagcttggcgagctcggacggccacctgggcggcctccccggcttcccgtaggcgatccgcggcttctcgccggtcagattcccgcctccgagcctctgtggtcgccgggtcctcggcctcagactggccggacttggaatggcgggagggacgcgacgggatctcgcttggaggggaaataaggtttccccgggatggttctgtcccccccatcttgcggagccgtttcttcttccgctccccctcgggctgcgacgtcggcgtggccccctccgggcgcctgctgctggcacgcgccgccccgccccctcggggaggagatgggggaggggttccttcctgcttcctcttcccccgggcgtcggcagggcggccgctccccgggcccccgtcgcggggcccagaagcacgaccccctcccggggtagattgttcccccctgcggctcccgcccgcgccatcgtggcctcgaggagcccgctcctccgacgccccgaccgcctgcatgatggtcaggatggaggcgcggtctggatcgctgcagagggggaggactccttgaggaatgagggatgcctccacggagctgagattcagcacccgttggaccactatcttgaagtcctcaggagcccggtcccatctgaccccctggtgggtcctcatacagtcctcggacccggtgtactcccaggcgccccgggcgcgccgctggagtggcgcgatccggcgacgaagatagtcgccgaacaccatggcccctgtgagcccctgggatcgcaggcccgccaggcggtcgaggacggcgtcgtagccatctcccagatctaccggcgcccgccagttggaggcctgcgttggaggctggctcggaagtcggaggcgcgcttcgtcggcgaggggggtgtagaaccagtcgctcttccagtcatcccacttcttgcggaggacgcagggaatgtagcggttcagcaccggccctcgcggctggaagtagcaaccaccaaccaccgacggcggcgacaccggctgtacggtgaagaaccaccggaacagccgaagggatgggcgcaccccgatgaacatctcgcacaggtgcgcgaagatggccaatgtcattaccgcgttgggggtgaggtgcgccatctggagatcgtaaaactccagaacatccatgaagaaagaagaaaatggcggaaccagccctgccatagcaaaagggaggaagaagacggaccgccccgggtagcgtggcgccgggcatccctcgcccagcgagactatctcccggtcagtggcagattccggcatgaagcggcgcggcagcccggcctgtctctcgctcacgatgcgggaaggcggcagcacggcctcgccccgtcctgtcaggatgagagtctctaggcactcgtccctagccggagccagcgtgctagctcctggagatggcacgttggtcatcaccgacgacggcggcggctcggcgaagaagacggctcgggcggcggacactcgccggcgaacggcggcaccacggcaccaacggagggcaccagcacgtagaggacaacgcggcgaacacaccggtgaccaaaacggcggcggagaaggaacggacgacgacggcgacgagaaggaagcggcggctaccttcgggttgtcgacggcgacgaagctccggcgggttccgacggctgcgaaggggcggacgaggacggcggcgacttggcgatgacgacggcggtcttcccgagcgacggcgacggctggaacgacggcggcgcacggagttccgtgctcatcctccaagaaaccaatagcttttcctcttctcatattcttcttgatctcttgaatatcaggatcattaatttgggcttctctaacttgatcaattagagtgggcttcgcttctaaggattcttccgaccacttgtactttacatctttctgaagcagtcgtgtcatgggcttagcaatcttggaaaaattctctataaacctccggtaatatcctgcgaggcctaggaaactagtggtaaaagctgtcttaggtatatcttcctctttgattctcaactggtgataccctgatcgaagatctatcttggagaaaacagtggcacctttaagcggagctccccatggtgatgaacttggtctgatgtatcctttctgtagcaaatcatctacttgcctcttaacttctgccaactcattggcaggtaaatcatctgggaacacatcaggatactcccggaccaaaatcacatctggagcatcttgagcttctgcagcagcaacatgattgacacgggcctttgatgctggtacagcagagttattctgggtagggacaaccttcacacgtcggggcttcggacacttgtcagcataatgtcctggatctccacagttgaaacacaccacgggcttgctgccttgctccctcttggcaggttgttgctgtgctggagctgcaacaggacgtggagcttgattacggatgttgttgccagcattgttgttgaagaactgacgctgcggacgaacaacagacgaagaacctccctgtgacatgggctggggtcctaaagtaagacgcggcttctgattatttccctgttgtgtcttgaattgagcaatccgacgtttcttctgctccatgcgattatacttgtcctcctgacgaatagccttatccactaatttctggaaatcaggataatctccaaccatgagtgggtaagaaagctcatcattaagtcctcccaaaaacttctcctggcgctcttcatcattgcacacatcttccggagcataacgagcaagacgattgaactcgtgcagatactccgtaacagagcgagatccctgagtaagcgacctgaactccttcttcttgagagacactactcccgatggtatatgcgtctttcggaaagcagcggtgaattcaagccaagtgataggttcatcagtagtcctgttaaggcggaagtgatcccaccattcagaggcagggccatgcaactgatgtgatgcaaatgagaccttctcctgatcagtacactgaagtaaatccaacttcttctctatggcatgcagccaatcactagcttcaacaggattagtggtactagagaaaacaggcggcctcacacgaagaaattcttgctgcgtgcggtcngataccaaggatcccctgttgttgttatctggggggttgggaccattccaattgctccgagtattcaccat

SEQ ID NO: 40098 - DNA, 167 bp, Oryza sativa
  Clone ID: PAT_MRT4530_43574C.1
cgcctgcaggatcccggctcggattttccaggatgacccacgcgttcgtccaccgcgttcgaccacgccgttcgcagtgatcctctacatcatccactttcaggctatcaacatgcctggtgcctttcttcaccccccgtcgcagcattcggtcgcccacctcctga

SEQ ID NO: 40099 - DNA, 395 bp, Oryza sativa
  Clone ID: PAT_MRT4530_43575C.1
ggtagcttccacagcctatgttccaattctcacccaattggcgctccttgctagcatcaatgttcatgcagttacaagccatgattccctcaagtgccactggtgcacccagttcccagatgattgcagagctatgcaaacaagttatgtggtgcctgggactcgggctagcagcagtatgatgaagatgggcgatgccagatgccagacatggtgcaacatgccaccctggtcaactgtccaactctcttcctggtggtttttgtggatgcaaaacgttggtgacatgtgactctagtaataaggtggttgcatactatcgtgtcaaaacactagaaataagaaccattgaataaaatatcaatgcattttcagactgcaaaataaaaaaaaaa

SEQ ID NO: 40100 - DNA, 1075 bp, Oryza sativa
  Clone ID: PAT_MRT4530_43576C.1
ccacgcgtccgcgcattgtccatcggttgctgcttccttctcggaagatagcaccaccagaggtcgtcgttgggttgtaatggcggaggtgcagagcgtgcaggcgctggcgtcgtcgctggcggcgctgccgccggagttcgtgcgttccgagcacgagcggccgggggcgaccacgttccgcggcggcgacgcgccggagatcccggtgatcgacatggcggcgcccgagtccgccgcgcgcgtggcggaggcggcggcggagtgggggctcttccaggtggtgaaccacggcgtgcccgccgcggcggtggcggagctgcagcgcgttgggcgcgagttcttcgcgctgccgcaggaggagaaggcgcggtacgccatggacgcgtcctccggcaagatggagggctacggcagcaagctgcagaaggacctcgagggcaagaaggcgtgggccgacttcttcttccacaacgtcgcgccgccggccatggtcaaccacgacatctggcccagccatccggctggctacagggaggcgaacgaggagtactgcaagcacatgcagcggctggcgcggaagctgttcgagcacctgtcgacggcgctgggactggatggcggcgccatgtgggaggcgttcggcggcgacgagctggtgttcctgcataagatcaacttctacccgccgtgcccggagccggagctaaccctcggcgtcgcgccgcacaccgacatgagcacgttcaccgtcctcgtccccaacgacgtccagggcctccaggtattcaaggatggccactggtacgacgtcaagtacgtccccgacgccctcatcatccacatcggcgaccagatcgagattctgagcaacgggaggtacaaggcggtgctgcatcggacgacggtggacaaggacaggacgcggatgtcgtggccggtgttcgtcgagccgccgccggagcacgtcgtcgggccgcacccgcagctcgtcaccgacgggagcccggccaagtacaaggccaagaagttcaaagattaccggcactgcaagatcaataagctccccatgtaa

SEQ ID NO: 40101 - DNA, 494 bp, Oryza sativa
  unsure (1)..(494): unsure at all n locations
  Clone ID: PAT_MRT4530_43577C.1
agcagctacttaaatacactttaacagaaacactttttaactctaagtatgagaacattggggaggagatgcttgagcagccccatgactttctttgtttttctccttttctcttttttttcctctctctccctctttctcttccttcatcccttctatcctttctttaatcttatttatttattggaaaagattagactcaccactgaagatgtctgaatagatacacttcttttaataaaataaaataataattttatatatctcaaatatcatacctccaatgttcaagcaatgttcaattcttttcccccctcactttngtaataagcacagtcaggaaaaggtaggcattttataaaattaaaagaaaatgtacattaaatatgaaactctagaaaagttttccttttaatatttgaacatcacatcaaaatcatcaagtgaagcaacttatggctttttatagaaacaccaaagctcctattattcta

SEQ ID NO: 40102 - DNA, 243 bp, Oryza sativa
  Clone ID: PAT_MRT4530_43578C.1
atggcgctcttgctggcttacttcaccgttttcgtgttagcagcatctgttcctgccaccggccagcaagccgatgccgccgccacactcgctgatgcagccgccatcgatgccacagccgctatcgccaatgtcgcccttgccgatgctgcctccgccctcgccgatgccatcgccgctctcaccgatgcggccaccaccgccactctagccgaggccgccgctatcgccgggaatgggtag

SEQ ID NO: 40103 - DNA, 1331 bp, Oryza sativa
  Clone ID: PAT_MRT4530_43579C.1
gcacgaggcgcaaaaacacaacgccggcggcctgtaaatacgggcgacgccgacgcgcatcgctccccgaacaccaaacgcctcagcttgccttggctctcgccagtcgctacgcccgcgacgacacgaccgcgccgcgcgcgcgcgagcgagcgagcatgtcgggctcctctgccgacccctcgccatccgcctcgaccgcgggggcggcggtctcgccgctcgcgctgctccgcgcgcacggccacggccacgggcacctgactgctacgccgccgtcgggggcgacggggccggcgccgccgccgccgtcgccggcgtcggggtcggcgccgcgggactaccgcaaggggaactggacgctgcacgagacgctcatcctcatcaccgccaatcgtctggacgacgaccgccgcgccggcgttgggggcgcggcggctggtggcggcggcgccgggtcgccgccgacgccgaggtcggcggagcagcggtggaagtgggtggagaactactgctggaagaacggctgcctccgcagccagaaccagtgcaatgacaagtgggacaacctcctccgcgactacaagaaggtccgcgactacgagtcccgcgtcgccgccgccgccgccaccggcggcgcggccgccgccaactccgcccccctcccgtcgtactggacgatggagcggcacgagcgcaaggactgcaacctccccaccaacctggcgccggaggtctacgacgcgctctccgaggtgctctcccgccgcgcggcgcgacgcggcggcgccacgatcgcgcccaccccgccgccaccaccgctcgcgctgccgctgccgccgccgccgccgccctcgccgccgaagcctctcgtcgcgcagcagcagcaccaccatcacggccatcaccaccacccacctcctcctcagccgccgccgtcgtcgctgcagctccctccggcggtcgtggctccgccgccggcgtccgtttccgcggaggaggagatgtcggggtcgtcggagtcgggggaggaggaggaggggtcgggcggggagccggaggcgaagcggcggcggctgagccggctggggtcgagcgtggtgaggagcgcgacggtggtggcgaggacgctggtggcgtgcgaggagaagcgggagcgccggcaccgggagctgctgcagctggaggagcggcggctgcgcctcgaggaggagcgcaccgaggtccgccgccagggcttcgccggcctcatcgccgccgtcaacagcctctcctccgccatccacgccctcgtctccgaccaccgcagcggcgactcctccggccgatga

SEQ ID NO: 40104 - DNA, 1117 bp, Oryza sativa
  Clone ID: PAT_MRT4530_4357C.1
atgccgatctccaagctcgatgcaccactggctggggttcatgagggatttaagagaggaccccgaggagatgttgatgatgcggtggctcggctcggcttgctccggttcgacagcaacgaagacgatttcccgatggcggcgtccagtgcgcgctccagagcattatcgtcgagtttaggaatggataatggggtgtggcgatgcagctgggaggaggagaaggctagactaggtggtgtggagcaagccaaagaggctgccatgtgggcccagggcgaagggaacatggcccagggcgaaggaaacaaggctggattccgctcggtcccccgtgagccgagcacaccgaggtggctcacggtgcaccgacgtgcacagacatggccgagtagagcagtacccgagcaggcggctcgccggcaacggccaacggcgcggcggcggtgcgacagagtatgggaaggggaaaaacagaaaggggaggagacgacggttctcaccgagcagacacggcggcgagaggtcggcggtgttgccggcggtgaggaagaaacggtgagaagcttcgggtcgtcggcgtcgtcgtcgttcctgcggtcctcgtgctcaacagaggggtggacggggaataggaggaatcgccgaagcggatggtggcgactctgagctccgacgagggatggccggagttgcgacggcagcggcacaagaagagagcggagcggaggccgcggagaaaggaggagagggcggcggtgtgtggggagagaggagggagtcaggggtccctttttatagttcggaggggagggagagagacgccggggaaggagatcgacgccggccatggtggagctgaccattaaagaacaccatcaaaatccaccacgaataatgcgggatagagtaggaaattatgagggaattggagaggatgaggtgggaattaattcccctcaattaatttgatgaaacggcgagtggaggaggcgaatcggaggttgccgtcggcaggaattcggccggaaagagagaggatggctgaaggttagggatgacgagtgggacccacatgccatcgagagggagcacacctgcccaggctcccggccgg

SEQ ID NO: 40105 - DNA, 1248 bp, Oryza sativa
  Clone ID: PAT_MRT4530_43580C.1
atggatgttgattctcgtaccatttggaaagttgttggatggcaaagatttgtggtagtagatgagcctggctctcatttgctttgcaatttctgtgcactttgaaagaaatagaagatggaatttcctttcgctttttccataaagaacataaacttacatagaaaggattaagtacacttctttgttttcatgatgcctgtaagattgatcttcggaaaggaatttctgggttcgagaaaaacagattttgggaagacatttctgatgctctaatttgcaagaaacctagaacaaatgacatccataatcctacacttaggcttatgcacaactggatagctatgactttgtttcctatatcttaggcccataagagagaatgaattgattatcatgtttgatatggctagaaagattaaagatgctcctgttaaatgtatgataagataatggttagagagtataagattcactgctcctgttgagtgcacttctctaattactcttatagcaaacggacttggcgttatttctaatgatcaaattgcttatatttcgactcctcatccctatgttgatgagaattatttagtgcaaggtcatattcttatgcatggagtagatgggtctttgatattctttttcccaggttgtacaaatgaaatcctgttgcctaatgcaggatatcatttgtacaactgttgtgagctaaccattcccctgtagaccatagaaaaatctcgtgcatgtgtatcatacagggacactcgcaacatggcaagaaacgagcgtgaaggttcaacatcctcgacacccgtgcagatgtacgaggctaaccggcagccaactggggatgcacccggatggtcacaagctccacgccacagcaccggaggttcgacctggcagagtgccagtgagagccgatggcaagcgcctcatgacatacactaggggaacttgaacactcattcccccagatcgagcggtatgcctccatcccccgattggtggcattcaagttcctcccgttgggacttgggtgaaatcacgaggaggatggataccctcgatatgcaaacgggagaaatccaacacagcctcaaggaacacatagtgcaaatgcaaggatggcaacagaacgctgatgctcagttcaccaacatcaacaacctgatgcaataacagcatgatgaccttcaagcgtacttccgcttccaggggttcaatccttatcaaggaccc

SEQ ID NO: 40106 - DNA, 312 bp, Oryza sativa
  Clone ID: PAT_MRT4530_43581C.1
atgacggcagggggttccatcgaccagaagctcgagacgtttttgcgggaggtggaggccgccgacgacgagatggaggcgctatgcgacgagctgtcctgcctcctggtctccgcctaccgcctccgcgtgtggctggcacccatggaccgccacgcccccgccctggtctccgccgccaccaccgccggcatgcgcagccgcctcctcggctccgcccgctgccttcgcgcgcggctggcgcccatggaccgctgcgcccccgccccggcctctgccgccaccaccgccggccatgatgtccccgactga

SEQ ID NO: 40107 - DNA, 301 bp, Oryza sativa
  Clone ID: PAT_MRT4530_43582C.1
accatagcaagagacaacaaatatatgtagtagtagtacagtagggaaaaagggcccaaaaagctatacctcaggaaaaatcaagcagacttaccggcgtagatgtgtacccgatgcgatgaggaagatggtgatgaggccgaagtagatgacaggcgtggacgaggacggcgaccccgctggtgtcgcatggtcccagaagcccacgatccgccgtgcagccgcagctggaacacagccccggcgtgaccagcacgaacaagcaccgtcgcgatcaccaccggcccccaatccccatcgc

SEQ ID NO: 40108 - DNA, 349 bp, Oryza sativa
  unsure (1)..(349): unsure at all n locations
  Clone ID: PAT_MRT4530_43583C.1
caagctgtcaactgtgcagcgcgtcgagattagatcaagagatcctaatgtgtctggaggagaaaagccaccgaacaactaatcaacgctgcactgaaatnatatgatgccgttgctttgccttggtgattttctaatacgaagagtagtaattaaatttgatgtgtgcgagtactttattcctcttcgcgttgtaattaaatttnatgattttttttgtcactgggttccttttgtaactccaggagtgcatatgagtgtgtgctgtttttctgtaacgtccgtnattacatcaaaatttgagtaaagttgtttttccctaccgaaaaaaaaaaaaaaaaaaaaaaaa

SEQ ID NO: 40109 - DNA, 274 bp, Oryza sativa
  Clone ID: PAT_MRT4530_43584C.1
agggcctctgctaaggggcactttgtaattgacataaacacctcgagtgtcaatgggcaccacatatataccagaacggtgcacatcgttgccacacataagggcagtatgtagtcagcccacacagaatgacagctaggaaatcgtgaaatgtgctccacatgcgaatgcagagaacaataccctcagggcaatgaacctaaaacggatggaagaaaaatctattatcgtctgctacatcaatatggcagccgccgttactgatgtgtgtaca

SEQ ID NO: 40110 - DNA, 233 bp, Oryza sativa
  unsure (1)..(233): unsure at all n locations
  Clone ID: PAT_MRT4530_43585C.1
gtttttgtttttttttttttatttttttttttttttttttttttttttgttttcaaaacatttcattattcattatttgttttgatcactatctcgttgcatgcaacacaacaacggtgttttcctacttgctattagccaacccattttgggctagtacgggccnncntnnaanatacttcacttccttggctcaacccttcacatttacacaaacttccccccatactccc

SEQ ID NO: 40111 - DNA, 396 bp, Oryza sativa
  Clone ID: PAT_MRT4530_43586C.1
attaattaaaaaaaggaaaatcgtgtctcgtctcgtggcgtcttcgtctcccccgattcccgagcagcttctcgaaaccctcgcggcctcgattccggcgatggcggagcccaacccgcaagtggagagggaggtggaggtggaggaggtgaggacgcccaatcttgtgtactgggagtttgtgcaggaggctgcagcgtaggcgatgtatttgcctatcgggggtgttggcgcttgtcatggaccactccggtgcgttccgtcccggagtttaccccgtcaagttttccgtgaagggtttctggccgctaactttacggtcggttccatggcttatcactctacgttactgcacttcgtcgaccggcaggatggatgacaataatgctagaagct

SEQ ID NO: 40112 - DNA, 297 bp, Oryza sativa
  Clone ID: PAT_MRT4530_43587C.1
atgaagaacacagtcgctctcgtcttggcagtgttgtttctactcatcgctgatctgatgatcgcttctgctcttgggagagatgttctagacctcccggaggacagcaatatcagtaagcgtcacataaaaaggagccattctggatctagcatgaacggacagaagcccggtttctcagaagacaagggctttgttcttctgaaaccgactactcgtcctatttatcttccaccttgcgcttcaacggcctcgctacacccaagcaggggcaccaagagagagaagctttgttaa

SEQ ID NO: 40113 - DNA, 433 bp, Oryza sativa
  Clone ID: PAT_MRT4530_43588C.1
gaaaactgaaaaccaagatgctatcagtgtgtgtcaaataacattagagccacactacctttcttttgagtctaatgttcatcaatcaaatggccgattgatttcaaatttgtctagactactaatattgggcactgataaagcaaacatatacaggttacgcgtttggctgtagacaagcattccaccattattagctgctcttacacattattggtctttcgagaatgaactactcttacttggattattggttttgggcggaagctttgtcatatcggcagccaagaatgtgctggcagtacctacagtagatgtcattcaccgcgtgcagtgcacttatgagatcacggtcctcgttcgggcctaaggatatgttcactacatgatcaaagaggtgggctcggtcggagttgtcttggaactacttgga

SEQ ID NO: 40114 - DNA, 481 bp, Oryza sativa
  unsure (1)..(481): unsure at all n locations
  Clone ID: PAT_MRT4530_43589C.1
cgcgtgggnggccncaggataatgtttttgggntcccccgcgttatgatgaccacggagttgcgtncgcgccccctgtgtggggtccacttttgtgtcgcttttgccgcgcgcgtgcgttttgngagaaggtcacggctgagtcgataattttcgatatattcgagtactcaccgnnttctctgaggttttggggggattcaccntgcctgtttgctgtgacccttggcccttgccgctttgataatacccgttttgtttcgccgtgatgattcgcgtcactgttgtacgcctgtagacacagtcaccacgagagaaaatatgccacggagtacccctgactgaaggccacaactttataagtacccaactgtagaggcctgatgctgtaaccacggggaaatcactgcttgttgatgtaccacgattcccgcctgaagtnttgctttanatttccntgataaaaaaaaaaaaaaaaaaaa

SEQ ID NO: 40115 - DNA, 345 bp, Oryza sativa
  Clone ID: PAT_MRT4530_4358C.1
atggcggcggcgacttggtgcggcaccgacgaggatggggtcggcgtcgagcccggacgcggaccaaggtcgatgacaattgacaagtttgagggaccttcggtgtactttttccgaaagattataggcctaatgggcacagcacggccatggaccgtaccggcatggctcttctggccaggccatgtcaccctggcccagcgtgccagcactgcacagcatggcttgcgttccgggcacggtacgacctcaacgagtgagcagaaggccgaaacgacagtacacaagagccagttggaggaaaaggaactgggcggcggcgtcgccgtggagcgtggtcattga

SEQ ID NO: 40116 - DNA, 885 bp, Oryza sativa
  Clone ID: PAT_MRT4530_43590C.1
atggtgagattaggggagttactgattgatgatatccatagtgtttttggtggcgctacgactcgttcaagacgtggtccgggaagcttgagcggcaactcacccatctggctagcgccggggacggaggtccctgaggaggaggaggacggttgcgacggcgatgccatccgcagccaccacatcaagtccatgcctcaggttgatcgcttcttcgccgcactggagggccctaaactggacaaactccggagagctcatggtgtgtgttgtgtcgcatcagtcatcggaggagctggtgcttctgtcggacaaaacgtggccattcctgctctgttcccggtgtcggcgttcggtatctgcctcggcatgagcagccaggagatcctgtggaagacagtggcgacgtcaacgccgatgagattccttcacatcactaccaaggtgaaccaggtgctctggcgcgtgtgtcgcagttgcgcaggcatggtgcacatgtctggtgtggacctggagtggtcacacagcatggcacatgcgctggcactggacacacggacgtgcgttcctggcctggggttgaccgacgtgcgcatggctggtgtggacccactcctgtcgcagttgcgcaggcatggtgcgcatggctggtgtggacccggagtggtcacaaagcatggcacatgcgctggcactggacacacggacgtggccaagaggggacgttcctggcctggggttgaccgacgtgcgcatggctggtgtggacccggagtggtcacacagcatggcacatgcactggcactgacacacggacgtggctaagaggggacgttcctggcctggggttgaccgacgaggacgtcggtgtcttaagggggtga

SEQ ID NO: 40117 - DNA, 246 bp, Oryza sativa
  Clone ID: PAT_MRT4530_43591C.1
atggccactccaacctcggagaacatctccacagctgcgctgccaaggccagccccctgctctcctcaagcaccagttccatcccctgctttgtcctcagccctaggccggttgaagtttgaacggtgggccgacagttcctacccctgcggctcgctctccggctacctcggtgtcaaaggtggttgtgtctctgctggcgacagcctaggaggtaaaagcctgagaggcccagcaggagactaa

SEQ ID NO: 40118 - DNA, 3691 bp, Oryza sativa
  Clone ID: PAT_MRT4530_43592C.1
atggacctccccgccgtcaccggccgccgcaccacctcctactccctcctctcccagttccccgacgacgccgccgtgctccagcgccagtccagcggcagcagctacggcgccggcagctccctctccgcctccagcgacttccccttccacctcccttccgccgccgcccccgccgccggggcccccgggggctccccctgcaagagctgggcgcagcaggccgaggagacgtaccagctccagctcgccctcgcgctccgcctctgcgccgacgccgcctccgccgccgaccccgccttcctcgaccccggccactctgccaccgccaccgccgggcccttcccgctcccacccccgacgccttctgccgactccctctcgcatcgcttctgggtcaatggctcgttatcgtacagcaataccataccagatggtttttacttgattcatggcatggacccctttgtctggtcactctgcactgatctactcgaggagaaccgcataccttctattgattcactcaagtctgtccgcccagatgattcttccatgcaagccattctcatcgatagaagaaccgatttcgatttaggtatgctggagaattacgcttccagcttcttgtccagttctgccgacatgaaggatgtgataaaccagctagccaagcttgtgtcttccagaatggggggtacaacctccaatgaagagagttttcttccacgctggaaagagtgcagtgatgctatcaagtcaagtacagggtctatcgttctccatctgggaaagttacctatcggtttctgcaaacaccgctctttgctatttaaaatgttagcagataaagtcaatgttccatgcagagtagatcaagggctgtaaatactgcaaaagtgatgatgccacctcctgcctcgtacgctttgggcttgaaagggagtatttggttgatctaattggggatccaggccaattatctgatcctgattcgtttgtcaatggaccctactcactatcagtgccctcacctctccggcctccaaaatttaggtcattggagatcacatcaaatttcagctcggttgccaagcagtatttctcagattgtcactctctcaatctcttatttaacgaagcttccacaggtgctaatagtaatgcggcagttgctatggaccaaccgtattctactagaaagcatgacacaagggatgacattatgagcagctgggtgccagtaaaagcttatatccatataatggcacaacaaagtcaagcagctgtaagctcagatgctattctgccagaggctccccgagaagttttaccgcttattacttcctccaacttgaaagctgagaaaaagaaagagtttaaattaatagaggggaatcagtacttacgaagtacagtcagtgatctctcacttgctgtggatgatctgatcattccatggaacgaattgattttgaaggagaagattggagcaggttcatttggaacagttcatcgtgctgactggaatggatcggatgttgctgtgaagatacttatggagcaggattttcatccagatcgcttcagggagtttatgagagaggttgcaataatgaaaagcctgagacatccaaatattgttcttttcatgggtgctgttactgagcctcccaacctatcaatagttacagaatacttgtcaagaggtagtttgtacaaattattgcacaggagtggtgcgaaggaagttcttgatgaaagacgtcgcttgaacatggcatttgatgtggcaaagggaatgaactatctacataaacgtagccctcctattgttcatcgtgatttgaagtctccaaatcttctagttgacaagaagtataccgtgaaagtatgtgactttggcctttcacgactaaaagccaacacctttttgtcctccaagtctttggcaggaactcccgaatggatggcacctgaagtgctccgagatgaaccatccaatgagaaatctgatgtctacagttttggtgtaatcctatgggaacttatgacaatgcaacaaccatggtgtaatctgaatcctgcccaggtagtcgctgctgtaggctttaaaggcaggagacttgatatcccaaaagatttaaatcctcaagtggctgcattaattgagtcgtgctgggcaaaaattattctgtccggttaccggttgctggccaaactaagttctgttcagaatggcttgtttgtggtgactgagatgagagtgagagcgaggagtgggaggcgttggagctcttgggtcctcctcgactacgtcgccttcatctccaactccaaccaccacggcaacgccaccaccgccaggtccaagactaggaccggccagcccatcgaggtatccttctggacggcgcctccgccgcgcgtctcctacatgtgcgtccactgtcctagattggatccctacaagttcgccacagagcccaccatcatggccacggaggccgacctcgtcctcatccgcgtcaccattggccctcgcggcaactgctttaataccaaatgcagcgacttgttcatcttcttcgaccgcgaggttggcctcctccgctgtggctcggtcaggcgtcgccatgatcccacaagattgggcctgcacgcccataccggccctgacgacggtacctacatcgtcgccgtgctctgtaacacctttcaatcagggaacctggagtatgccctctacctttaccgcgccggcgcagatgcttggacctgccatccactctcccttcatggtttggtcgatccaacatcatttatccatgtcaataccaacaccatcacggttggaggggaagctggcaccatggcctgggtcgacctcaaccgtggtattctcttctgcgaccttcttccctgcccatacacccctctgctcctccgctacttcccgctaccgccaccactcagactcagtgcacacaccaagctgacaggatgtccaaggtttagccacgacattgctcttgtccaaggtcgattcaacttcacccagatgcgaattcatgtcaagccaggctccatcaccaacggcacatacatctctcagggttggactcttgccacttggagtgcaccagccaccaatccttggaagcaagggtggcgccaggattgcaacctctctgcttccgatctctctgttgatgccaacaccatgaattttcagttactgcctaagctctcggatcaccaacagggcacacctcagcaaaccttggagagacttcacgtgggccatccaacgctcagcttgcaatccaatgacattgtttgcctcatggccaaggtcgaccaatgggacgaccatgcttgggtgcttgctgtcgacatgaagaacaggaggctaaaagatgtggctcagtttggcgctgaaagaactcttggcattagcttggtctacatcagcagtatgatatcagaatatcttcgtacggctccaggtataaagggtaacctaaaacgacaaggggttgtgttcaccgtaccctctcacaagaagcagacccgtatggttcatctgtctactccctcttggaaaggtggagatcaacagaattctggaacaagtatggatgatggagaggataacatggacttggacttggacatgttttttggatga

SEQ ID NO: 40119 - DNA, 347 bp, Oryza sativa
  Clone ID: PAT_MRT4530_43593C.1
attgacgtaaaacacgaggcctgggagatctgcttaactccagggcaggtccaaaactcgccttcgggtatgctagtgtgccagttgatttgatcttgtaatcaacaagaaacaaagacaaagaaaccgcggttaaacccatcaacgatagcagattggctaagactctatccacgtgcggcaatcatcatgaagctcatcaacttaaaccgacaacgtttgctatgtcatattgtcggattcagctcaatcggctaaccttgtccgactcgaactctgccgatcttagccgtagccgattcgaacttcagccgatcttactctgttccccgatcgatttccatctc

SEQ ID NO: 40120 - DNA, 692 bp, Oryza sativa
  Clone ID: PAT_MRT4530_43594C.1
acgacgacgacgacgacgacgccgccatccgatcgcctcgcgccgcgagcgaaaaggaaaggggaaggaagaaattggcctcgagtcgcgatgctctcgcctctctgcctgcgtgtgccgtgccgctatgcgtgtccttatcgcgcgaggagatcgcgctcgtcgacgaagccgtctccgctaatttccaccacgctcgctgccatgcgggcccccacaccgcaacagctatttctgccccgcctcgagtggatattgtccaaagagcccgcagtgcaactgacatgtggggcctgttgcttacgcgaaccgtagtagtactagttttgaacataccgagtgagtgcgagcgcgggcttgtgtctggtcgtagagaatacggagccgatgtgtggcggtgcccggcgactgggtgccggctgccgggagttaccgacaatgacgtaggcgacggggacgggtctgaaattcagaatggattttttggtcggagacgtgtagggcaaaagcaaaggggaaggctagtccgcgaccgtgcccaagattttcatctcgtgaacgcgataccgcagcagctggagcccagggtcagcagcgggtggtgggccggtgttagttgcgagggcaaagcaatgttaatgtgtcggcctcccgtcatcctcgcattgcagcacccgctccaacgactatag

SEQ ID NO: 40121 - DNA, 252 bp, Oryza sativa
  Clone ID: PAT_MRT4530_43595C.1
gctgaagcaccacccacccattcggccggccaggaggttaccggattggattgtaaaggccttctccggtgtcgcggttattcctctctaccgggcgrrttcgagtggctgcaattaacttgcaggcattggtcctctgcgtgaataaaagttgctcctgctaggtcgtttattcgttcgttttggaccattttgtattcgtctcttgatggtatgatgtcgcttgcacactgataaraaattgtggctttg

SEQ ID NO: 40122 - DNA, 665 bp, Oryza sativa
  unsure (1)..(665): unsure at all n locations
  Clone ID: PAT_MRT4530_43596C.1
ctggattactcacaatcataatagttagtttttatatttggaggaagaaaagattgccgaccaaaacaccactcatcggtaagacactacagcatgatataacactattcttatctgttttggaagaaaaacattaacagaaagaatgtgaagccacacaaaatggaatagtgctaataaaatatatttttacggctattccacttcaatggtgcagaaaatacagaggacctcgaagattttgaatctatctttattgatctttcaacattgcaatcagcaacatccaactttgatgaaagcaataggcttggtgaaggaggatttggtgttgtttttaagggtgtcttccctgatggacaagaagtagcagtaaagaggctttccaattgctccaatcaaggactaggacaattgaagaatgaactgtctttggtagccaagttgcagcataagaatcttgttaggcttattggtgtctgcttggaagaaggagagaaggtgcttgtttatgagtacatgcccaacaagagcttggatactgttcttttcgatccagagaaaagcaaacaacttgactggngaaagcgatacaatattctatatggaatngctcgaggcctacaatatttgcatgaacattctcaatgaagataatccatagg

SEQ ID NO: 40123 - DNA, 1143 bp, Oryza sativa
  Clone ID: PAT_MRT4530_43597C.1
gtcttctccgtagcgctcctcgctgaagttacgaaaacgtagagattcatattccacctcactgggcaacattgcttccactccatatactaggaaaaacggtgattggcccgtagcccaactgggagtggtgcgcaaggaccaaaatatagacggcagctgtcctacccacttgccggcatagggatgcagtctgtcgaaaactcgtgcttttattccttggagtaccatgccattggcgcgtttgacttgtccattgctcataggatgcgctacggaggcataacaaattttgatgccgaagtcctcagagaaatctttaaataccccacccgtgaattgagtaccgttatccgtaatgatcctgttgggtaccccaaaccggtgcataatgttgatgaagaaatctctaaccttgtctgccgtgattgtgatgaccggtttggcttcaatccacttggaaaatttgttaacagccacaaagaggtgagtataaccaccgactgcctttttaaatgggccgaccatgtcgagcccccaaaccgcaaacggccaagacaattggatggtttgcaactcctgagctggtagatgagtttgtcgggcaaaaaattgacaaccctcacatgttcgcacaattttgtcagtgttggacacggctgtgggccagaaaaaaccttgccggtaagccttacgaaccaaggatggttcgtgcggcagtgtgattgccacagatgcctgaatgtatatctcttagcaattgtcttccctcctccaaagaaacgcagcgttgcaggactcccgatggactcttcttgtccagttcagtctcatgaatgacataaagtctgctgcacctggagatccgctcgacttcatctttatcttgagggagttcttggtcttgagtgtccgtggcctcgattgtttctttccttggtacggttggctcatagagatgttcaataaacacgtggaaggagctgcttctcgttttgaaccaaaattagccaatctgtcggctgcctcattgttgtgtcgaagaacatgggtgagcacaagtccatcgaatttgtcctctaacttacgtacctcctgtcagtaagcggtcatgttatcatcaaggcaggaccactccttcat

SEQ ID NO: 40124 - DNA, 716 bp, Oryza sativa
  unsure (1)..(716): unsure at all n locations
  Clone ID: PAT_MRT4530_43598C.1
agcaacttaacatcgtattatactccatgcatcgctagctgcacacacactcagacttatagctaattaatagtgttatctcaagaacagtagctaaaagaagacaagagcacagtgccacagtactgcaagaatgctaagccacacctgacatgcagagacgaacacaacaaccgccgaatcaagcgctcccaactactggccggcgccttgcctctcgtcgctgccggcgatgccggacttcaagaacggcgcgccgccgagcgcgccgagcccggacatatgcccgccgccggccatcgacgtcgagtacccgaactcgtagccgccgttgccgccgagcctcgcgatgggctccccttcgtagctcctcgacagcatgtggacggccgagaactgctgctcttgcccgaagcacgccgccgcgccaccgacggaggcgagcgccgccgagtgcccgacgttgatgaagctctgcgcgccgttcggcaccgcgttgccgatgaactccgccatcgagtgcggcccgttattcgtccccgtcgacgcggaagccgccgccgccgcagccgccgnctgctggtacttggagagctcgaacttggcgcgggcgaggtcctgctggagctggcggaggttgcgctggaggatggagatgatggcgacgcagccgtagacggtgtcgcggaggcgcatgtcggcctcgtaggcgagcg

SEQ ID NO: 40125 - DNA, 489 bp, Oryza sativa
  Clone ID: PAT_MRT4530_43599C.1
atggatggggatcgacgcaggcggcggtggcggaggatgtgctcaccaggatggatgcggcggaagcagcaggacgaacgattgcggccttcttcgctcgcgggatggatggggatcggcggaggcacagggggcgggggcgggggcgggggcggcggtgggcaagggcaaactgacgaggggtcagggcttacatcgatgagcgtctaccactgcttcctctgcctcgagcccctagcttcttctattcttacattctcctttcttcctagctcctgctcggatggcattatggtagtttctcaattggcggttgttcgccagtcgtcggtcatcatcgtgccgcatggaccatgccatgtcgtgctattcctgggccatgtcgtgctgtctcactacatgcatttgtcatgtaggcatgtcgagccagatagcaatccaagcatggtagacggctctcgtctgacgttccccttcggctacctctag

SEQ ID NO: 40126 - DNA, 985 bp, Oryza sativa
  Clone ID: PAT_MRT4530_4359C.1
ccgtcgcgccattgttgacgccttgccgccgctcccacctcttgtcttcgtctcttcgcccgtcgcacgcgtcggaggccggtgcatgcgtgaatgcgagacgaggactccgggcgccctcgatctccttccttttccccggccgtggaaatcctccgccgtcaaactccttccggcgaattagagccttcggattgattcctctcgtatccctcttcacaccagtgtgctccctttggccgaagacgtctcgtcgaggtcgagctccggtgaactccgccgcctcccgccgtccgttccccggccagcctccttcgttctcctctcgccagtccacgtagctgccacataggtgccacgtcggcgccacattggtcgcaaccgggtcagcaagattggtcagcgccccctccgtcccttttctttggtgcacgcggtccacaagagccgtgcggctctcctcggtgaacctggccaccgacaggtgggccccatcctgggaccccgcgtcgtggaccgaggtccactggcttcctgccgcgcgtcttgtccgtttgggccgcgcctcgctcggccgtgggccgtcactcccgcgcgccgacccactcgcctcgaccgcgcacgcaaattccttgggctgcgcctcacgcttggccggattttcgtcaatcgtggatttctcgaagattcgtgaagcttcgtgaagaccttgagcaaggcaagtcaccctttgaccaattgcccaggggtacataatgttataggggctcatgggcccctgatgggccatctggtgatcgccggccctgtaggccttaggcttgatgggccggaaaggcttcctcggccctcgtgggggcgaacttgctatggcgaagtcgtcttccttcggcagatagtcttcgccttgcacccttcgcctgagacgcctctggcctggcaaggcactcgtacgactcttcgcctcacgccgttcttgctccat

SEQ ID NO: 40127 - DNA, 376 bp, Oryza sativa
  Clone ID: PAT_MRT4530_435C.1
ttgtggttttttaggcacaggggtctacactttttttttttttttttttttttttttatttttttttttttacaacatttagtaactgacggagccatctcaatgacagacaaaccgaacaccacacggggggggcacggacaccaaccatgacaacacccaaaccgaacaaaggcggagggaaaaaaacgaaggaaaccacacgacaaggaccaaggcccccacaccggagcggagcaaccgacacagacacccactacggacccacagaaaaaaaaaacgcccgagccgcctaccatgcccgggacggaaccccaaccaacggcaaaacaaaagccgacctttgagcccaaaagccctgggcaaccaaaagaga

SEQ ID NO: 40128 - DNA, 222 bp, Oryza sativa
  Clone ID: PAT_MRT4530_43600C.1
atggtgttctcggcgggcagcaccgcgttggccgagcggcgacgcaaggcggcgaggaagggaacaccaacgacggaggaggccgcggcgttgggcgagcgttcttggcctgagaaacgtcaaggggagctcggggtggcgggctcgcggtttcgtgggcgatgcgaaagcggcgacggcgtgaatgctttgtgtaacactccgcttttcgtgagtcgttaa

SEQ ID NO: 40129 - DNA, 165 bp, Oryza sativa
  Clone ID: PAT_MRT4530_43601C.1
atggcggctgcgcgtggcgagttcgtggggatggcggttcggtggtggaacgtgaacccaggggcgacggacgcgagcatggagacggcgccgaacgagctcggggtggggatggcaacggcagagcttggggatggtagtgacgacggcgccggacaagcttag

SEQ ID NO: 40130 - DNA, 688 bp, Oryza sativa
  Clone ID: PAT_MRT4530_43602C.1
gtattctgggttgtccaagaaggatattaagacgcgctgcccagtttgccgtggttcatgtggttgtaaacaatgcacccttggtcagactaagggtgccattagtaaggaatcatcaggtgatcaagacaagctgataagtataaagatttgcaatcatcaattgtacaagcttttacctgtagaactgaaccaggagcagcttgatgaattagaaatagaagctaaaatacaagaaacaaaaatatcagatgtccgagtccaggtagctgatgagcaaagcggatcactcgactgggtccatccttcaaggcgaccacagaaactcgcggctgaggcggtgacgacggcatcgctgccgtcgcgggcgctggcccaatatgatgctcaggaccacggccatggaccttggtcggttttctgtgtcctcgtcgttcgcatcatgggacagcaggtcgcgaaatcgccgaaaacgtggcaccgtgggttggggttggtagaagttgatcgaacgggtcgtgggatgggctgggaaaccgcagcccaagaagggaagatgcgcggccaacgaactgcaatgcatcgcatgtccctcccttctgtgggccgcagcggcttcaccgacggacgccgtctgcaaggcgatatatgggccgccggcagccaccgtgggcccgtgccggggtag

SEQ ID NO: 40131 - DNA, 444 bp, Oryza sativa
  Clone ID: PAT_MRT4530_43603C.1
gccgtcgcctcacgatccttcaccagtcgtcgccacgacgagatcgttcctccctcctattcagccgccacatctcccagcgaggagctcgggaccaccaggtccggcgaccccgtcctccttacaggcggatccagaaacccggatgaggatgacagccgttaccacccttttctcctctttcatcttcacatgttagaggatccctctccatcttcctcagctcgctggcatgggagtcgcacatgataaggggtttcacgggagccggcagcgaccactgcttctgtgagaggaccgaaggtgaggttggggctttctccccctcctattgtgcatgcatattgatgcgattggacccattgtttggccatatcttcctttactcacacattctgcttttgtcggtatccaattccatctcttgataaaaaaaaaaaaaaa

SEQ ID NO: 40132 - DNA, 279 bp, Oryza sativa
  Clone ID: PAT_MRT4530_43604C.1
atcggagactgatgacaaaagatcaggctgagatggtttttagggggccgacccgtttctcacatcgcgatgttggccgatctgtcgaagcaggtggcctctggagctcaatacgcgattcgataaattcgttaccgggacctgcccagtggatctcgtcctctaggagtggcacaggagctccctgagacgaggactaggcggtgtggagagggcatagggggcggggctgtaccacgtcaagcacgtcaagagcggctactatgcttacgttactac

SEQ ID NO: 40133 - DNA, 972 bp, Oryza sativa
  Clone ID: PAT_MRT4530_43605C.1
atgagttggggcatctcctccctctatctctttctcgtcacggcggcggtggcggcggcgaccgcgaccggcgagggcgacgagtcagggtgggctcggggtggggcggcggcacgcgacggtggccaatcgagaccacgcgagcgaggcgcggcggcggcggcggcggcggcggcggcgacggcgactggcaagggcggcgcgtcgtggtggggcggtggcgcactatggcggccagccgagaccacgcgagtgaggcggtgcgcgacggcagccgacgagccggggcggggctgcagtgctcgagacgacacaagcgacggcgacgaggtagtggagccggtggtggtcgccgacgacctattcctccactggaggagtgcagatgatcaactcctccacgcaccgcgtgaaagactgaaagctgtggcttggataccgctagtgctgttgagtgatctcggcgttgccgagctgccattgggggaaaactggaacaggccgcaacgcatcgacatcacggcgctttttggggggagggcatcaacaggtgtaggcgtcggtaaaagcctttgcgttgcacgagtagcaagtgttgagattcctgggggctactctgcaaatgggcgtataattgagccgggactagaggatcagcacagcagccgcgtcagcatcctgcatctctcgatgagcggcaggaaggatgggaacccagcaacaactgaactgatggctctgcgacgggacgacgtcatggggacacacacactggtcgtgactccaacgcagcatcaagaggcgttcaaaaccaacagggccattcaagcagcaggtagccatcaaccccgtaggggacggaccaccctccccaactgcgaccattacaatacgtacctgtgcccccctgcctttgaatctaacagtggatgcgtatgggtgctcttcttctctccggctgcatctcggtaa

SEQ ID NO: 40134 - DNA, 742 bp, Oryza sativa
  unsure (1)..(742): unsure at all n locations
  Clone ID: PAT_MRT4530_43606C.1
actcggccacgcccagcgacccaagtcaacagaaacgcaaccaaccattatcttttcctgaaaaacctcccctcacaatcctcgcccgatcgaaaaggatcgtgatcccagatcgctgccgtgtcaatgctgcgccgccccggcccgagcaccgccgcctcgtccctgccctgaccccgccgcatcctccagttctgccgtcgacgctgcgccgcctcgacccgcatgtcgccgctttatcctctcccgtgctgcgccgacggctgaccggcacgccgccgcctcattgccccgatcgcgatggcccctgaatcccctgaccctgttgcctggaccgccacatcgtgctccatctcgtccgctgctgttctcagctgatctggttgatccctagtgacttagttattagttattgatcatgccccaagtttctcgatggaattgcaatgtaagctaagtgattagtgaatcttgtggctatttttctgctctggtatgtggtaatgacatgaaccatgccttttttattaactttatcattatacagtgcagagtaaccataaaaagatataaagttcatagctcagattgccgacttttttaaattagtttaagttatgttttgccaattactacctgctaccagatacataaatttaacatgtggacangttgttgttgctgttctatcatctaaaagatgagtgtattcatgccacagaaatattctgctttttcttat

SEQ ID NO: 40135 - DNA, 706 bp, Oryza sativa
  Clone ID: PAT_MRT4530_43607C.1
gcggacgcgtgggcacgcgcgtggggagaatttctgaagaagcacaggtgagagaggcagagcgatgagaggaagccagagccacgagctggagaccgacgtcccggcgtccgagctgtggaagatctacggcacgctccgcgccgccgagctgctgcccgagctgctcccccacatcctcgccaaggtcgagctcgtcaccggcgacggcggcgtcggcaccatcgtgcgactgacttttcctccaggaattcctggattgcagagctacaaggagaaattcatcaaagttgacaacaagaattacgttaaggaggcagaggcggtggaaggcgacatcctgaagctgggcttcctctcgtacatgatccggttcgagatcattcggaaaggggccaacacttcggttataagatcgactatcgagtatgagatcggtgatgagcatccagagctccaagccatggttagtaccgcatcattggctgcgaccgctgaaaaatttgcagagtatatcaagacgcagaaagtagctcaggccaacacctgagattatctcaagctaacaaatgtatcgagagtaataaatggacgcacagtttcgttgtcgcgcttgcttgtaaaaccatcgtgtgatactgcgcagtacgtgtgttaatcattattccttttttatataattaaagttttattaagactctgtctt

SEQ ID NO: 40136 - DNA, 969 bp, Oryza sativa
  Clone ID: PAT_MRT4530_43608C.1
atggcgaagcagtggttctacgcgaaccgggcgacagtcaacacatgggacaagtgctccactgcgttcctctcaaagttcttcccgatgggcaagaccaacgcccttcgtggaaggatctcaagctttcagcagacaagggatgaatcaattcctgaagcatgggaacgtccgcaggaatacgtggctgtctgtcctcatcatgggatggatgactgcctcatcctgcagagtttctataatggactcacttcctcgtccagggatcacttggacgctgctgctgtaggagccttcttttcaaagacggtccgtgcggccgtcaatcttactgagaagatggtgtcgaacatgggttggagcgaagaacgactccagacccgacagtgtggcatgcataccgtcaaggagacggaaatgctggccgcaaagctagatctcctaatgaagaggatcgacgatcaggagaaggccaaaccgctggtcgctttcaaagcgctggactcgcacctcacctgcgaggtatgcgggaacacaggtcactcggggaatgactgccccgagacccgtgaagaagccatgttcatggggaacaatggctatcggccgcaaggaggccaggggtggaaccagccccggccatactatcaaggaggcaacaacggcaacaacaataataacggtaacttcaatcagccctccttgaaggacttagtctttgcgcaagctaaaactacggatgctataaacaaaaagactgccttaaatgataaagtcctagagaacataaatgttaagctagaagtcttcgcttctgctttccaaaaccagctgagttttaacaaaatgataaagactcagttggcgcagcttgctgctctggggttttatttggctttggcatctcttgctcactatgtttggtggtctcactcaagtgtttctcactctctcgctgttgtctcttaa

SEQ ID NO: 40137 - DNA, 876 bp, Oryza sativa
  Clone ID: PAT_MRT4530_43609C.1
atgagttggggcatctcctccctctatctctttctcgtcacggcggcggtggcggcggcgaccgcgaccggcgagggcgacgagtcagggtgggctcggggtggggcggcggcacgcgacggtggccaatcgagaccacgcgagcgaggcgcggcggcggcggcggcggcggcggcggcgacggcgactggcaagggcggcgcgtcgtggtggggcggtggcgcactatggcggccagccgagaccacgcgagtgaggcggtgcgcgacggcagccgacgagccggggcggggctgcagtgctcgagacgacacaagcgacggcgacgaggtagtggagccggtggtggtcgccgacgacctattcctccactggagggtgggagggagagaggaagaagatgaactaggggcatttttgtccgggatgaggttactgcggtatttatattaccgtacctcgcggttagcggcgagtgcagatgatcaactcctccacgcaccgcgtgaaagactgaaagctgtggcttggataccgctagtgctgttgagtgatctcggcgttgccgagctgccattgggggaaaactggaacaggccgcaacgcatcgacatcacggcgctttttggggggagggcatcaacaggtgtaggcgtcggtaaaagcctttgcgttgcacgagtagcaagtgttgagattcctgggggctactctgcaaatgggcgtataattgagccgggactagaggcaaagcatatcattatgggaggaaaaggggaacttcacagctcaaagcaaagagaacagaaaaaccgtgtcagcgctcagcaccggtgcaccactagtgcagccagcaaatacagtcgaaagatttag

SEQ ID NO: 40138 - DNA, 132 bp, Oryza sativa
  Clone ID: PAT_MRT4530_4360C.1
ggggggaggaaaccccaacaaatcctatgctccggcgggcgcaagataggcctccccttccaaagaaaccaggcttctgatgttggttcgcgtggcttttcctcctaaccccatcctttcttgggggggggg

SEQ ID NO: 40139 - DNA, 1329 bp, Oryza sativa
  Clone ID: PAT_MRT4530_43610C.1
atggctaaccctcctatcaagtgcttgctccctcctgcaatcgtgtcactagttctgctgatctcatgcatggtggcaaccggtgagcagcaagcaccgtacaaacccctcgtcgtcccgctcgtcagggacagcgacacatccttctacaccatccccatcaagaacggcgcgccgctcgtcgtcgacctcgccggcacgctcgtctggtcgacgtgcccgtcgacgcacaccacggtgtcgtgcctgtccggcacgtgcggcgcagccaaccagcagcagccgcgtcgctgccggtacgtcgatggcggctggttctggtcaggccgcgaggcggggtcgcgctgcgcctgcaccgcccacccgttcaacccggtcaccggcgagtgctccaccggcgatctgacgacattcgccatgtcggctaactccaccgtcaacggcaccagaacgctgcacccggaggagttcgccgccgtcggctcgtgcgcgccgcagcgcctgctggcgtcgctccccgcgggtgccaccggcgtcgcggggttctcccggcggccgctctcgctgccgtcgcagctcgccgcgcagcgcaacttcggcaacaagttcgccctgtgcatgtcccagttcgcgacgttcggcgacgcgccggtgtacctggggatggagggccgaggcttcgtcgactacagggagatcctcccgtacaccccgctcctgacgaatccaagaatccccggctactacctccccgtcaaaggcatctccgtgtcatggagcgttcccgagacgccggcgtcgctgcccgccggcgcgctcgacctggacgcccgcactggccgcggcggcgtggtgctgagcacgacgacgccgtacacggtcatgcggcccgacgtgttccgcgcgttcgcggaggcgttcgacaccgccataatcaggaggagcaagtacacgtactccaacgtgacgcgccacccgcccgtgggacccttcaagctgtgctacaacggcgcgttcccgatgctgaagcggccggcgagcatggacattccgacgatccacctggagctggacggcgccacgggcacctggtcgtggttcaacgacaactacctggtgtttgcgccgggggcggcgttgtgcgtcggggttctcgagatgggtcccggcggcatgccggtggacggcgagccggcgatggtggtcggcgtgaagcagctggattggaacctgctggtgttcgatctggacaaaatgctgatgtggttcagtggggatctggcctttcgcttggcgggttgttcatattcttctcaaatcgggttataa

SEQ ID NO: 40140 - DNA, 1344 bp, Oryza sativa
  Clone ID: PAT_MRT4530_43611C.1
gcagatttctttctttctttcattcctttcctcctgcgagtgcgagtgcgatccggggcaaggcaaatccgattccgagcagagaggcatctggcgtcgagttcgtcgatcgatcgctgcagagaagcaggcagagatcgagtgagatgtgggtggagattctgtgcgggctgttggcgtacaagatcatccgccgcgtcttcttcgccgactccgacgaccccgcgcacctcgccgacctcgattccgcccactccgacctctgcttcgccctcgcctccaggctcgagaagctctactccgcccgctgcttcgtcggcctccgcatccccgaccccgacgccggcgagcgccagcatgtcgacctcgtcctccttaccaacagggaggtcatggtagtggctatcgagaacatttctggttttgttgaggtcgataaggatggcaactggacttgccccagtgataagaagaacaagcatggtgttatcccaaacccggtactgcaagtcaatagactggctgccaatcttcaatcgtacttggagaagaggggagcaaaactgcctgatggtcatataactggaaagattgtactgccaaatcccaactgcaggccttcctatgccatcactcttcaaccagaagttatcttgtacgatcaatggaaagatcttaaagcagattccaaaggtggactttcaacatggattaaaggtgcattcagtggaagcaaaggtgacatgcaagattcgttactccaaaatctacatttcattctcagcacgtcgcctatgtgggacaggttggaactcaaaggggacaggaatattcttggtgaattcattgaattcaaaggcaggcacgatgatattcaggccttgaaatgtctgaagagatcaaaagtttgccgattcatagtccagaaatcaactctgtttggaggttttggtaacttttctgcactgtaccttcttgttattctgtttgcgaagcactcctgtgaacgtcggtcaagagtgcaaatattgtattcaccacgagattatcgtgctgaaggaacttcatcctctgaatggaaagagatatcagtgaaacaatatacagaaattctttttcagccattgcactcgaaaaaagttaagaagttcaagctgtcaagtgttgcttctgtgacactgagtgcctagtgagttgaaattttatccacggggtacttcctgttgcagtagtatatagagtaccttcctggcttctgtatgtgctcctcagttaaagtttgtcttgttgtttctgtacaccaacctgtacttactttaagatgtcagttagcatgaatttagg

SEQ ID NO: 40141 - DNA, 2068 bp, Oryza sativa
  Clone ID: PAT_MRT4530_43612C.1
cccacgcgtccgcccacgcgtccgaataaactgcggattctttctttctcttccattcttacgtttccatattaaagtgtagttttcttacttaaatttaataatattaatctaatatgcccattggtgttccaaaagtaccttaccggattcccggagatgaagaagcgacttgggttgacttatacaatgttatgtatcgagaaaggacactttttttaggtcaagagattcgttgcgaggtcacgaatcatattacaggtctcatggtatatctcagtatagaagatggaattagcgatatttttttgtttataaactcccccggcgggtggttaatctcaggaatggcgatttttgatacgatgcaaacggtgacaccagatatatatacaatatgcctcggaatagccgcgtccatggcgtccttcattctgcttggaggagaacccaccaagcgtatagcattcccccacgcgaggattatgcttcaccaacctgctagtgcttattatcgggcaagaacaccagaatttttactagaagtggaagagttacacaaagttcgcgaaatgatcacaagggtttatgcactaagaacaggcaagcctttttgggttgtatccgaagacatggaaagggatgtttttatgtcagcagacgaagccaaagcttatggacttgtcgatattgtaggggatgaaatgcttgacgagcactgcgatactgatccagtgtggtttccagaaatgtttaaggattggtagtggccagatttcttgtaaatttatttcaaccctaaattcgggttttatgcaatttaatggaaatacttcataatgatcaatcattcaggttaagatcgatctaaaccaatccattttttctatatacatacgacatgccaacggttaaacaacttattagaaacgcaagacagccaatacgaaatgctagaaaatcggccgcgcttaagggatgtcctcagcgtcgaggaacatgtgctagggtgtatactatcaaccccaaaaaacccaactctgccttacgtaaagttgccagagtacgattaacctctggatttgaaatcactgcttatatacctggtattggccataatttacaagaacattctgtagtattagtaagaggaggaagggttaaggatttacccggtgtgagatatcgcattattcgaggagccctagatgctgtcgcagtaaagaatcgtcaacaagggcgttctaaatatggggtcaaaaagccaaaaaaataagtgattcgtttttagcccttataaaaagaaaacggattcttgaacctctttcacgctcatgtcacgtcgaggtactgcagaaaaaagaactgcaaaatccgatccaatttttcgtaatcgattagttaacatggtggttaaccgtattatgaaagacggaaaaaaatcattggcttatcaaattctctatcgagccgtgaaaaagattcaacaaaagacagaaacaaatccactattggttttacgtcaagcaatacgtagagtaactcccaatataggagtaaaaacaagacgtaataaaaaaggatcgacgcggaaagttccgattgaaataggatctaaacaaggaagagcacttgccattcgttggttattagaagcatcccaaaagcgtccgggtcgaaatatggctttcaaattaagttccgaattagtagatgctgccaaagggggtgggggtgccatacgcaaaaaggaagcgactcatagaatggcagaggcaaatagagctcttgcacattttcgttaatccatgaacagaatctaggtatgtagacacatggatccatacatctcgatcggaaaagaatcaatagaaggagaatcggacgatatctttctcgaaacaaacaaaaaggaaaagaaagagaaaacagaaatcatgatcaactaagccctctcgggggcttgcttaagaataagaaagaggaatcttatggaaatagcatggaataaggtttgatcctattcatggggattccgtaaatatcccattccaaaaaaaaaaaaaaa

SEQ ID NO: 40142 - DNA, 378 bp, Oryza sativa
  unsure (1)..(378): unsure at all n locations
  Clone ID: PAT_MRT4530_43613C.1
tctgtatggaagctggcacgaggcatggcccacgggggggttttaagtcgtcgtcctcatgctcaaggcaggttgtagtagaacgcagggagcgtcgagaagggaaatgggagaggaagcattcttgagcaggttgtggtcaaattggctgccagtacgaacgaactgtatcgattatctcctggttgccctgtactgtacttttctctattatgtatgtgtacgcagagcggctaatgaaaatggctgtttcgatcggtggcttcggtgttctttttcatcgctcgttttcttcacggatatttgtcgaactgataaacggtgtcttttttttatataaaacagagtttttgcttcaaaanaaaggtaattttaaaa

SEQ ID NO: 40143 - DNA, 147 bp, Oryza sativa
  Clone ID: PAT_MRT4530_43614C.1
agcaggcacgcgtgcaggtgccgggatgctatacagcggtcgacctacgcgttcgttcacgcgttcgcgcacgcgtacggtctgatatatcattggtgggtcgcatggttttgttcttaaacgttgcactaatggttgtcatggtgg

SEQ ID NO: 40144 - DNA, 370 bp, Oryza sativa
  Clone ID: PAT_MRT4530_43615C.1
aaagagaatcttaaattgtttgaggaagtatatataaagtcataaatgttttccagcatcaagtacacaaagcctgtgatataaacatcacattgtaaaccacaaaacaaatatgtatgctttgttcaggaatgtagtgttctgaaacaaatggctgaatttgtgttctgaaatgtagtggcatgcgtcaaatgtaatggcattattagcccatttgttgaatgaaacgatatggcctttgtgttgaataaggaaactctatatgttgtgctctcaaactgtgccagtgcctacagtagtgcagtatgtattgcaaaactcctatcaagccatcttacagtagcgtaatacaaaattaaattgatcaaca

SEQ ID NO: 40145 - DNA, 2680 bp, Oryza sativa
  Clone ID: PAT_MRT4530_43616C.1
gttagcatatgtgggagcacagcttgtgttgctcagacagcttggatccaaaatggaaccattcaagagaacattttatttggacaaccaatgcattcagagaggtacagggaagtcatacatgcttgttgcttagagaaagatttagaaatgatggagtttggagacaagactgaaataggagagagggggatcaacctcagtggtggccagaaacaacgcatccagcttgctagggcagtttatcaagattgtgatatatatctgcttgatgatatctttagtgcagttgatgctcatactggttcagctatcttcaaggaatgtctgaaaggtatactcaagaagaagacagttttgcttgtgactcaccaagtggatttcttaaagaatgtggatacagtattcgtaatgaaagatggggtagtcattcagtctgggagctacaaccagctactaacatcatgctcagatttttcagttcttgttactgctcaccatagttcaatggaggttccaggggcagcagagcaaatgtcccatgatcagaccactgagtattctcaggacaccaccgtaccagcaaaatctcctgtcaagtccaattctagtaatgaaaatggaggtaccagtgttgcaccaagcaaagaagcaggttcatctaaactgatcgaggaagaggaaaaggagagtggccgagtaagttggcaagtgtacaagctatacataacagaagcttggggttggtggggagttctggtcattttagctgtatcagttctgtcggaaggctccagtatggctagtaactactggctctcatatgaaacatctgggggcacaatatttgacacttctgtttttcttggtgtttacgtttcgatagttgctgcttcaattgtatgtgatgcgatcagtactcttttcgtgacattcttggggtttaagtcagcccaggtcttctttaacaagatgtttgacagcattctacgggcaccaatgtcattttttgacaccactccttctgggagaatactaagccgggcatcagcagaccaaatgaaaattgacactgcccttgtattctatgttggttttgctacatcaatgtgcatttccgtgaatcgttacatcgcaacatctcgagagttaactcgtcttcaaggagtaacaagggcacctgttattgatcacttctcagaaacctttttgggtgctccaactgtaaggtgctttgggaaggaggatgagttttaccaaataaacttggacagaatcaattcgaatttgcgcatgtcttttcataattatggagctaatgagtggctgggttttcgcctggagttgattggcacacttctactgtctataactgcttttcttatgatcagcttgcctagcaatttcatcaagaaagagtttgtcggcatgtccctttcgtatggtctatctctcaattcactggtgtactatacaatttcaatgacctgtatgatagaaaatgacatggtcgctgtggaaagggtgaatcagtacagtactcttccttctgaggcagcatgggaagtggcagattgtcttccctcaccaaattggcctagaagaggagatattgacgttaaagatctaaaggttaggtatcgatcaaacacacctctaatcttgaagggcattactattagcattaacagcggagaaaagataggagttgtgggaaggactggcagcggaaagtcaactttagttcaggctttgttcaggcttgtggagcctgtagaagggcatatcatcgttgatggagtagatattggcactttgggccttcatgatctcaggtcgcgctttggtgtgattcctcaagagcctgtgctctttgaaggaaccataagaagcaacatcgacccaattgggcgatattctgaggacgagatatggcaggcccttgagcgttgtcaactaaaagatatagtagctacaaaaccagagaaacttgatgcactagttgccgacatgggggagaactggagcgtaggacagaagcagctcctctgctttggtcgtgttattctgaagcgcagccggatcctgttcatggatgaggcaacagcttccgttgattctcagacagatgcgactatccagaggatcatccgagaagagttcactgattgcactatcatcagcattgcgcaccgcataccgactgtcatggacagtgatagagtcctagtgttggatgcagggttagtgaaggaatttgatgagccgtccaagttgatggggaggccatcactttttcgagcaatggttcaggagtatgcaaatcgctcttacagcacagaggcacgcgattgatgatagccaattaattaagaatcacaagattagtcatacatacaaacatacaagacatacctgaaaaaactaactacacgaaaaaggataaactctagatatgaaacatttttgtaagtttgaagagattatgtgttgtatttccacgctttcccttgctatgtttgtgtgtgcgtcgacgttttagtagttacttcactagttactcttagatcaacacgaaaaggttggaatagcggttgttattgctgggtacataaactctttgcacatgagctattgaagcttcgaaggaaaaacactcgttctctgacattcaaaccaa

SEQ ID NO: 40146 - DNA, 1684 bp, Oryza sativa
  Clone ID: PAT_MRT4530_43617C.1
ggagagagagagaactagttctctctctctcttgagtcttgatccatccatcacccacaataatcctaatcacaagtgggcgtgagagagagggggccagaaggtcaacctttgatttaattagcaggcaggaattaagaggcagctaacagtagcagtagcacacaatcaagctcaaccctcatatatcccgtgatccattgttcagacctgccttattactagctgtagagatcttaattttattgtaaagcaaagctctcacctttatttataactagctgcccttcccttgcatcctattccttccctgcatcagagcagcgagctcgctctccatcccctgcgtgccatgggcaactgctgcggaaccaagattagctccgacgccatctcccggaacgcatctggttcaagaagaagaagatcaggaagcaggaggaaggggacggggctgagcagccgggtgtcgtcgtcggtggcggcggtgaccccacggagcgagggcgagatcctgcggtgtgccaacgtgaggagcttcgcgttcaacgagctcaagacggcgacgaggaacttccggcccgacagcgtgctcggcgagggaggcttcggctccgtcttcaagggttgggtggacgagaacaccttcctccccagcaggcccggcaccggcatggtcatcgccgtcaagaagctcaaccaggacggcttccagggccacagggaatggctggccgaagtgaactaccttgggcaactgtcacacccaaatcttgtaaagcttgtaggctactgccttcaagatgagcagaggcttcttgtctacgagttcatgcctcggggaagcttggagaatcatcttttcaggaggggctcacattttcagcctctctcctggaatcttcgaatgaaagttgcccttggagcagcaaagggacttgcctttctccacagcgacaaggccaaagttatctaccgtgatttcaagacttccaatgttcttctcgattcgaactacaatgcaaagctgtctgatttcgggttggcaaaggatgggccaactggtgacaagagccatgtctcaacaagagttatgggcacatacggatatgctgctcctgaatatcttgcgacaggtactctgttggaggctaaaatagtactatcgaagacccattttggatttaggtgctcttatgggtcacttgttggagacagtcttatgtatgcagatgcagtagggcatctgagtgcgaagagcgacgtgtacagcttcggggtggtgatggtggagatgctgtcggggcggcgcgcgctggacaagaaccgccccgccggcgagcacaacctggtggagtgggctcggccctacctcagcagcaggcgccggatcttccgcatcctggacgcccgcctcgccggccagtactcgctcgccggagcccacaaagcggcggcgctggcgctgcagtgcctctccgccgacgccaagaaccggcccaccatgcaccaggtggtcgccgcgctggagcagcttcaggagacgacgaccacgtctcatcatcatcggtcgccgcagagcaggatgttgctcggcggccgtggcttcaacgccagcggcaggtcgtctgctggtgctggtgctcgtccgaggcggctgtcggcgtcgcctctgcctgcctga

SEQ ID NO: 40147 - DNA, 375 bp, Oryza sativa
  Clone ID: PAT_MRT4530_43618C.1
atggtgttcgcgaggggcgcacagggacgtgcgaggtgcgggcagtgttttacagagcccccgggacctgcgggccgcttccgccgccggtcccgcaagaacatgctcgccggcccagctttttccctcgtgcgctgtcgcccgccgccggtgccccctcgtgcgagcgcggccctggagcgcgggaagaaagcgacgccgccgtgtgcctccccgtgcgcgcgcggcaccgtcgcccccaactacgacgtccgactccggcgaggccgcgctaccgccgccggctccgtgtcaccctcatcccccaccgccgccgcctcagcgtcacccgccggccaccgccgccgcagctccgtgtccgcctcccgcccgtga

SEQ ID NO: 40148 - DNA, 415 bp, Oryza sativa
  Clone ID: PAT_MRT4530_43619C.1
aaccttgactttgaaggcaattatggcatcaaaaaaagctggagaactttccagggtaaccaagggtaacatacaacgggataaacagaagggtcggcatacaacatggggcattacactacaaaaaaacttaaactctgatcttcctggtgatttcaaagatccggggaaaggatatctcaaactctagttctagatcttttttttgggcctcaactgggggctggggccgcactttttcttgcggcagttgacagccctggggggcaccccagcatagcacttggggaagaacatttgggcctgattgtacttgcgggcgagggcctggagggggggctcgaaggagccacccctgaggccgaggacaagggggagcgcggactccttctggatgttgtagtcggacaggggg

SEQ ID NO: 40149 - DNA, 337 bp, Oryza sativa
  Clone ID: PAT_MRT4530_4361C.1
gggagatcaaaattggatcccatcgattggaaatgagccgtccaacaaaccttatgggtctggtgcattattctttgccacaagcgagtagattttttttaaatcccaattacattttattttgagattacaattcgggagaaaaccccagaaaaaaaaaagccaaaatgggtggaagccagggatcaatccttaaaaccaaatcccttttaaattcttttaaatttcctccgcaacgaaacaaattccaccccggatttttttttcaccccatttcggggaccttgcgagctgtgggctccattttcttctcccggggggggggggaacggccccc

SEQ ID NO: 40150 - DNA, 2547 bp, Oryza sativa
  unsure (1)..(2547): unsure at all n locations
  Clone ID: PAT_MRT4530_43620C.1
atggcggaggcggaagcggaggaggagatgatgatgaggatgatgtgtggttcaggaggcaacgagatgatgaagacgaagatgaagaagaagaatagagaaggggaagaagaagaagaagtaagtggaggaggtaggatgaggaaggggccatggacggagcaggaggacgtccaactggtatggttcgtgcgcttgttcggggaacgtcgttgggatttcttagcaaaggtctcaggtttgaagcgcacaggcaagagctgccgtctccggtgggtgaactacctccaccccggcctcaagcgcggccgcatcaccgccgacgaggagcgcctcatcctccacctccactcccagtggggcagccgctggtcccgcatcgcccgcagcctccccggccgcaccgacaacgagatcaagaacttctggcgaacccacatgcgcaagatcgcccaccacgccaagaagaagaccaattcaccatcgccggcgccgacgacctcctccggttccttgtcctcctcgctcaccacggcgacgacgacgatggcgacggctgcggcgctgcaagaaagcagcagctgcggcggcgacgacgaggccgtcgaccagctggtggcggcggccaccacgccggcgagccagctgctgacgatggactacaccatggaccagctctggaacgacatcgcggcggcggaagccgatacgagctgctacgacgcggcggcgatggcctcgccgccgtcgccggtctgggaattctgcaccgactactcgctgtggaggatcgacgacgaggagtactacaagaagatgctcgatgcctcgcaatagtactactcaaattgcaaacaagcaacgccttaattcaattgctgctcttagcttaattagctgacgatcgatcgacgacgactctcatcatctgatgaacgaactgcgaaatctatatttgcactgcatatccttgcatctgtctactgtaattacacctgatgatgcacgtattatgcattgcttgtcagacaactctgctttatatatatctagctatagcttgatcaatcagcatgcctagcttgtgtacatgtaggggagagagtattagtagttaagactgatgggatcaagtgctatatgtatattgctttaatttcatggtatatgtactatgattgtactatgtgtcatatattcagtgtaagcagtggtttgcaattatttttttctttttttgaatgatctttttctttttcttttttctctctctcttatcatgcaacacccacacatgcatatatccatccatccatctatccccttatcacatttaatttcttcttcatatataccaatttggcaacagctaatgattctttttttatttgaaactctgaatgaattgatttagatgcatgcatcaatacaaataattgatttctttttatctggagctctgaaattgatttagatatgcatattgataaaacaaaatttgatattcatctgaaactctgaattggttaagatgcctacacataaatgttccattttcagttgtggggatcgatgtgatggcttttacatatatgcatgcgtaaattaacatgcggtgttgcatgatcgaagttaattaatctagaggcggtcgatgatcgatggatgatacagtacttaactaggagatggaggcatgcatgcatgagcttagaacgcacgggaaactgaggtgttaaccatctgcttcttcttcttcttcttcttcctcctcctctggatggctgtctccctggcacatgttggccttggtggtttcacctttcaggtttgaagcgcacaggcaagagctgccgtctccggtgggtgaactacctccaccccggcctccagcgcggccgcatcaccgccgacgaggagcgcctcatcctccacctccactcccagtggggcagccgctggtcccgcatcgcccgcagcctccccggccgcaccgacaacgagatcaagaacttctggcgaacccacatgcgcaagatcgcccaccacgccaagaagaagaccaattcaccatcgccggcgccgacgacctccttcggttccttgtccttctcgctcaccacggcgacgacgacgatggcgacggctgcggcgctgcaagaagcagcagctgcggcggcgacgacgaggccgtcgaccagctggtgggggggggcaccacgccggcgagccagctgctgacgatggactacaccatggaacacactctggaacgacatccgcgggggcggaagccgatacaagctgctacgacgcgggggggaagggctngccgccttcgcggtcttggaattctgcaccactactccctggggggatccccgcngagagtctccagaagatgctcgatgctcccaaagtccttcccaatggaacaagcacgcttaattaatggcggttttgctaattgcggagacgtcgacgaacctttaatttgttaaaaacgggaattttttgcctcggtctctgatgctctgattcaccgaa

SEQ ID NO: 40151 - DNA, 387 bp, Oryza sativa
  Clone ID: PAT_MRT4530_43621C.1
ataaatcaaagtgagatccacgaatctgtagaaaattcactacaaatcttcactcacataatacaaatacacagcgagcaccacaagcgttcaattatgcatgcagttgtgtcatattacaaaggttctaggtacaggaatgtttccatgcctggccaatccatctatgatcatcatcagatcatcaccatatccagaagacgttgcatcctcactaatacttcatcttcccctcgcactcgatctcgacatcatcttacatgaatatgacttacttcacgcaacaacacaagaggtttaagaccaaatcatgcaccactcttaatcgcaccataaaaaaccaacctagtatagatgttatacattctcaacaaggttttgtttttt

SEQ ID NO: 40152 - DNA, 927 bp, Oryza sativa
  Clone ID: PAT_MRT4530_43622C.1
atgtcgaagggagcgatgggaagaacttccatcatggagaagcaggaggaggcgttgaaggagtgggagcccctccatgagagtatctctaagctgctgaagggtggacgcatcaccgacgcccgcgaaaggcacagcttggcattcatggagatggaactgggcgtcattgtcgcatacctgaggatgccgctgccaccacacacagattgtcctggtgtcgatctcatcgataaccagatccagtaccactggagttactacagggatgtcgtgatatctctgtataatcagtacggagaagaagcacctaatgcggggctgctgcgaaaagccatgcggtgcttccgccgccgaaggtctttagagtataacattccgaggacagcgtacagtctctaccgtgagtgctccagtgatccacgcctcgagctcccaagctcggagctcatgccatcgccgcatcaagcagcccaagttgaggctggtgccctcaatgatcatcttgttggcatcgacagcatggcaaacgagatgctcagatggctcatggccaccgacaagggtctccgggtcatggccattgctggacccgccggcattggcaagaccacccttgccatggagctccaccgtcgactcaggtgccaaactcaagaatattatttccagtgccacgttgtggccgctaacttcccccggaggccttacaggagcaagcttgttcttcaaaccatcctgaagcagatcatggagcaactggatgcaccatcaccaaacagctcggaaatcaccatgtccatgttggaggacaacccggagctgttgactcgcaacatatcagaacacctcaaggataagaggaacacaagggtcagcaagctcccaccgcaaatcaaggagctgtgcaacctgaaggcattggac

SEQ ID NO: 40153 - DNA, 1866 bp, Oryza sativa
  Clone ID: PAT_MRT4530_43623C.1
atggaggcaaccatttctgtcatcctgactgaacttgcaggtagatccatatctttccttgtaagcaaatacctgaatcagcaaaagccggctccaagcgacgatgaaagattggagaacctgcaaaggctgctgctgcggtttcgcatcatcgtcgacgaggcggaagaacggtgcatcaccaaccaagccatgctggagcagctgagcatcctgaggaaggagatgttcagaggctactacaccctggacaccttcaggtgcagagctcatcaaggcaaggatcatcatggtgaaagagttcttggggacctggagaacaccattgctgatgctactgagttcattgcattcttaagcagttgccctcgccttcatcgtcagccgtatagcatgtacttgatcttggaccagtgcatgtttgggcgccagacggagatggaatatctcatcaattttctcctacaacctgggaatcatagcacactagaaccaggagttctaccgattattggtccagggagagttgggaagagtactcttgtcgagcatgcctgcaacgatgaaaggcttttatccaaggaagcctactggtacttcttcaaggtgagaacatttgggagcatggatgcttcagagcaccctgaaatggcatcaatagccatggacattgcaatagaaactgaagggtgtttcatgggtgccaatgtcttcagtagattgctgagatcaaatgccaacagtcattactggagcttggttcttgcaaccctgagagagttcaagaagaagaaccagcatatttggtcattcatgtatgctgcagatcaaattaaagctttggatcgggtgaatgaaccaagtgaagaagcaactgaacttcttgtgattcttgataactatcaaacaatctgctcacatgcatcttcccactgtgaagctgaagctgaagctcccaagatatcactgggcggcgggaaaggagcggaggccacgccggtgccgcacggcctctcgcggccgtcctcccacgccgccagtgccgccggggaaggatctgagcgcggccgtcggggacggagcagggcgcggctgtcgggggtggagcagtgcacggccggcgcgggaggccgtcgccgcggttctcgccctctcccctcccccaccgtctcggggtcgaagaggcccgagaggcgggagaaagaggaggacgtcggcgtcggcgggggcagcgtcgttggagaaggggagggcgtcgccgcgcgggcgagctcgagggcgtcgatggcgatgtcgtggccgtggttgagcttgacggtgcggagcagggcacggttgtcgggggcaaagcaatgcgcgccaggtggggtggagcttggtgcgggctgggagccgccgtgggaggagctgggcggcggcggcgggggagggtgggtgcggaaggccttcctgctggtcctgctgggtctccggcacaccgacaggttcgcgccgtcggcgctggtcctgcctcgccccaccggcctcctcacatacactcgcctccccgccgccgtcgcggcgccagaggacgggtccgcgctagccgtggcgaactgggcagagacggcgcggccggcgacgacgacgatgccgtcgcggcccgcctcgcggaccgcgcggcgggcggcggctcaggaccgcgccccaccggccttgcccaacggcctcctcccctcctgtcggctagcatacgccgccctcgccggtgacctccgctccttcccccgccaccctgagcgaagagagagtgagagaaatgagaagaggggaaaagagaggccagaacttcgtaaggggctccatttgagccttattagctactag

SEQ ID NO: 40154 - DNA, 386 bp, Oryza sativa
  Clone ID: PAT_MRT4530_43624C.1
atgccggtgtcgcacggcctctcgcggccatcctctcacaccgccagcgccgccggggaaggagctgagcgcggccgtcggggacggagcagggcgcggctgacgggagtggagcagtgcacggccggcggggtggagcttggcgcgtgcggcagccgccggggaaggaggtgggcggcggcagcggcggcggggaagggtaggcgcgggaggccgtcgccgcggttctcgccctctcccctcccccacgtctcggggtcgaagaggcccgagaggtgggagaaagaggaggacgtcggcatcggcgggggcaacgtcgttggagaaggggagggcgtcgccgcgcgggcgagctcgagggcgtcgatggcgatgtcgtggccgtg

SEQ ID NO: 40155 - DNA, 841 bp, Oryza sativa
  Clone ID: PAT_MRT4530_43625C.1
ttggaatctgtacatgtgacacatatgactttggtgattcattattgattatacttcaattggctaagtgttttgatgtcatgatgattattgtttcaaaagccaattgaattagtattcatctagacatattagttgaatgttataatttttcatatgtctagagagaagaagttttggtccaataatttgatgcaccaagcatctggctattatgtgaagaaaaattatatactaaaggccgatgcttgtaagtcagaaatagattggagaatccctttgaatagaatatttgaaaggtcctagtcttggggttgatcggaagattctgtggtaagcgttcaaatattatatcgccgaaatatagatggagtgctattgatgtgtttagacaatgatcaatctaaagttgctaggggagatgtgcatgaagggatttgtggagttcatcaatcggcccataagatgaattggttgcttagaagagtggaattctattggccgaaagtaattgatgattatttcaagtgctacagagggagtgaaacttgtcaatggatcggcaatgttcatttggcgcatgtcgctatattgaatcctatcatcaaaccatggccgttccgaggtagggctttggttttcattggtcagatttatccatcgttatcaaaagggcattggtttgtgctagttgcaatggattacttcactaagtgggccgaagccgtgccgctcgagaatattacttgtacgaagttgagaaatacttcccgagcatttggcaaaatgcttaggaagtcctatggccggtaattggattatcgccctaagacaacatgtt

SEQ ID NO: 40156 - DNA, 156 bp, Oryza sativa
  Clone ID: PAT_MRT4530_43626C.1
attatttcgccttttctgatcgtgtgttcgtggtggagttcatctcgccttcccctcttacggtactaccaccgatccttgtcaccacagaccggcgacggcttcttctcttctatctgagccggaggaggtataccacacctttgggatttgggg

SEQ ID NO: 40157 - DNA, 121 bp, Oryza sativa
  Clone ID: PAT_MRT4530_43627C.1
tggtagacgatgtacccgtcgatagcgaggcgcctgtggtgacttcgtcaatctcaaaatttgccggctcagttatcgaagatgctcataagggtagggtttacgtacgtgcattcataag

SEQ ID NO: 40158 - DNA, 564 bp, Oryza sativa
  Clone ID: PAT_MRT4530_43628C.1
gtccagataactgcatgaaggatgaaaaaacatttaccagtactatcgtactacacatttatttatccatgctttttttattggttcaggaagatgtaccagtacactgatctggtggagaagaacaccacaaccacctcagctaacacgttcctttgttgcacctgaaaagggataattcgcatatatttcatcttaaaaagaaactgagctgaagaaacttatgaatcagataacattttttctaggcctgaatttgtctgctatggctgcgggcacggcgaagcagcgttggaggtggctgctggctcctatgatgttgcccatgtctcctgctacaagtgcaaccggtgcaactgctaatgttaagagattattgactgtagcaagcaccaacgtgcctatctgggatgaagtgatgaataaataaaagaggccatccagtgtgacggttcatctctgtatatttggctgttgataattactggtcatcttgccagtgtgccctgtgtaatgttgttcagtgaaatataagataatttgtttaaaaaaaaaaaaaaaaaa

SEQ ID NO: 40159 - DNA, 3360 bp, Oryza sativa
  unsure (1)..(3360): unsure at all n locations
  Clone ID: PAT_MRT4530_43629C.1
atccgccatggctccgacggcgcccacggcggcgaagtccgcctccccgtcccagccatccgggaagagcgaggtggcggatctgaagcagcagctgcggcagctggcggggagccgcgcgcccgacgccgacgaccagcggagggacgtcttcaagcgggtgatctcctgcatgacggccggcatcgacgtgtcggcggcgttcggggagatggtgctctgctccgccacctccgacgtcgtgctgaagaagatgtgctacctctacgtcggcgtccacgcgcgcaaccacccggacctcgcgctcctcaccatcaacttcctccagcgcgactgccacgaccaggaccccaccatacgcggcctggcactccgcagcctctgctccctccgcgttcccaacctcgtcgagtaccttgtctcgccgctcgccactgggctcaaggaccccagtgcttacgtccggatgatcgctgctgttggtgctgcgaagctgtatcacatatctgccaccgcctgccttgatgctgacttgcctgcggcgctcaaagcgcttatgctctctgatcctgatgcacagattatagtgctcacaataccgtttaattaccaccgaaaagtctatgacatctgtagtgctgatttaaagttggaactggtgttgaactgcccaggtgtttggcttgctagtttgctggccacagctggttcactatttaaatcggtcattggtggtcaagtagttgcgaattgcatgcatgcattacaggagatctggaccctagaagcagctaagtcagaggaagctgcaagggagattgagacactatatagcaagccagtagtattttaccttcttaacaggatcaaagagttcagtgagtgggcacagtgcctcgttctagaattagtgtcaaacttcctaccatctgataacaacgaaatttttgacatcatgaaccttcttgaggacagacttcagcatgcaaatggagctgttgttttggcaacaatcaaagtttttctccacttgacaatgtcaatgactgatgttcaccagcaggtttatgagcgtataaaagcaccactgcttactcttgtaggagctgggagtcctgaacaatcatattctgtgctatgccatttgcatcttttggtgatgcgtgctccaatgctattttcctccgactacaaaagtttctactgccagttcagtgatccttcatatgtcaagaagcttaaacttgagatgctgactgctatagcaaacgagagcaacacctatgaaattgtaactgagttgtgtgaatatgctggaaatgttgatgtaccaatcgcacgtgagtctattcgagcagttgggaaaatagcgctgcagcagtatgatgtgaatgctattgttgacaggcttctgcaattccttgaaatggacaaggaatatgtgacggctgaaactcttgtcttggtgaaagatcttttgaggaaatatcctcaatggagccatgattgtatagcagttgttggaaacatcagtagcaaaaatattcaggagccaaaaggcaaagcagctcttatatggatgttaggagaatattcacaagacatgcatgatgctccatacattcttgagagtctcgttgaaaattgggaggaagagcactctcctgaggttcgcttgcatctcctgactgcggtgatgaaatgtttctttaagaggccaccagagacacaaatggcactaggagctacattaaccgctgcgtccgctgacactcaccaggatgttcatgaccgagcacttttctactataggcttttgcagtatgatcctgctgttgctgaacgtgttgtaaaccctcccaagcaagctgtctctgtatttgcagatacgcagagcagtgaaatcaaagatcggatatttgatgaattcaacagcctatcagtggtatatcagaagccatcttacatgtttactgacaaggagcatcgtggaccatttgagtactcggaggatcttacgaatttggctgtcggggcagaaacgacggaaaacaccatctcagcccaaagatatcaagaaagtgataatgatcttttgctaagtacttcggataaagaggacaatgcaacagctaccagcaatggttcttctgcctctacctacaatgctccttcagacttgagtggtccttcattgcttagttcacaaataccgtctgaaacttcactaataaatcctggtgcacctacatattcgtcacagtccaacttcagtcttgatgaccttcttgggcttggtgttccacaatcctctgcacctccaccagctccagcattgaccctcaactcaaaacctgtgctggatcctggtactttccagaagaaatggggccagctggccttatccttgtctcaggaatgttcattaagtccacaaggagcagcatcattgatgaatcctcaatcactcattcgacatatgcaaaacaactacattcagtgtattgcttcaggtggccagcccccaaactacaagttctttttctatgctcaaaaggatggtgctaccgctttcttccttgtagaatgtatcgtcaacacagcatcagcgaaggcacagatcaaagtgaaggctgatgatgggaccgctgcagaggcattttcaacgttgtttcagtcagctttgtccaaatttgggctttcttgatcctgagcattttatattggtgatgagcctgtcagtttctctgcttgtcctaccacatccttgaacgtcctaaagatttttggtacatctttaatgggaatgttgaagcatgagtttgaacatcctcaacagcatatacagcagggagagcacaggctggagttttttaaggatgtatttatggtggctcggtggagaaaaattagcattgtcgtatatttcatctggagaagtgagttgttgtggcttcttgtgtttctgaaggtgaatgtcacctgttttgtcgatgtagagacaatatagatacagcgctgcttctgtatgttagtactccgtatttcttacttgcacagagcaataaagctgttcattctaccaaaaaaaaaaaaaaaaaattaagcccctttacattgtgaagtaaaaaaactgatttctccatctgcccttgtgaaacttagcttgcaatgctcacggacaagtttattgtaaattggatctgcccgtgtttggcaggtttttttttcctataaataaaaatcaatagaaaaacgcagtaagatccaaaaaaaaaaaaaaaaaaaaaaaaaaaaaaaaaaaaaagggcgtgccgctctnagagaataccaagcttacgacgcggcagtgcgacgtca

SEQ ID NO: 40160 - DNA, 315 bp, Oryza sativa
  Clone ID: PAT_MRT4530_4362C.1
cccttacgctctcactgaagcaagggtcactcctggtgatgcgcgggaacagcgcggacatggctcgccacgtcgtgtgcccatcgtccaaccgccgcgtgagcatcacgttcgtgcgcgtgaggccgtcgacgccggtggacctcagcccgctcccgtcgcccaccaaggccatgacgctgtggcaggcgccgccgccgcagcagcagcagacgatcccggcgcccggcatgcagcagaagcccgaagaaacgcggcgccatcattcggctacgggtccggcgccgcacgccgtgctggcgcctgcgtggggca

SEQ ID NO: 40161 - DNA, 278 bp, Oryza sativa
  Clone ID: PAT_MRT4530_43630C.1
ttagtaaatctatggagacatactaccaggtacatctaattatttaaccaactttcttctttgaaagtggaagggcagggagagatggactaccttcagaatgtattctgtattatcgacctggtgatgttccacgccaatcgatatgctgttttttcaatgagcagagttcaatggtcttctatgaaaactgtggcctgcaaaatctttatgacatagtacgatattgtcaggtaaattcccagtgctccgcccatgctatatttgccataattagc

SEQ ID NO: 40162 - DNA, 1782 bp, Oryza sativa
  Clone ID: PAT_MRT4530_43631C.1
atgggcctctattcctccgctccatccggtggccataggcgtgattggtggcggcaggttggaacggatgggagatcactggtggaatccggtgggcttgggatgcaacaacaacagctactgcacacaacggcgaaattggtggcgacccttcctgtgacgatggatgtgaccgagctcggggagaggcagatccaccatcggcagattcgagagctacggacctcggctatagtgaagggatcagtgacggctgtggaggcttgcatatgggccttggctgtcgtggaagacggcgcccttcccggccatggaaccatggaaagggaagcaggaggtactgatccccagcccgtcttaggtcgcatggttgcgatcgaagactacattctctgcgcctacattggggtagagccctttctcgatctcttccgctcctactacaagctgcattggatggaatccaacagggtgtctggatgcgtcgggttccgacttcgggatggcctgaagtcgcgttatatccccttccagtgcccttcctctagcagcaaatggcggacgaggtggttctaccttcagatcgaagattcagaccctgtcttcgttgttcccgaggaacaaccggacaagatttcgtcttgtaccgcaaatccccccttgaccccttctcttcagtcattcatcgacattgtcgacgatctccgagtacgaggcttgtcggggtatgaagtcgctgcagacttcattggtctgaacagcgaaaccgtggaatgtcgtgtcgaccaggtgatgatcagtggcccgacaatggcgagtaacatcactgttcccctttgtgagaaggggcggccgaacgtgacgctgccatcaataccatcaggtggcggcgtcgctgagggagaggtcgccaaggaggcgtccgatgctgctactgctgctgccaccacaagtggtggcaatgttctgacaaaggggaggaaattctcctctgcctcgaacgcgtctcccccgcctccacgacgacaacgacttgtgacggttggcgagaaggcggcgcgggcgaaggcggtgcaagatgagtccggagggacttccggcgcgtctcccgctgttgcctcgacggatgtcgtcgaaatggggcgcctcctcgaggctggtgctcgcggcattggtcgcgagattgcggaggcgaggtcgacggcggcgtcagtgaacgagcgtgctgaccggctggtacacgagttggcggaggctcgtgaagacctcaagaagatgagggagttggtagccggcaacgagcgacaacggcagaggctcgagcaccgtatgtcggagctcgggaacaatctgtcggaaatccgtggctcgttgcgggtcacctatactggtctgcatcagctcgccggggaacgcggcatcaagtctacaatcccggcaaatcccgatgagttctcgctgatgtcttctcttgcggagctggcggcggcgatggaggagatcccctccaagcatgcggctaggatcggggaggagacgtctaacgggatctacaccggggcgtgccacgtccttgcgtgtgtgaagttggcgcatcctgaactcgatctgcgcgagatcttggatcagggggcagctagcaacacgcgtaaggaggtgatggaagaagtcggtgatctgggggaatctgttctccctctttttgaagaagatgttgatgacgaggatgtccagcagcgcgggcagctcgagtcaccggcgattattcctactcgcgtttga

SEQ ID NO: 40163 - DNA, 402 bp, Oryza sativa
  unsure (1)..(402): unsure at all n locations
  Clone ID: PAT_MRT4530_43632C.1
tttttttttttancattatgctgtttatctaaccncnaaatgcttcccagtnaactgtctttagggggatgataaatngacttcctnatcccccaaccngaaaaccatattgtttggnttaagaataccntgctcccntttacatcccnaaattaccccccntttacnaaaattccgtctctccgaaaaattgccactcccnaangatgatccgaaccccggggaccgaaaaccgcacttcctgaatactagggtgaaanatagggagtttaccgcntcccccngtgatgggtnccccntgtcgctccccgtttnataccntcccnaagaaacttccngatatccntgtttcttccccgtnggcatttctgggttgaatgaagggntgctgaaacnananaa

SEQ ID NO: 40164 - DNA, 594 bp, Oryza sativa
  Clone ID: PAT_MRT4530_43633C.1
atgacggcgaggaggaacagccagccaatgggggcgctgatgaggacgaacggcaatggcgacggcagattccggcgagattttcagtttggtggctctaacccggccttcatcaagtcagcgattggagtgtcaaatgtgcttggatcaacaccaaacttgccccaacaaatacgaggtgaggccgaggatggccttgccactgcgatgccggatggcattgcggtgccggggaagacgacggtgcggctagctggtgctcgggcgccgaggcagaggcagctggagggccggccatgggaaggggtagaaacggcgccggaggaggtggccggttgcatcaatggcggcataaaggaggggattaaatcccggcgattgggggcgggagggggaaagaggaggaagatgcgcctgacaggtgggtcccacctgccagcgcgcggacgcggaggggtatgtgcgcggctcggcgtgggccgggcagagaggcggtccaggctagggaaaaagaggagggagagaggagggaaggggaagagcggaaaggccgagcaggccggcaggccggtggggacaagaagcagagtttga

SEQ ID NO: 40165 - DNA, 1381 bp, Oryza sativa
  Clone ID: PAT_MRT4530_43634C.1
atggatcttggcaaatcctcctccaccagcgcgtcgctgaagaagctccaggaagacggcacccttcccggccgtggaaccatgggaagggaagcaggaggtactgatccccagcccgtcttaggtcgcatggttgcgatcgaagactacattctctgcggttttcttcctccgtcttccgaatttcttctcttggttttgaacttctacggtctttctctgctccatttgaaccccaattctatcgtcttccttagtatcttttcttatctttgcgaggcctacattggggtagagccctttctcgatctctttcgcttctactacgagctgcgttggatggaatccaacagggtgtctggatgcgtcggtgcccttccttttgcaacaaatggcggacgaggtggttctaccttcagatcgcagattcggacccagtcttcgttgttcctgaggaacaaccggacaagatttcgtcttggaccgcaaagcccccttgaccccttctcttcagtcgttcatcgacattgtcaacgatctccgagtacgaggcttgtcggggctcgtgttcacgttcctcctgatttatcgaaatttggttctcgattcataggtctgaacagcgaaaccatgggacgtcgtgtcggccaggtgatgatcagtggcccgacaacggcgagtaacatccctgttcccctttgtgagaagggggcggccgaacgtgacgctgccatcaatgctcttcctctgactgacatcatcgggccgctcgcggaccatcaggtggcggcgtcgctgaaggagaaggtcgccaaggaggcgtccgatgctgctgctgctgctgccaccacaagtggtggtaatgttccgacaaaggggaggaaattctcctctgtaagcggacatcgtcgcaaggcatctaccccctcggaggagctccaggtcgaaatggggcgcctcctcgaggctggtgcccgcggcattggtcgcgagattgcggaggcgaggtcggcggcagcgtcggcaaacgagcgtgctgaccggctggggctcgagcaccgtatgtcggagctcgggaacaatctgtcggaaatccgtggtttgttgcgggtcacctatactggtctgcaccagctcgccggggagtgcggcatcaagtctacaatcccggcaaatcccgacgagttctcactgacgtcttctcttgcggagctggtggcggcgatggaggagatcccctccaagcatgcagccaggatcggggaagagacgtctaacgggatctacaccggggcgtgccacgtccttgcatgtgtgaaattggcacatcctgaactcgatctgcgcaagatcttggatcagggggcagctagcaacacgc

SEQ ID NO: 40166 - DNA, 327 bp, Oryza sativa
  Clone ID: PAT_MRT4530_43635C.1
atggccgacggcaacaagggtagcctcctcgccggcttcgccaccttcctccagcgcatccgtggtggcggcggcggtgaggactatcaactgccgatcaatcacaaacatccagaccacaaagccgacatcctcatgtacggggacatggtggaggccgcctacaactacaaggccttcgccgccgacgagaaggaggtttactacggcggcggcggcggcggctacttgtacttggccactaccaacctctacgccaccatcgacgccgtcccggcaccgtaccgctcgaggcggctctggccgacgtccccgtccgcgccgtga

SEQ ID NO: 40167 - DNA, 1688 bp, Oryza sativa
  Clone ID: PAT_MRT4530_43636C.1
tcaagactgttgtcgttctcggtgtgaggaccgtagagatgggacgtagtcgagaacatcatgtgaagcccaacggtcacgagtgaatttaaactgaagtccaaaaaaccgccgcgcgtaacggacccagaaatctccggcgggcatctctcccctttccttggaattcgcaccgtcggtagtgcgtccatttaaaggaattttgaggatccattttgaagtccgcccattgtgaagaaaatatcccgcctgcaagtgttcttcgtcttctccgctctcacaagaaaccctagctcgtcgacctgagccctttatccggcgatctccgatcgacgatggatcttggcaaatcctcctccaccagcgcgtcgctgaagaagctccaggaagacggcgcccttcccggccgtggaaccatggaaaggaagcaggagtgcccttcctctcgcagcaaatggcggatgaggtggttctacctccagatcgaagattcggaccctgtcttcgttgttcctgaggaacaaccggacaagatttcgtcttggaccgcaatgccccccttgaccccttctcttcagtcgtttatcgacattgtcgacgatctccgagctcgtgttcacgttcctcctgatttatcgaaatttggttctcgattcacaggtctgaacagcgaaaccgtgggacgtcgtgtcggccaggtgatgatcagtggcccgacaacggcgagtaacatccccgttcccctttgtgagaagggggcggccgaacgtgacgctggcatcaatgctcttcctctgactgacatcatcgggccgctcgcggaccatcaggtggcggcgtcactgaaggagaaggtcgccaaggaggcgtccgatgctgctgctgctgccgccaccacaagtggtggcaatgttccgacaaaggggagaaaattctcctctgtaagcggacatcatcgcaaggcatctaccccctcggcctcggacgcgtctcccccgcctccacgacgagaacgacttgtgacggttggtgagaaggcggcgcggtcgaaggcggtgcaagatgagtccggagggacttccggcgcgtctcccgctgtggcctcgacggatgtcgtgcttgcgcccgggagccgcgaggcgacaccaagcggcccagccaacgatcccgcggctggtcgcggtccaccggctaccgtcctcacttgggaggagctccaggtcgaaatggggcgcctcctcgaggctggtgctcgtagcattggtcgcgagattgcggaggcgaggtcggcggcggcgtcagcgaacgagcgtgctgaccggctgaagatgagggagttggtagacggcaacgagcgacaacaacaggggctcgagcaccgcatgtcggagctcgggaacaatctgtcggaaatccatggctcattgcgggtcacctatactggtctacaccagctcgccggggagtgcggcatcaagtctacaatcctggcaaatcccaatgagttctcgctgacgtcttctcttgcggagctggcagcggcgatggaggagatcccctccaagcatgcggccaagatcggggaggagacgtctaacgggatcaacaccggggcgtgccatgtccttgcgtatgtgaagttggcgcatcctgaactcgatctgcgcgagatcttggatcaggggtga

SEQ ID NO: 40168 - DNA, 1110 bp, Oryza sativa
  Clone ID: PAT_MRT4530_43637C.1
atggctacgctgcgtccggcgccggcgtcgatggtcgttctctgcgcggtggtcgtcgtcggcgcggtattcgtcgtggtggcggagggcggcggcagcgaggaggcggcggcgtcgacagggaaagcagcgatggtgccggcgctgttcgtgttcggcgactcgctgatcgacaacgggaacaacaacaacctggcgtcgttcgccaaggcgaactactacccctacggcatcgacttcgccgccggcccaaccggccgcttctgcaacggctacaccatcgtcgacgagctcggatatgagaattggatcccggagatgagtaggacggtggagggcgtcaacttcgcctccgccgccgccggcatcctcgacgaaagcggcgggaacttcgtgggacggattccgttcaaccagcagatcgacaacttcgaggccacggtggagcagatcgccggcgccgtcggcggcaaggaggcggcggcgtccatggtggcgcggtccatcctcttcgtcgggctgggcagcagcgactacctcaacaactacctcatgcccaactacaacacccgccgccgctacaccccgcgccagttcgccgacctcctcgccgaccgctacgccgcccagctcaccaggctgtacaaggccggggcgaggaagtttgtggtggccggagtggggtcgatggggtgcatcccgaacgtgctggcgcagagcgtggagagccggtgctcgccggaggtggacgcgctggtggtgccgttcaacgccaacgtgagggcgatgctgggccgcctcgacggcggcggcctccccggcgcgagcctggtgttcctggacaactacggcgtgttcaaggccatcctcggcgacccggcggcgcacgggttcgccgtggtggaccgcggatgctgcggcatcgggaggaacgccggccaggtgacgtgcctcccgttcatgccgccgtgcgacggccgcgaccgctacgtgttctgggacgccttccacccgacggcggcggtcaacgtgctcatcgccagggaggctttctacggcggcgccgacgtcgtctcccccatcaacgtccgccgcctcgccgccctctga

SEQ ID NO: 40169 - DNA, 207 bp, Oryza sativa
  Clone ID: PAT_MRT4530_43638C.1
atggcattacaacatggcaatgccaccggaagaagaccgagaggtagcggctgtgacagcctcagcggtgaaattagcggaaggaggcagtgtagtgcaacggggttaacggtggcacagtgcggccggattagcgacgggaggcagcgcaatgcgtcttgcacgccaggcatccccatggattccccaagctcttccccgtcttga

SEQ ID NO: 40170 - DNA, 209 bp, Oryza sativa
  Clone ID: PAT_MRT4530_43639C.1
atggccatcgtcgccaccacttcgctcggcgtcgtcctcagctcgcacgaacccttgacctcactcggcgtcttggacccctacagaaccatgcgcgacatgaagctcgccacgcataggcacctcgatgcatggcgccccaatgttcgcctgtgtctccgatgcaccgtgacgtgggagcaaagagcagccggcggcagttgcaacac

SEQ ID NO: 40171 - DNA, 588 bp, Oryza sativa
  Clone ID: PAT_MRT4530_4363C.1
atgatgagctcagtagcgtttgtcgagggcagtagaatgagccgacaagcttctccagcccccaccgccttccccatcgagccgtgcgggcttctccagcgtagatcaaggtgggcggttagggcaccatcgacagcccaacaagctcccttcacctatccccaacctccatccctcaccaagaaaatctgcattcaccacctccactcccctgctggcacccatctcccttcaccactcgatggcgacagcgagatccacaagacggtgaccacgagctgtggatgggctgagggtttgagaaggccaccattgggctactgcggcggacgggtcgaggccaccgccaccttctcgagctcatactcatcgtccacggccgtgatgttgccgacgcaacccaagtgctccacgaccatgaggatgacgcccggtcaccctcctcccctagccaatgaggttggcggcgtggagcgcagggcaacgagaatggcagacgtggcacctatggctcatcttgtctccgcaatcttcatagggcaacgagaatggcagacgtggcatggaatctctgacctatcatgctga

SEQ ID NO: 40172 - DNA, 909 bp, Oryza sativa
  Clone ID: PAT_MRT4530_43640C.1
aattcggcacgaggccactgtccaccgcgacccgcagctggtgagtggatatggccgccgcgctcgccgccgccgccgccgccgccgccgccgcccaccaccaccgcctctcctcctcctccccggccgcgcggacacgagtagttcaccaccaccgccgccgccggtcgtcctccctctccttctccgcgccagcctcttcccacggctgtcccagaggcgcccgtgcgctcaggcgcgccgccgccggcgatggaggcggtaacggcagcggcggcgtcagcaccggcacggtggacccggccgccgcgtcgtcgccgtcgtcgtcgctggaggagctgtaccggagctgcgcgacgtggacgtggagggggatgcgcgtgaactacctggtcaggggggagggcccgctgctgctgctcgtccacggcttcggcgcctccgtcggccactggcgcaggaatattggcgtgttgtctgaatcctacaccgtgtacgcgatcgatttgctcgggtttggcgcgtcggacaagcctcctggattctcctacacgatggagacatgggccgagctgatcctggacttcttggacgaggttgtgaggaggcccacggtgctcgttggcaactctgtcggaagcctcgcatgcgtcattgctgcagcagactccagcagagatcttgtccgggggcttgttctactgaattgctcgggcggcatgaacaacaaggccatcgtcgacgattggaggatcaaattgctccttcctctgctatggctgatcgacttcctgctgaagcaaaggcggatagcatcagcgctgttcgagcgtgtaaaagacaggagcaatctgaaggacatcctgctctctgtctacgggaacaaagacgctgtggacgacgaactag

SEQ ID NO: 40173 - DNA, 450 bp, Oryza sativa
  unsure (1)..(450): unsure at all n locations
  Clone ID: PAT_MRT4530_43641C.1
caaaaaaaaaaaaagaaaaaaaaaaaaagaaaaaaaaaaagaaaaaaaaaaaaaaaaaaaaaaaaaaagaaaagaaaaaaaagaaaaaagaagaaaaaaaaaaagaaaaaaaaaagaaggggcacaaaaagggggaacaagcacaggagcccgagcaagcacaagcgcgaaaccaagnncaggacagagaaaaaaaacaaccaacggcgcanngcagcggangagaagaaaacggaagcacagggaaagaacgggggaacaccaaaaaaacaagccacgccgaaaccaacaccccacgagcgggaaggagcacacgaaggagcagccacaagaaccccacccaaaaccgagggcaaaagagggcggcaaggaggaaaccacacaaaagggcgaaaaaagcgggggggaggaacgggaaagcccaaagccggccgaaaaccggacaagggc

SEQ ID NO: 40174 - DNA, 1019 bp, Oryza sativa
  Clone ID: PAT_MRT4530_43642C.1
ccggcccgcggggcctccttactaggcttaactatttgggctccatcttcttcttgccactctgaattcagcttcaggagcatagatagcaacatagcatcatggagctttctctgatcaccttcacagcaactggtgcagcagcagcattcacttcacccaagatcaagaggaggatgaggatggcaccaaccatggcatccaaacctggagccaaagtgaaggtctctgccggttgcaagacgtgcagaggaaagggagctgtagaatgcccaggttgcaagggcactggaaggaacaagaagaatggcaacatattcgagagatggaagtgcttcgattgccaagggtttgggctcaagagctgtcctagctgtggcaaggaagggctcacaccggagcagagaggtgaaagatagaacaaattaattgacaagaacaatacagacaccctgcacttgcatgccagtatcattatggttaagcttgttctgatgtaattatctagtggtaatttcttagctatagattagatggaggtcaatgaggatcatctcaaggagatttttgaaaattatggtgaagtcgtcaatgtggagctctccatggatagggtggtcaatcttccccgtgggtatggatatgttgagttcaagaatagagctgatgcagagaaggctcttctttacttggatggtggccaaattgatggaaatgttgttaaagtcagattcgcgcttccaccacagcagcaaagagctgctgcttctccaaaagctcttcacccttcaccaaaaagggatgtggttgatcataataaagttggtcctagtgctgaaaaggccaccaaacagcagcccaggaaacgactcctccaaggaggatgtggagtcctcccagaagaccacagtcacttcgccatcgcagtagatctcccattcaccgaccaattcgctccccttccagatcgatttctccacgcagggaccaagaagggtgctcagaagtcgcagtcctag

SEQ ID NO: 40175 - DNA, 327 bp, Oryza sativa
  Clone ID: PAT_MRT4530_43643C.1
atgtcgagaaccagacttatgtatgaatgggccaagaactcagaattaacacgacacactgagccaaaattcacaagtctacggagaggaacaccagaggaggacaccagccaacttgtgggctggttgggccagcccagggttcggccgaaccaatgctcgcgccgatggatgcagggttttgagggaacggtggagattcacgccctatggcggttggagggcgtggtgtctagattacgggatatcattatttggggttataaactgtggatgagaggtgagctactgatggtgacagttcagtacgagtattcctccgcactg

SEQ ID NO: 40176 - DNA, 537 bp, Oryza sativa
  Clone ID: PAT_MRT4530_43644C.1
atgacctgcttggtggcaaaccggggaggacgcgccggctgcagaagcaccggggctcaggtgtgtggggaggaagaggtggcgccagagacggggagaggtggcggcagcggcagggttgaagaaggaggtggtgccgtggctgtggcggtggtggtggcggactctgaggtggcagcattgggttcacacggaggagatctggaggggagaaaaatgaaaaataaggtgaggtgggaggactggaagcccaacgaggaagccaacaagcagcctgagcaagctagagtctggcagcgactgctcgaccagtccaacaaattaagaagtcaacgtgggggcctagaactgcgggtgaaggtggagctcgagcaagagggtccagctagcatgagcggatgcaagctctcgagtagcgaagctggtgctagttcaagtgcagagctcagcatcgccggagctcaagctaggggccgatgcagcagccgagcttggggcttgagcaattggggggttgttgccagcaagctaagttag

SEQ ID NO: 40177 - DNA, 359 bp, Oryza sativa
  Clone ID: PAT_MRT4530_43645C.1
aaatagtctggttataatagtcccataaagagatagtccatgatttatcattagtattcccttcaagtttatatgctgctgtcaaattatcccataaatatattgctaatgctttcaaaagcatcattcgttcaaggtccattttctcttttccctgtgacataccaacatccaatatatgttattgcagctaggtgtattccttctcgtaagtgtgatcttagctggagcctggttgggtactggggtgccgtaagctggctacagaaaaggactgtgatctgtgtggtatttgtgagggcttctgatattctgagtatatctgaagtcttgacattcttgattcagatatatttgac

SEQ ID NO: 40178 - DNA, 495 bp, Oryza sativa
  Clone ID: PAT_MRT4530_43646C.1
atgcactgcgccgagccctgccatgggtggcttgcggctcctttcattctccacgaatctaatctttctctttctcgaaggtcaccgccgtcgaatctccgcaagatgtctgatgtgcaacagacaatgctaactggattgtcacgcgtacgtcacgtagaacaaaatcacgttagattggatcgagggggtaattcgtccgatattgaatgttcaggaccattgacgggaatccggtctagattttataagatcgaagaaggtttgaagacgcagcacgacctgaaacacatccaccctagtagtagatgtcggtcgactctggttttgtatcctgcatcatggcttccgacggtggatatcgggaactccatctttggagcccatggcccaaaggaaaaccccaccctaaactctaggcgaggtgattcgaagggagagtgtgcagttcgtccccaaccctatggagacatgctttggacatcctccatccat

SEQ ID NO: 40179 - DNA, 2475 bp, Oryza sativa
  Clone ID: PAT_MRT4530_43647C.1
atggatcccgccgccgcgcggcgcaaggccgagcggtggataggcgtggcggagaagctcctgatggcgcgggacctcgaggggtgcaagcagttcgtctcccaggcgcgcgccgacgacccgaccgtccccggcgccgacgacctggccgccgccgcggacatcctgctctccgcgcagcggcggcgcctcgcgacgggggcgcccaacccgtacgccgtcctggggctcgactgcgccgaccccgcgtcccgcgaccccgacgtcgtccactccgcctaccgccgcctctccctcctcctcaaccgctcccaccccgaccacccctgattgcatgccttcgccgacgccgcccgcctcgtcgccgcggcgttgccgttcctgttcgaccctgtccgcaaggcctccctcgactccagcctcgacgccgcagccgccgcggcggcacctcgcccgcctcccgctccctctccacagaagcagcagccgcagccgcagccgcggtcaccgcggccagcctcgccaccgcctgttcccgcggcaccggaggtggcctcggcggtgtcgacgccgccggcgcggccaaagcgcgggcggccgccacgcgccgctaaaccccaaccgacgccggagcggcagcaggaggcggaggtggaggcggcggcgacgttctggacggcctgcccgtcctgctgcaacctgcacgagtacacccgctcctacgaggcgcgcacgctgctctgccccagctgccgcaagccgttcttcgccgcggcaatggccacgccgccgcccatcgtgccgggcaccgacatgtactactgctcatggggcttcttcccgatgggattccccggtggccctgcgttcgctcgaccaaccagttcttcttcttcttcttcttcttcttcttcttcttcttcttcttcgccgacgaagcaagcaccggctgctctgggattctatccaatgggaccctactccctgccattgccagctcaaggcgacgctgccgagggcaatgcagcagttggttccggtgatggcacagtgacagcgccgtcgccgccgccgccgccgccggcggcagcgccattgccggtgaagcccaaacttgtaaagcttggggcaaggaagcgagggaggcccaaaagcagtgggaacttgcttctcgtgagcgggtccgatctgatcatcatggtgaaagaacatgcagagaaaggagatggcgttcaagaatgccaatcgtctcctgcgctttcagaagataacttgaggcacagtttccgattgggagatattacatgggttaagcacactggctcgtggtggccagcacaggtcgttgaaaattcatgtatcagcagcaagcctaagaagacggccaagcatcatgttccagttcgtttgtatggcacttgtgtacaccttgtcttttggactgctaagaaaatgctgaagcgagagaataaaagtgcaatggaagcattccatgaggccgttaagaaggagctgtcccacgttaattcaccttgcgattctactgaagaagctggcaacttgaaagccaagacctcttccaagaaagtcagaaagcaaaagggcttaaaggaatcaccagcctctgagcatatgggagaggatacaaaagaccagcatagtgcagagcagcaccaagaacttggatatactgcaacaactggagttgccactcgtaaaggaagaagaacgcgagaaggtgcaagacaactcagtcctactgatggtgaagatcaagccagtggtaaaaaagcttctattgagggttcaagttataagacagaaaaacaagttggttctgtatatgatgaagaggcttgtaagatgacaacgacagagagatcagtgggtagaagggaaggactgagacgatctgcttgtacacccatgaaggcatatttagatccatcggaggatagaacatcacttttcagtgatacaagtgcaagtgaaggtgcaaatgaagtaaatagaacaccagagaattcaaatcagcatgaagatgattcaaccatagatggaactttggcttctcatgcagaaataagggttatggttagggatatactgttcagtgacattattgccaagcagcatgctgctgagatggcatatgtagatgaagtgatcaatggcatttgctgcgctagtgaattgaacataactggtgatcctactcctgttgcaaagggtggacgaggcatcaaacgaggtggtagtagggcagaggcggagtcaagtaacattacacagagatctagaaaagggagaatagatcaagcaagtagcaatggaaagaaaagagctaaggacacctcagaaaccatgaatcatgacaacagtcccaactctttgagagggcctttcgatagtactgtattcgacagatattcgaaagctatcataactcatgaactcagcttcggttacacctaa

SEQ ID NO: 40180 - DNA, 664 bp, Oryza sativa
  unsure (1)..(664): unsure at all n locations
  Clone ID: PAT_MRT4530_43648C.1
ccggccgggaaatgtcccgtctcgttgtctcctctgctccttgcgccgccgccaaggcgagtcgcggctgagccgggagggggcggcgatctccatttggcgagcagagcaggggaggggattctggtctgaactgatcatcatggtgaaagaacatgcagagaaaggagatggcgttcaagaatgccaatcgtctcctgcgctttcagaagataacttgaggcacagtttccgattgggagatattacatgggttaagcacactggctcgtggtggccagcacaggtcgttgaaaattcatgtatcagcagcaagcctaagaagacggccaagcatcatgttccagttcgtttgtatggcacttgtgtacacatgtacgtagacccttggaagtctaacatggaattcaaaatgatgctgaagcgagagaataaaagtgcaatggaagcattccatgaggccgttaagaaggagctgtcccacgttaattcaccttgcgattctactgaagaagctggcaacttgaaagccaagacctcttcccagaaagtcagaaagcaaaagggcttaaaggaatcaccagcctctgagcatatgggagaggatacaaaagaccagcatagtgcagagcagcaccaagaacttggatatactgnncacact

SEQ ID NO: 40181 - DNA, 844 bp, Oryza sativa
  Clone ID: PAT_MRT4530_43649C.1
gatgattcaaccatagatggaactttggcttctcatgcagaaataagggttatggttagggatatactgttcagtgacattattgcgcaagcagcatgctgctgagatggcatatgtagatgaagtgatcaatggcatttgctgcgctagtgaattgaacataactggtgatcctactcctgttgcaaagggtggacgaggcatcaaacgaggtggtagtagggcagaggcggagtcaagtaacattacacagagatctagaaaagggagaatagatcaagcaagtagcaatggaaagaaaagagctaaggacacctcagaaaccatgaatcatgacaacagtcccaactctttgagagggcctttcgatagtactagcagggatgcagccatggaggaactggggcaagttagcgcgcgtcaaatcaggatcatgcagagtcttgctttgattgctccgtcaggatccccgtttggcaaaaatggactggttgcatcaaccagtttataattctgagttaattcgaatatccttgaaaggtattcgacagatattcgaaagctatcataactcatgaactcagcttcggttacacctaaccagttgctcgcttaggtcttttggagaaacccacaacgctacatggtcttctagaatgcaatgcgattgcctttatgtgtagtagaatcgactgaatttaattgcaatgtgagcacaacattgtatctgtaaggccacaaaatggtcccagtatactgccaactgaattcatacatgagtacactattattatgttagtactagtaccaagttaaggctcaattattctctttatcttaagat

SEQ ID NO: 40182 - DNA, 433 bp, Oryza sativa
  Clone ID: PAT_MRT4530_4364C.1
caatcataacgaaatcagaatagctggcaaaaccactttaactgtgtcgagacgccagacacgattcatggtagaagttttctgaaatgggagattgtcagccaccctttgcctcatggcggagtgtagatacacaaggagattttggaacgcgactgccacctgaatagcctgtgagcccatgagaccggcaaactgagcacaagtgaccacagtccacgattggtggaaaactctagtaactcgccagggcttacccaagaaagggactagatccctgattctcctaatctcttgggaagtttggatggagcggaactagagaattttccagaataagtagctatcctcggtggctcttattgcgaagattaaggaagagtcaagatcttgagcattagcggtaggcaaacgcttagcagagatgttgact

SEQ ID NO: 40183 - DNA, 953 bp, Oryza sativa
  Clone ID: PAT_MRT4530_43650C.1
gcccggccgggatctctctcccccgcacacgctctccctcccatggcgctctccctcaccaccgccttctcccacctctccctcccctccacctccaagttccacccgctccccctcctccacctccgcttcccctcctcctcctcctcccgccgcgccgcgcgcctcgcgctcgccgcctccgccgccgaggccgccgagcctgtcgaggtggaggaggcgcccgccgaggacggggcggatgaggtggtggccgtggaggacgagctgtccggaccggcgctgcgaaagtacgtgaagcagcggcttcccgggggcttcgcggcgcagcggatcaccgccacgggccgccgcaagacggccatcgcccgcgtcgtgctccaggagggcaccggaagggtgttcatcaacttccgcgatgccaaggagtatttgcaaggaaatccaatgtggatggagtactgcaaggtacccctggtgaccctagggttcgagaacagctacgacgtcttcgtcaaagttcacgggggtggtctctcgggccaagcccaggccatttgcctcggcgtcgcccgtgcactggtgaagatcagcaccgcaaacaaagttactctgaggggagaaggtttgctgacaagagacacccgtatagttgaaaggaagaaggctggtcttaagaaggcacgcaagcgcccgcagttctcaaagcgttagagtatgcacaaccttgttgttagactcatttaaaagttttacattccacagtttgtattggcccttctctgttattttctgtgcaaattatgtgctcctcaccacagacttgtaatcttcgttctctgtaagcaattttattgaggtcacaaaaggcaattatcttgaaatcattcctgatatctgatgagaacagctgctcaactttacatcctcatatagtcacataagacaattat

SEQ ID NO: 40184 - DNA, 2054 bp, Oryza sativa
  Clone ID: PAT_MRT4530_43651C.1
actgcctctgctaagctactctgaccggccggcgccatgcggcggcgctcgtcgctcgtccacgccgtcctcctcgcggtcgcggcggtcgcgctgccgctcgccgccggccagccgtggccgagctgcggcaccggcggcacgtacgcggcgaacagcacctacgaaaccaacctcctggacctcatcagcgccctccaggggaacgcctcctcctcccccaccctctacgcctccggcgccgtcggctccggcggccgcgacgccgtctacggcgtcatgctctgccgcggcgacctgagcacctccgactgcaacgactgcggcaccagggccggccaggacgtggggcgagtctgcaaccgcaccagggacgccgccctcgtctacaaccagtgctacgtccgcgtctccgacgccgacttcctcgccgctgccaccaacaactccggcgaggtcgccctcatgagctccaccaacatcacccgcgccgccgacgtcagggcgtacgacgccgcggtggtcagcctcctgaacgccaccgtgcggtacgcggtggagaactcgacgaggatgttcgcgacggggcagcgggtggggagcgacccggggttcagcgacatctactccatggcgcagaacatctactcggcggcgcagtgcacgccggacctgtcgccggcgctgtgccggagctgcctcgaggacctcgtcgccaggtggtggaagacgttcccgcggaccacggtgggggcgaggatcgtcggcacgaggtgcagcttgaggtcggaggtatcccaggacaagttctacaccggagccccgatgctgaagctgtgggccgacggcctctcgccggcggcggcggcggcgtcgccggatgctgcgccgggcttattttccctccaaaatgcagtcaagaataattcagcaaacaaaattctggaaatcgtcttgccgatagtggcagttgcaatcgtagctgcagtttccatcctcttgtggaatatacgcaagaagagaagacgagggaaagcagagcatttcaccggatcaaccctgctatctctggcatcactgcaagtagcgacggataatttcaatgaaagcatgaaactcggcgaagggggattcggtgctgtttataagggcttcttttcagacaagacgtagcagtgaagaggctagcgaagggttcaaaccaagggttggaagaggtgaaaaacgagctagttttggtggccaaacttcatcacaagaatcttgtgcagcttgtggggttttgcctagaagagggagagaggatgctcgtctacgagtacatgcccaacaaaagtctcgacacctttctttttgatgaagagaaaaggagacagctagattggactacacgatttaggatcattgaaggcattgctcggggccttcaatatctccatcaggactcccagaaaaagatcgtacaccgagacatgaaggcgagcaacatcttgctagacgcagacatgaacccaaagattggggactttggacttgctaggctcttcggacaagaccagactcgagagattacaaaccgcatcgttgggacatttgggtacatgtctcctgagtacgtgacgcatgggcagtactccacgaaatcagatgtgttcagcttcggcattctcgtcatagagatcgtgacgggccggagaaggaacaacgggccctatttctttgagccaaacgaagatataataagcatagtatggaggcactgggcagagggaaacattaaggagatcatagatcactccttgggaagaaactaccctgaaggcgaggtgctaaaatgtgttaacattggtctcctgtgtgtccagcagaaccctatagatcgtccaacaatggccgatgtcatggttttacttaatagcgatgctactagcactctgccggcccctgtagttcatattccagtagcatctttctccgatggaagctctggttattctcaaaccgtgacacaattgtctcccaggtagcagggcctaaagcagagcttgccatcg

SEQ ID NO: 40185 - DNA, 237 bp, Oryza sativa
  Clone ID: PAT_MRT4530_43652C.1
tgtcgttaatccccatatctccgtctcaaggtcgtagggtgtccttccacacgaccggggcgacaccgaggagggaggagacgaggcacctggcacatacatcgtgagcccgtgatcacccagagctataccgagtgctggctgatgctgcagccactcgcttcacaggcgcccgaacagcatctacccttagattttacggacctaagtacgagtcgccggagccagggctgaccg

SEQ ID NO: 40186 - DNA, 735 bp, Oryza sativa
  Clone ID: PAT_MRT4530_43653C.1
atgacgacgacgaagaccggtggggttcgggaggaggggaggcgaggccgaggacgatcttgccgctgtgatgccgaaggtgatggcgacgacgtcggccggcgcaccgacgaggaacaaaagccggccagaggatgggaggtactacccgccggcgaggacaccactccagagagcttcgggcgaggagatggtgaggctggggaggaggacgacgccgcggagctgagggaggcgacggcacggccgaccgatgctcaggcgcggcagcagaggcggctggtggcggtgcagtggcggcaacgccactggacgtcgacgaggacgcacttccagcggtcaccgcgcgaaacagagggcaggctgggggagaggaggcggctgcgacgccgaggatggcgacggcacggtctaccggtgcacgggcgaggagggggaggcggctggaggtgcggccacggggagacgcgggaggaggctaaaacgagagaacggaggaagaggattccattttataggcgtggggagggagccggccacgggaggagcggggaacggcggcggaaaactcggccgacggccatggaaagcggctggggaaggcgcggccgttctggacggttgagagcacgaatcaagagggaaataaagaggaaggaaaggggattaaaagaccccaatcaattttggaatcccatgcttgaatcgcacggatttgagggaggaagaagctag

SEQ ID NO: 40187 - DNA, 252 bp, Oryza sativa
  Clone ID: PAT_MRT4530_43654C.1
atgtctttcgtgattagtctcatacctctcaccataataaatgatgctgtaattggtaataacttgttagctcctggtttggaatgatgtattcctggtttggagatagaactgtgcagccgagaatggttattcagaatggttgggcctatacaacgggtatgttgtatatcgttggattaatattgtttaattaaatactttactgttttactaaattctgaagtatttattaaatgccatttatgcaaa

SEQ ID NO: 40188 - DNA, 785 bp, Oryza sativa
  unsure (1)..(785): unsure at all n locations
  Clone ID: PAT_MRT4530_43655C.1
atcatcccacaccgcgcgcngcctccgcatccccctcacacacagcaacacncngcgcaaagcctccctcccctccctccctngcgccctcgcgcacacacgccctcacccaacacgctcacgccctcggcgcccacgcccacgcccacattccccgctcaacctcccactcacccccacccaaaccaccgcacacccacaccctcncaacgcccacgcacacactnccaccgaacacccacttcctcctctcggcctcggcgnggtttcccacgcccccccaccaacccncaccctctctcctccgcacacgcccccctcgcaacgccgctcgcaacgccacacgcccacacaccctcgctcgctctccgcacgcggcccccccacacgcgggcccctcgcaaccctcgcaaccccccacacccacgcgctcgccccaccccactctcacccangctcccgcacacacactcgcgcgcctccccacgcgccacctcgggcacgcccccctcctcctccccacacctctcgcacgccccacctcgcacacaccacgcgcacaccacacaccccccacacgcctctcaacctctgggccccaaaccccaaagcccaagccctaaacaagccccccaaccctcggctctcgcncaacgccgcgccggacgctcgcccgccaagcaaaacgtcctacatcaccccatgtgtgcattcaacctcgaccgaacaacataccacaaccccacaaattccaagtngaacactantcnttaaaaccccccccc

SEQ ID NO: 40189 - DNA, 131 bp, Oryza sativa
  Clone ID: PAT_MRT4530_43656C.1
gtctttttttagcgggctaggacacggactatgtaggggggtaaaatttacgcataggtctaataaaaaacatacagtgggacaagagacttcctgatagttgattctgtgggcctgcaatagatacttta

SEQ ID NO: 40190 - DNA, 465 bp, Oryza sativa
  Clone ID: PAT_MRT4530_43657C.1
gttagaaagcacaacaattcttatttgatagaagtttgctaatgtacagatggcttccacaatggagagaaaggtaccaaatgctgtaagatcaacacatccaccaccattacttacagggttggtggtaaaaataacaattactgaataataattgcattaatgcatccaaattacttggaatcacaatagcaggcaatcaggaatgctaatgatactatatatacatatgcaaatcctatttactcctaagcaacggagagagggccgaagcgtcatcaatcttggtgttcaggacttcttacctaaatctgggcaccagacaagaacgccaaggctcctaccaaaacacaaaacaatttggaacggcatgcatttgccagaatgcctattccaggcggtcttgacagtcttgggaacttcctgggacttggaggtaaaataccactacaattaaagacaaaa

SEQ ID NO: 40191 - DNA, 231 bp, Oryza sativa
  Clone ID: PAT_MRT4530_43658C.1
tatgaaaatcatcaaaactttagctactgaatgagatgggtgatgaaatggctcaacaatcacatggtgagccaaagacatgtgcaacagccaacagtgcaaccattgaaaaaaagggaagatattttttttctaacatgtaagaacccgaaagatgaagctttctctcactattctaatttcttgttaagatgcgattttgtgattcatttatatcctgtaggatcaaga

SEQ ID NO: 40192 - DNA, 378 bp, Oryza sativa
  Clone ID: PAT_MRT4530_43659C.1
atggtcccgatcaagagagcgccgacgcgcccgatcgtgctgctcatgcatcgatctactgctatatatagcaataatgcgtcatccgtggaccatctggtacacgccaagtctcttctggtccacgccaaagtaaagtctcttcgctcaacatatatacgtgaaccatgcatcagagccgaatgcttcttgtgggggatcgatcgatatgatcaggccggccggccggcgctaatccatcaatcacgactcatcatcaatcagttacagctgctgctgctgctgctgctgcttcgcacgtcaccctggcctctcggcctactgctacatatgagtggatcgagtaccaatcacacgcatgcatgcatcgatctgatc

SEQ ID NO: 40193 - DNA, 432 bp, Oryza sativa
  Clone ID: PAT_MRT4530_4365C.1
atgaacaacacaagacaaaatacatgggtgaaagaggacttgctggcagagggcggaggcggaggcgcagctggaggcgtcgccggcagaggcggcggaggtggagaccgctgccgctgtcgggcctcggccgcctcccctcccgccgtcggccaccaccgcgccatggctccagatccgtcgtccgccaccgcgcctcccctcgcccctgccggatctggcaaccggaccgccgccgcgcctcccctcgccacggcacagagaaagagaggagagatagagagaagaagtggaagagatagaggagaagtggagaagagggagccggccggccttatctcctcatgtgggccccgctgggagaggagacatatatatacagtggcagaagtcatctcaaacgggctgggacttaaaagccgtttgaggtga

SEQ ID NO: 40194 - DNA, 1282 bp, Oryza sativa
  Clone ID: PAT_MRT4530_43660C.1
ccggaaccgcacggggccagcgcgaaaccgacctttcccccttcttctcccggcatcccctttcttctcctccaccccccccccccaaccacctcaccgccgacgacctcatcctcgtcggcgccgtcggattcaccagcgagggaggttgcggcggcggcggagagcgcgagggaggaaagcgggggaggtgaccgccagcgatggggcagcagtcgctgatctacgcgttcgtggcgaggggcacggtggtgctcgccgagtacacggagttcaccggcaacttcaccaccatcgcggcgcagtgcctccagaagctccccgcgagcaacaacaagttcacctacaactgcgacggccacaccttcaactacctcgtcgaggacggattcacatactgtgtagttgctgttgaatcagttgggcgacaaatccccattgctttccttgacagagtcaaggaagatttcaccaaaagatatggtggtgggaaagcagctactgctgcagcaaacagcctcaaccgagaattcggatcaaaacttaaggagcacatgcagtattgtgtggaccaccctgaggaaatcagcaagcttgcaaaggtcaaagcacaagtctcagaggtcaaaggagttatgatggaaaacattgagaaggttcttgaccgtggtgagaagattgaactgcttgtcgacaagactgaaaacctgagatctcaggcacaagatttcagacagcagggtacaaaggtgcggcgaaagatgtggttacaaaacatgaagatcaagctgatcgtcctgggcatcatcatcgcgctcatcctcatcatcatcctgtccgtgtgccatggcttcaagtgcaagtgagggtgttggcttcccagtcctccacattcaccttgccccccataataccgcctattcctggcgaaaaaaaagaccatatgtttttttttgttctgttagtcatgagtcctgccccgattcttgggtgttcgagtgtccctgatgtcgcgcttgattggtgtcggatagtgactgggtttatgggtcggagtcccgtgtatttttggacgctattcatgtatagcctgtatgctaccctcttttcgctctgctatatgagtagtaggtgttactacgtttgttccccaaaaaaaaaaaaaaaaatactccacagctaaatcttagtaagaaggaacaacttgcattttcaaacctgtgatcttcataaataattttgattttggagagacttattactcgaaaaaaaaaaaaaaaaa

SEQ ID NO: 40195 - DNA, 1225 bp, Oryza sativa
  Clone ID: PAT_MRT4530_43661C.1
atggggcagcagtcgctgatctacgcgttcgtggcgaggggcacggtggtgctcgccgagtacacggagttcaccggcaacttcaccaccatcgcggcgcagtgcctccagaagctccccgcgagcaacaacaagttcacctacaactgcgacggccacaccttcaactacctcgtcgaggacggattcagctctaaccgcatcggcatactggggattcagggattagcatactgtgtagttgctgttgaatcagttgggcgacaaatccccattgctttccttgacagagtcaaggaagatttcaccaaaagatatggtggtgggaaagcagctactgctgcagcaaacagcctcaaccgagaattcggatcaaaacttaaggagcacatgcagtattgtgtggaccaccctgaggaaatcagcaagcttgcaaaggtcaaagcacaagtctcagaggtcaaaggagttatgatggaaaacattgagaaggttcttgaccgtggtgagaagattgaactgcttgtcgacaagactgaaaacctgagatctcagaactcaggaatctttatacaatggattgctatggagaaattactgatacatgttagtgtagatcgcatgagagtatggagtatggtaatgaagtaccgcattatggttccaaaggtgatctggcttactgttgatatggcacaagatttcagacagcagggtacaaaggtgcggcgaaagatgtggttacaaaacatgaagatcaagctgatcgtcctgggcatcatcatcgcgctcatcctcatcatcatcctgtccgtgtgccatggcttcaagtgcaagtgagggtgttggcttcccagtcctccacattcaccttgccccccataataccgcctattcctggcgaaaaaaaagaccatatgtttttttttgttctgttagtcatgagtcctgccccgattcttgggtgttcgagtgtccctgatgtcgcgcttgattggtgtcggatagtgactgggtttatgggtcggagtcccgtgtatttttggacgctattcatgtatagcctgtatgctaccctcttttcgctctgctatatgagtagtaggtgttactacgtttgttcccccactttatatcttctcttactccacagctaaatcttagtaagaaggaacaacttgcattttcaaacctgtgatcttcataaataattttgattttggag

SEQ ID NO: 40196 - DNA, 166 bp, Oryza sativa
  Clone ID: PAT_MRT4530_43662C.1
cagaacaatggcattatcatgaccaagcactggtatctacgggcagatgcagcatcagtaacatagctttcagtcacgtttagagattgttagatcagtcgtcaagatagaaagaacatgaactagcattactgaaagactcaacagtgaatccagcaaaccaccc

SEQ ID NO: 40197 - DNA, 183 bp, Oryza sativa
  unsure (1)..(183): unsure at all n locations
  Clone ID: PAT_MRT4530_43663C.1
ctatctatatcttgtctgacgcgtggttcaacccagggatcactgtccgttacgcgttaacaggccagctaacaatactgtgagtagaataaaagccagacatcaccatgggctgatcagactactgtgtgtantggacattctctaactcgttcggacaaaatccccgcccctggcatgact

SEQ ID NO: 40198 - DNA, 309 bp, Oryza sativa
  Clone ID: PAT_MRT4530_43664C.1
atggattggagcagggcggagaacgcgaggttcgagcaggcgctggccatgtacgaccgcgacacgccgggccggtgggagcgcgtggcggcggtggtcggcggggggaagacggcggacgacgtgaggcgccacttcgacctcctcgtcgacgactgcggcagcatcgagtccggaaactacggctaccccggcaccggcgccggcgccggccgcggcagcggcaacggcaacggcaatggcagggacaagaacaacgacggcaacacgaacaggcgccagagcagagccaacgggccgcagacatga

SEQ ID NO: 40199 - DNA, 735 bp, Oryza sativa
  Clone ID: PAT_MRT4530_43665C.1
atggccgctgcagacgccgtggcacccgacaacggcgatcacgccgtcctccgcgacgacgagcgcgggatccctcgatccctttccctcctcgccgcgctcgtggaggccgaagccctccgccacgccgccgccgccgacgccgacgccgactccgacctcatccgcgccttccgcggcggcacgacgcccatcgtccggatcggtgtgttcctggagcgcatccacaccttcatccagcgggagagcgtccgccacgtgatcgagatccaggacgcgtgctacgtgctcgccgggatctacctgttccggttcatacgcagcggcgccgcgcgggaggcggggatcctcgtcgatccttccaccgcgcaccgcctcgtcgccgtcgcgatcttcgtgggcgccaagtttggtgggcccatcgacaggctcccgacgaggtggactgtggtgttcgagaccagctcggatgcggcgatccgcgcgagggagatggccggcctcgaacggcgcttcctcattgccatcgattaccgcctgttcgtcagtgctgacgagttcgactggttctgccgtgtcctggagcgagggccgcgtccaagcgggagatgcggcggcggcggtggtggtggcaagggtggagaagatgcagttggcgttggaagagttcgatcagacgaggcaagggtggagaagatgcagccggcgttggaagagttcgatcagcggccatga

SEQ ID NO: 40200 - DNA, 1236 bp, Oryza sativa
  Clone ID: PAT_MRT4530_43666C.1
gcccgcgccctgaaaccccctaagcccctcgcgcgcgccaaaccctagcaatcttgatccgtccctttccgcgagacccttccgccgccatggccgctgcagacgccgtggcacccgacaacggcgatcacgccgtcctccgcgacgacgagcgcgggatccctcgatccctttccctcctcgccgcgctcgtggaggccgaagccctccgccacgccgccgccgccgacgccgacgccgactccgacctcatccgcgccttccgcggcggcacgacgcccatcgtccggatcggtgtgttcctggagcgcatccacaccttcatccagcgggagagcgtccgccacgtgatcgagatccaggacgcgtgctacgtgctcgccgggatctacctgttccggttcatacgcagcggcgccgcgcgggaggcggggatcctcgtcgatccttccaccgcgcaccgcctcgtcgccgtcgcgatcttcgtgggcgccaagtttggtgggcccatcgacaggctcccgacgaggtggactgtggtgttcgagaccagctcggatgcggcgatccgcgcgagggagatggccggcctcgaacggcgcttcctcattgccatcgattaccgcctgttcgtccgtgctgacgagttcgactggttctgccgtgtcctggagcgagggccacgtccaagcgggagatgcggcggcggcggtggtggcaggaagaggacggcggcggaagctgtggagggagaagcggaggacgaccaccgccgcgtccgggcctccctgccgccgccatctgtcgtcgccaactaggtccacgatttatgcatccacaggtccaattatatttacttaatgtattttcttttgctgcttcttgtctatcagttgtttgcaggtggctagggtggagaagatgcagttggcgttggaagagttcgatcagactaggcaagggtggagaagatgcagccggcgttggaagagttcgatcagcggccatcgtcggagtagagtgaaaaaaaaaaccagttttaatcgtaggatgtttagcaactgttaactcttgtcaaattctatcaatccttgtgtcttggatttccatcttattggaagtagataaagaaatgttaatgaagtccctttttctacctttctggtgtatgaaatctatatcaatctggaagttaataaagaagtctttttctgccttaaaaaaaaaaaaaaaaaa

SEQ ID NO: 40201 - DNA, 538 bp, Oryza sativa
  Clone ID: PAT_MRT4530_43667C.1
aaaccaaaaagggccccccctggtggatggggaacttttccctgttaacaaaatacaaagaagggaaaaaacatttttgtaaaaacacaaggcgaaacccccatttccaaaaaacttggagaggggggggggaaaaacacaggtttgaacaacaacaacaacccatcgggggcttgctgtatgttacacgggggaactttgggggattggggcgatggcgacccccttgagcttaaccaccgactttacgggccccttgggggggggcaaccccctaagtctggggacctcggtttgttttggggcctgctcggggatctcggagaggtcgggggagccggtcttgtcgttaaaaagggcggagctgggggacaactggttgagcccgggcagggtccttttgggccggggcccactgggcctcccggtccccctttccggagggggtcttgttcacaaaccccgtcttggtgggtggatgttgttccacgcccgcccgctcagggcgtaccggatgaagaacttgagcccctccagg

SEQ ID NO: 40202 - DNA, 444 bp, Oryza sativa
  Clone ID: PAT_MRT4530_43668C.1
atggaggcgctcgtacgggctccgcttaggcacgccgtggccgcggccagcctcttgcctgaccataacccaactgcagccgagtcgagtttccgcctgtcaaccacccgtcggatccctccccgtcactgtccctattgcgctcccatgcacctacagcacgacgacaaccggggcgcggggccacatggcgcgagcggcagtgactggcggcggcgtggaggcgagcccattggcggtgtggatctagtcgacagaggcgagctcctcgcgaagagagtgttggttgtaagggacggcgatagacttgcagatgccgtcggagcggacgtatccgaaggggacgcgaagcgggagcccgccggggaggatgcagctgggtgcagaaaaatcgcgtccagggatgaatttcagactcggcgacaaattgaggacttgaagtga

SEQ ID NO: 40203 - DNA, 352 bp, Oryza sativa
  Clone ID: PAT_MRT4530_43669C.1
gccccggacttactggccgacccacgcatccggcttatggttcatctacttctccccttcctccggaggcgattcccaaatcccatgggggagcacccatatccgtgccaatccatggattggatgcctcctccgaagcccacctggccgtgctcccctcctctgctctgggactgggccgacgccgccgtgccgggctcctcctccagcgaggtatccgccgcctccgccgccgccgctgctcatccgggaaggcggccgaaggagaagctaggcatggcggaggaaggacgaggtggtggtgtgaggcctactgctttatgagccaggtacaatttggtaggtagcttca

SEQ ID NO: 40204 - DNA, 726 bp, Oryza sativa
  unsure (1)..(726): unsure at all n locations
  Clone ID: PAT_MRT4530_4366C.1
gctgcatattgctaggcacaaattcagagagagagacaggtcgagctagaaagaatcacacatggagaacaacacatctcattactcttcttgcattagcccagcagctgagacgtcgtccatgtcagctgggagagagcagctgggcgatgcacattgcggaacttcttggcatcaccgtacaacagccaggagatgtgccaggaaccagtgatctctggcagcagcagcttctcctctggcttctcttcttcgtttgctacttcctatgacgacgcatcgttcatcacgtcggagatgatgtgttgacgacgacgatgacgatgattccttgcaggacactgcctgttcttctgcagctgcccctaagttacctagcaacttgaccaatgttgatatgaagtcaatggcaacaatggaggctaaagatatcaacatcacacagctgaacccaattatatgtatccatgccaagtattttgtcgatgccagttcacgacagccggcggctgaagtgcttcaagaaacagtcagtgttgataacaacaacgacaagtccttgtatgaatgtaatgagctgaggaagaaagggctctgcttggtccctctctccatgttgataaattacctcggatgattgattgtactgttaatgtgtactgtcagtattcagtttaattaatcgtatacaacggtagtgtntcatatatcaaaaaaaaaaaaaaa

SEQ ID NO: 40205 - DNA, 400 bp, Oryza sativa
  unsure (1)..(400): unsure at all n locations
  Clone ID: PAT_MRT4530_43670C.1
caacccaccacttcccccaccaatcgcttctcccccgatgccgtcgtcgacgatccggagcatctccatcacagcatccgacgacgacgccgccgcggngnggngcgccgtcggggccccccggcgggcccgagccgcccggcggaaggcggcgcgcggcctggggcagcgggccgtgcggctggtggcgcggtggtggcccgtcctcctgctcctcccggccgtcgcgctgctcctcttcgaggcctcgcgtcttcgggcgcctcccccgangggccatcccgcacgtattcagctccancctcggccgggtngaaccgacaacccgctngtcatggggttcgcaaattgctttaanttccttaatccagaagtntaaaagatttgtanttcttgaggt

SEQ ID NO: 40206 - DNA, 108 bp, Oryza sativa
  Clone ID: PAT_MRT4530_43671C.1
acagacaggcaccaagcagtggcaactggcaaggccactggttcactgggcctggacgcaggcaggatggcaggagacaggagtcccagcagccacacgccacagtga

SEQ ID NO: 40207 - DNA, 1810 bp, Oryza sativa
  Clone ID: PAT_MRT4530_43672C.1
agctaggatcgatcgaacaccatggcgaagaagaagacgtcgtcgtccatggcgagatcgcagctggcggcgctgctcatctccctgtgcttcctctccctcgcgtcgaacgccgttgggtggagcaggagaggggagcgggaggaggaggacgaacggcggcgccacggcggcgagggcgggaggccgtaccacttaggggaggagagcttccggcactggacgaggacgcggcacgggcggttcagcgtgctggagaggttccccgacgagcaggtggtgggcgccgccgtcggggggtaccgcgtcgccgtgctggaggcggcgccgcgcgcgttcctgcagcccagccactacgacgccgacgaggtgttctacgtcaaggagggcgagggcgtgatcgtgctgctgcggtgaggggaggaggggagtcgttctgcgtgagggagggcgacgccatggtcatccccgccggcgccatcgtctactccgccaacacacacagctccaagtggttccgcgtcgtcatgctgctcaaccccgtcttccactcccggccacttcgaggaatacttccccgtcggcggcgaccggccggagtcgttcttcagcgcgtttagcgacgacgttctgcaggcggcgttcaacactcgccgggaagaattggagaaggtgttcgagaggcagcgggagggcggcgagatcacgacggcgccggaggagcagatacgggagctgagcaagtcgtgctcccgcggcggcggcggcggctcgggttctgagtgggaaatcaagccgtccagcctcaccggcaagagtccgtacttctccaacaaccacggcaagctgttcgagctcaccggcgacgagtgccgccacctcaagaagctcgacctgcagatcggcctcgccaacatcacccgcggctcgatgattgcgccgaactacaacacccgcgccaccaagctcgccgtcgtcctgcagggcagcggctactttgagatggcgtgcccacacgtgtccggcggcggctcgtcggagcgccgggagcgcgagcgcgagcacgggaggaggagggaggaggaacagggagaggaggagcacggcgagcgcggggagaaggcgaggaggtaccacaaggtgagggcgcaggttcgggaggagtcggtgatcgtgatccccgcgtcgcacccggcgacgatcgtcgccagcgagggcgagagcctcgccgtcgtctgcttcttcgtcggcgccaaccacgacgagaaggtgttcctcgccggcaggaacagcccgctgaggcagctcgacgacccggccaagaagctcgtgttcggcggctccgcggcgagggaagcggaccgcgtgctcgccgcgcagccggagcagatcttgctgcgcggcccgcacggccgcggcagcgtctccgacatgtaacgcgacgcgacgacgtcccctgcacccggcgcgcgtacgccgagcagctgtgtgatcgagaggaataagttggtacacgtaggccacgcgtcgtgtacagtacaaaatacggtaccgtactgcgtgtacgtgtagccaaggggacgtacgctttatgtatatatcgtatctatgtattaacgtatgcgtattagctgaggtatgtatcgatggaactgtatgaacccaagtacggagtgctatattactaatgcagagtacgttctgctactaattaacctgcgtcgtttgggcaagtttgatttgtaattaaattactcataagcggagtcgtacataatcgcgaaccaaaaaaaaaaaaaaaaaaaaccac

SEQ ID NO: 40208 - DNA, 419 bp, Oryza sativa
  Clone ID: PAT_MRT4530_43673C.1
aggagcaaatccgggccgccgatggaggcagccggccgcgctgggacgccgcaaaaaccgcagccactcgaaattcccagcgccgctccccgccacaagtccgcgcctcctcgacgaccgcccgctcgaaacaatctcccgctgcgctgcggcggcgcttcgagggcagggcggcatggcggcggcggagcgcccgagcaggtccgacgtcgacttcgccgacgtcttcggcggcccgccccgccgctcgtccgggcacgacagcctgaggcgctcgtcgatggactcgtcgttcggctcagcgacgaaggggaggagcggggcagaggagaggcccgtgttcggggaccgcacgagctccgaccggaggaggcagctcgggcaggaattctacaaggacatattcgccgggagcgagt

SEQ ID NO: 40209 - DNA, 427 bp, Oryza sativa
  Clone ID: PAT_MRT4530_43674C.1
aattaaaaaggggggttttttttaaattttttaaaaaaaaagtttcaacggcccccccggaaaaggcctatctttttttttaaaattggaaccttttttcttttaaaatttagccccaaacccccccaaggggggaaatgccccccggaaaaagggagtttttggaataattccccctttggggggggaagtttaaggcccaaaaagctgggccttgaccttgagtctaataaaaaaaaaccggccccgggggtccccccggaatttccgaaccgggcccgggaggggacccatttttccttttagggaggggttttaaagctgggggtatttaggggattagggggtcccggggaaaaaatgttttcccctaaaaattccacaaaaatttcgagcgggaaattttaagggttaaccccggggggcc

SEQ ID NO: 40210 - DNA, 510 bp, Oryza sativa
  Clone ID: PAT_MRT4530_43675C.1
cgcacgaggggatcagatgataacatcgtaaaaagtataaatgcatgctaagtttgccacttaagtacatttttctgaataatggggaatcaatcattcattaacttttacatcccacctggaaagcagtagcattgagaaatctatgtgctctgatgctcaggctaatgggttgaaaactgctgaattccatattctgatgacactgacatggagtgatcatatagcttcggcctagaagtaactgctaagattctcagagcgtggcatctgaaacttaatgtacactttgttccagggaagcccgggacctccacagggacttgaattagcagaagcaactgtttgctatactcaatttgacatgtattttccctaattgatgctgcttggtctttaattaaccattttcgttgtgtgcatgcagaacagaacactggctgctgcagatgggctgcactgcatcatatagactgtccaatgaccacacatgggtgtgtcccaaagggg

SEQ ID NO: 40211 - DNA, 505 bp, Oryza sativa
  unsure (1)..(505): unsure at all n locations
  Clone ID: PAT_MRT4530_43676C.1
acgagaaaaagctacctctagttcgtancagnaacanactccagctcgcacactccggcagctagcnaanantggcggcgancgggtggtggtncgggctgtccctgtgcgccnagcccaaacangtggcgagcganancgtccacggtgcgcaactcgcnctgcngcggctcaccgcggncaancgctncngangcggcggggacccccttgcgtcnacgtncaagccngcaagccatgcaactncggnnaannaacatnctgaagccccggctgccnggaaggtcccggcttttgaagccnttcancatggcaanccnancaactccttcncccactccgtcatcaacatggtcngaatgctcntaagacttgggcanctgtcnactccntacgcnctggaaaacagcgggtgggcgtccgtgttcctcctcctccggctccgcgtnatntncgcnttcaccgcgcacctcntcngccaatnccttgacaaaaacccggctcc

SEQ ID NO: 40212 - DNA, 172 bp, Oryza sativa
  Clone ID: PAT_MRT4530_43677C.1
gtattcgatgtagtccatatactgtcgttgttaatctagcgaaaattacaacatttcccttgagccattgttctgtccaagcaggcacaccgtacacctgcctcgcacggttggacgcttgcactcttctgtcacctttgcacccatccacccagctgcaatttgaattctt

SEQ ID NO: 40213 - DNA, 729 bp, Oryza sativa
  Clone ID: PAT_MRT4530_43678C.1
atggggaactggaaagacgagggagtaagctgttctgagattcgtgtgggacaggtgtcacataaaggagcaagtctttccgaggaggcaccagcttcagaggtgcacatacaaccagcggatcagagccaccgtgcctgcaacatctgcgagctacctgtcaccggcgtcggctaccgctgcaaccaccactgcagcgacttcgccatccacgaggcttgcgccgaccgcttcgcccgggacacgatcgacggcttcttcgcgcacccgcggcacccgctaaccgcggccaccgcctcggcggcgaaccccgggtggtgcgacctgtgccagggaccgatccagcccgggcgcctcgtgtaccgctgcgcggagtgcgcgttcgacgtgcacccgctgtgcacgctgctgccgatgaccatccacccggccgcgcgccggcgccgggtgccccggaggccacgtcctcaacttggtcccggcgcgcggggagtgcgcggcgtgctgcctggactgctccatctggcattaccggtgcggcctatgcttgttcatgctccacatcggctgcgtttcgccggccggcgccggcggtgctccagctggtacgaggggttggcctgccaccggcggcggcggcggcggctggggcggcagcggtggcagtcccatcgtgaggtttctgatcatgtttgcccggcaactggcggtgaatttgattgtcaatga

SEQ ID NO: 40214 - DNA, 869 bp, Oryza sativa
  Clone ID: PAT_MRT4530_43679C.1
ttaaataaacatcattggcagtatcttatatatcatatgagaattacatgaagatatatatatttttgtcgtaacacaacacgatgtttgcagtaatgtacacccctccaggagtcatctcttcttatacgtgcttcttgagatgaatgctccatgaaaaccatagggtactctgtgtttcaatactatcttagcaactggtccattctcaaatctttgtgcatcgatgatatgtgcctgtgaattgttgatttcctcgtcatgtacaaaagagattatccatccgtcatcctcatttgctccattgaccttcggaacaaaagttgctcctgagcaaaatttgtttctaccaagatgatggtactctacatttattagatcttgacagggcttaattttgtcttcaagatatagttttgcaaaacctccaaattttggtcgcactattccacaaccacctgccaagctcccttgggaatccaccacttgtgcatatgcatacttgtgattcaagccaacatatttgtcattgatgactgggaattccatatcaatacctgctccagttaagtatttttctataacagacatgcttttcatgtttaacctccactcgtacaagcgagaaaaatattcctcattgagtccttggttagctggttcttcatcaacagagtgctcaagtactgtaggacccataagaatggaacctggcactcgaaatccccttataacaacctttcagtaatcccaatttcatgtgaaaatgtacatctctgttgcttgaggtcaaccttatgtttaagtttctttccatcctctgagataactccaacagtaaggaagcctgcagcccggggatccactag

SEQ ID NO: 40215 - DNA, 435 bp, Oryza sativa
  Clone ID: PAT_MRT4530_4367C.1
atggctgggaatggtggcccggtaggaggggaggcgggggcggtggcagcaggcggtggcgggaggggaggcgacggtgacggtggtgcctctcctccgctagatctggccgggagcggcaacccgacaggaggggagcgggggcggcggcagtggtgggagggaaggcaacggctggcgggaggggactcggcgactcatgtgttcttatctggtggaggggagtgcgccgccgccgggttgtcggagcaccgccgcctcccctcacaccgccgacccgcagccgccctatccccttccgccgctgggccaccgccgccacctcccgtcccgccagatttggcggaggggagggcgctgccgccgggccgtcggaccaccgccacctcccctcatgtcgtcgacccgcagccgccctatccccttccgccatag

SEQ ID NO: 40216 - DNA, 519 bp, Oryza sativa
  Clone ID: PAT_MRT4530_43680C.1
atggcttccaagcaaatgctcgctgtcgccgccgccgccgtcgccctcgccgtgctcctcccggcgcgcggcgccgccgccacggagcacatggtgggcgacggcaatggctggatcctcgggttcgactacgccgcatgggccgccaccaagcagtttagggtcggcgacacgctagtgttcaggtacaagggcaccaaccacacggtggtggaggtgggcggcgcggacttcaaggcgtgcaacaagacggcgagcgcgaacgagtggagctccggcgaggatcgcgtcgcgctcgacaaggagggcaggcggtggttcttctgcggcgtcggcgaccactgcgccaagaacatgaagctcaagatcaccgtcatcgccgccggcgcgcccgcccccggggcttcggaggcgccgccgccgccgtccagtgccgccggcaaggcgcgcgcgcgcgtcgcgcacgcggcggcggcggcggcggtgaccgcggcggccgcggccatgctcgcgctctag

SEQ ID NO: 40217 - DNA, 260 bp, Oryza sativa
  Clone ID: PAT_MRT4530_43681C.1
ttttgtgccgttcacaccaccaccgtctcgtcggctggtcggcggcgtcttctccgcgcgagggtccccccccaaaccctagccgccgccattgccacgcgcgcgccccccaccccacgaatggaaggaggcggaggcggaggcggaggcggtggcggaggtggaggtggaggaggcggaagcagagcaccttacgccacgcgcacggaggaggacgccttgcaagacctccgaagccggcgagcggacatgatcaaggc

SEQ ID NO: 40218 - DNA, 518 bp, Oryza sativa
  unsure (1)..(518): unsure at all n locations
  Clone ID: PAT_MRT4530_43682C.1
gcccgaggtggcggcgagggacgccgtgatcgggtggttccgcggcgagttcgcggcggcgaacgcggtgatcgacgcgctgtgcggccacctcgcgcagatcggcggggacgccgagtacgaggccgtgttcgccgcgctccaccgacgacgtctcaactggttccccgtcctgcacatgcagaagttctactccgtcgccgacgttgccgccgagctccgccgcgtcgtggacgcccgcgcctccgccgcctactccgaggaggaggcggcgtccacggtgatccacgagcccatggacgagctcgtcgccatggccgccgagccggagccggagcaggagcaggagcccgaccacgaccatgtacctcaggatccggcaccggagccggagcctgacggcgccgtcaacaaccccgtgtcccccaccgncgncgaggtgctggaccacgaggcggacggcgaagattcctccggagattcgtcggagcgcaaggcacccttcacggaagatgacg

SEQ ID NO: 40219 - DNA, 2202 bp, Oryza sativa
  Clone ID: PAT_MRT4530_43683C.1
atggagagttggattccgagtgttgatgctgggatgaagaagcttcaggaggaagtcggggagattgccgggcgcttggcggtgctggagtccaagcctgcaggaagtccggtggtagcgacggcaacgcccattgggcacggctcgcatcaactacaccagggtatggcaactggagcctctcaaggtccagagcatgccctaggcaagggtaagcgccaattcccaaattctccaattacatttgagttgggagaaagtttagagaaatttgggggagggtctcagggctctcaagcgagtggtcgatctgttggaccgaggttacccaagactgatttccctaggtttagtggggagaatccaaaattgtggaagaaaaatgctgaaaaatattttgggatgtacaatgtggcatatgagacctgggcgcagtttgcaacgttgcatttcactggaaatgcagcgctctggttgcaaacctatgaagaattgcatagtgtggagagctgggcagagctatgtgtagcagtgaatagcaagtttggtagagatccatatcagcaccacttagaggagttggaaaacttgaagcaaactggtagtgtagaggaatgtcataataagtttgaggagttgatgcatttagtgttggtgtacaataggggttatgatgaaaccttctttgttactaggtttgtaggtggtttgaaagctgacattaagcttgctattaagttgcataaacctagaacagttgatgctgctctttctctggctcaaacacaggaggaattgcttgaagaagctgaagatgggaagcaaactgaggagaaatctaaatgggaagatagatttgaatccctcaaggcagctagaaaggctagagaagaattacttgaggtgttccaggtgcaggaagaagagtcagactctaatcaggatgaagaggatacaagtgaggaggagctggtcctatttgaatgtgttgtgcatggtaccatgggaagaaaaacaatcaggctgcaagctcacaccatagctgatgggggaagaatgcagtgcaacagttgtgtgaagggggttgagtggtggtgtcaagggagcagttttgttactgatctcaaggtgctggcccttggtggatatgatataattctgggaatggagtggttagagcaattcagtcctatgtggatagactggaagagaaagaagcgtaggttcaatctccaggataaaagggttaccctgacaggagttaaggatagggtggaacactacaagttggtgaatgcaaaacaactttctgggttggttaaatcaggagctgagcccaccagcttaccaccacacagggactttgatcacaatatacctttgattcctggtgcaagaccagtaaataagaaaccatacaggggattgaatgacattactgaaaagaataaatacccaatgccagttgtggatgagcttctagatgagttggctggagcaaaatggtttaccaagttagatctgagatcaggataccatcaaatccgtcagacattggaggaccatgtgagtcatctcagggaggtatttcaattactgcaacagcatgagttgtatgtaaaggcaagcaagtgttcatttgctaagtctcatcttgaataccttgggcacataattggagtggcaggggtgtctactgaccttggtttgctgcaacctttgccggtgcccacagaagcttggtcaactgtcagtttagattttgttgaaggcttaccaaagtcaggtggttttgatacaatcatggttgtggtagataaattctccaagtttgccaagtttgtgcccttgactcacccctttacagctcttactgtggctcaagccttcatcaaacatatctatgacgtttttgggatgccacaactccttctaagtggtcccaatggttggctcaagctcaacattgttgcttatcgtcttgacttaccggctggctctcatgttcatccagtggttcatgtgtctcttctgaagaaggcagtcaaaccagacattcagggcgtcagggctgatattgtctgccgtctcctcttcttggtgtcccctgtccagctgagcggcaagaacaacaatggcggtggcaataatggccccaccgcctggctcacttcctgccttgcggcctctctcctagcatga

SEQ ID NO: 40220 - DNA, 2442 bp, Oryza sativa
  Clone ID: PAT_MRT4530_43684C.1
atggagagttggattccgagtgttgatgctgggatgaagaagcttcaggaggaagtcggggagattgccgggcgcttggcggtgctggagtccaagcctgcaggaagtccggtggtagcgacggcaacgcccattgggcacggctcgcatcaactacaccagggtatggcaactggagcctctcaaggtccagagcatgccctaggcaagggtaagcgccaattcccaaattctccaattacatttgagttgggagaaagtttagagaaatttgggggagggtctcagggctctcaagcgagtggtcgatctgttggaccgaggttacccaagactgatttccctaggtttagtggggagaatccaaaattgtggaagaaaaatgctgaaaaatattttgggatgtacaatgtggcatatgagacctgggcgcagtttgcaacgttgcatttcactggaaatgcagcgctctggttgcaaacctatgaagaattgcatagtgtggagagctgggcagagctatgtgtagcagtgaatagcaagtttggtagagatccatatcagcaccacttagaggagttggaaaacttgaagcaaactggtagtgtagaggaatgtcataataagtttgaggagttgatgcatttagtgttggtgtacaataggggttatgatgaaaccttctttgttactaggtttgtaggtggtttgaaagctgacattaagcttgctattaagttgcataaacctagaacagttgatgctgctctttctctggctcaaacacaggaggaattgcttgaagaagctgctcacaccatagctgatgggggaagaatgcagtgcaacagttgtgtgaagggggttgagtggtggtgtcaagggagcagttttgttactgatctcaaggtgctggcccttggtggatatgatataattctgggaatggagtggttagagcaattcagtcctatgtggatagactggaagagaaagaagcgtaggttcaatctccaggataaaagggttaccctgacaggagttaaggatagggtggaacactacaagttggtgaatgcaaaacaactttctgggttggttaaatcaggagctgtatcacggatggttcagttgtgtgttgtagagaaagatgcagcagaatcagatagtgtaccccctcaggtgacagaagttttaactgagtttgtagcaaggtttcaggagcccaccagcttaccaccacacagggactttgatcacaatatacctttgattcctggtgcaagaccagtaaataagaaaccatacaggggattgaatgacattactgaaaagaataaatacccaatgccagttgtggatgagcttctagatgagttggctggagcaaaatggtttaccaagttagatctgagatcaggataccatcaaatccggttaactgaatgtgatgaggcaaaaagagcttttagaactcaccatgggcactatgagttcagagtgatgccttttggtctgacaaatgccccagcaacctttcagggtttaatgaacacaatctttgctcatttgatcagaaaatgtgtactggtttttgtggatgatattctgatttacagtcagacattggaggaccatgtgagtcatctcagggaggtatttcaattactgcaacagcatgagttgtatgtaaaggcaagcaagtgttcatttgctaagtctcatcttgaataccttgggcacataattggagtggcaggggtgtctactgaccttggtaaggtaaaggctgtgcaagactggccagtgcccaaaaatttgagacaactaaggggattcttagggttggttggctattataggaaatttatccaagggtatggattgatgaccaatcccttaactaagtttctcaaaaaagatgtcaagtggcggccatatctgcagcatgaagagtttatcattcaaactgaccatcgtagtctggtctacttaggggagcaacaacttaccacctctattcaacacaaagcttttgttaagctgatgggattacagtacaaaatccagtataagaaaggggtagaaaacattgtggctgatgctttgtcaaggcaaaaggttgatgatgcattgggggccatttcaagtggtcagcctcggtggatggaaatagtgatcgatggttatgctaaaaatgctaaagctcaaaggttgctgacttctttaagtctgaatccaggaggagaaccagggtttcagttaactgatgggatattgaggtggaaaggcaaggtctggttggggcatcatatagaagctcaacaagtagtgttattggccttacacaacagtggtgttggtggacattctggagttaccggcacttatcagagggtgaaaaatttgttctattggccaggaatgaagaaggacatctaa

SEQ ID NO: 40221 - DNA, 690 bp, Oryza sativa
  Clone ID: PAT_MRT4530_43685C.1
atgtggccatcggccccacctaagaaaatcatattctcagacaacttctcaatttttgcaggccctacatccacccgcttgcgaaaatattcatcgggaaaaaacaaatccacccccgctactcccaccagtcaccaccatcgcccctccgccaagtctgggagaggaggagagccgcaccgcacactgctacctgagtggaaggccgcgccgccgctgtcctccggtcggatctggaagggagggagggaagggagaggccgcgccgcctcggccactgccgacgcccttccccctccgccagctgaggctactaccgctgccctcctctcccctccggtaggatctaggaggagggaggggaggggtcgcgctgcctccactgctaccagcctcccctcttcgccggatctgggagggagggagggaggggatgggtcgcgccgcctccaccgctactggcctcccctcttcactagatctgggagggagggagggaggcctttgccgttgccagtgccctccctccgccgaatctgggagggaggccgtgccgcctccaccgctgccagcgcccttccccctcggtcggatttgggagggagggatggaggggagcagtcgcgctgccgctgccctcccctgcggttaggggtggaaacgagccgagccaagcctggctcaacttag

SEQ ID NO: 40222 - DNA, 1317 bp, Oryza sativa
  Clone ID: PAT_MRT4530_43686C.1
atggcgggcggcatgagcgatggatccggtgccgcgacgacagcgggcggcgtgggcgatggatccgacgccggcggtggaaacagtaactgtgtcgatgatataaagggaggttaccgttgcaagtgctcccatggatacgaaggcaacccatacattaaagatggatgcaaagatatcaatgagtgccttgacaacgctacttacccatgcatgggaatatgcaagaatacgatagggagtttcgattgctcatgctacccaggaagttatatgaagaatggattctgcctgcctaatcaaaagtccacttttcctgctaggcatgtaataggtgcaagtgttgggttcgtcatcctagtgattgccataacttttgcatgctatgtccaacagagaagaaaactacaacatataaaaaacaattattttcaacagcatggtggtctgatactatttgaagagatgaaatctcaacaaggtcatgcattcaaaatcttctccgaagaagaattgcaacaagcgacaaagaaatttaatgaacaagaaattctaggccaaggaggcaatggaattgtttacaaggggcttctcaagagcaactctgaagtagctgtcaaaaaatgcatgacaattgacgagcaaaagaagaaagagtttggtcccatgcttgtgtacgagttcatcccgaacggtacactcttccatctcatccatgaaaaccatggtaatcacatctctctaatcactcgccttcggattgcccatgagtctgctgaggcgcttgcctacctccactcttgtgcttcaccaccaatcctacatggtgatgtcaagtcatccaacatcctccttgacaacaacttctcagcgaaagtctcagacttcggtgcttctatcttggctccaacggatgagatgcagtttgttacgctagtccaaggaacttgtgggtatcttgacccagagtacatgcaaacatgccaattaacagataagagtgatgagaacaagctcgaggatatgttgaatgatcaaattaagaataacgagaatatggagtttctggaagaaatggcagagttagcaagaaaatgcttagacatgtcttccataaataggccatcaatgaaggaaattggagacgaacttggtaggctaaggaaggtcatggaacaccaatgcgcaagacagaacccagaagagatggagagctttcttggggattcatcttatgtgatcaactcaactgttgagagcacaaaaagtttcagcattgagaagaacgctatgaagcgtctcaaatcagggcgctaa

SEQ ID NO: 40223 - DNA, 142 bp, Oryza sativa
  unsure (1)..(142): unsure at all n locations
  Clone ID: PAT_MRT4530_43687C.1
attacgcggtgacttttctccaacgtttaaacacgcgtccccatcaacggcngtggcaccacttcgctcaaacgaaacgggcttgttcctccgcgtcgctgacgggggatcctctagagtcgacgtgcgggcntgtgacagg

SEQ ID NO: 40224 - DNA, 2121 bp, Oryza sativa
  Clone ID: PAT_MRT4530_43688C.1
tgctgctctgccattattccctctctgctccggttgcagcccttgacgcactagcgccagcggttgtcgggaagccgggctgccagacgaggtgcgacgtcgtggatatcccattcccgttcggcatcggtgatgatcggtgtgcacttgaggcgcgtcatacgcgctacccgtttaagctcgactgcatgtccgttggcggcaccagcaagcctttcttcaggggtatggaggtgaccaagatctccctggcagacggcaaggcctggatgaagatgaacatatcccagaactgttacaaccagtcaacgggaaccatggagcgcaacagagaacctgtggatttcactggtacacctttctggatatccgacaaggataacaagatctttgtgatcgggtgccgaacgttttcatatatgcagatcaataatgttgtaacaggttgtgtatcaaaatgcgaacgtgcccttaaggatggtgaatgctctggtgatggttgctgccaagttgatttcccgacaaagggatggcgttatagtactactttcgatagtgaaaactataataccagtctaatatggaggaacaacccgtgcagctatatggcagtgatagagaccacagctttcaaattccactatattctatgacacatataatggggcagctcccgttgtcctagactggatcatatatcaatggatgtatgtgatattgctataaaaaacaccacttcatatgcgtgtattagtggaaacagtaactgtgtcgatgatataaagggaggttaccgttgcaagtgctcccatggatacgaaggcaacccatacattaaagatggatgcaaagatatcaatgagtgccttgacaacgctacttacccatgcatgggaatatgcaagaatacgatagggagtttcgattgctcatgctacccaggaagttatatgaagaaaaaaaaaaatcataactctagtttacttttgaattgtgcaggtgcaagtgttgggttcgtcatcctagtgattgccataacttttgcatgctatgtccaacagagaagaaaactacaacatataaaaaacaattattttcaacagcatggtggtctgatactatttgaagagatgaaatctcaacaaggtcatgcattcaaaatcttctccgaagaagaattgcaacaagcgacaaagaaatttaatgaacaagaaattctaggccaaggaggcaatggaattgtttacaaggggcttctcaagagcaactctgaagtagctgtcaaaaaatgcatgacaattgacgagcaaaagaagaaagagtttggtaaagaaatgctaatcctatcccagaccaaccacaaaaacattgttaaactattaggttgttgcctcgaagtggaggtcccatgcttgtgtacgagttcatcccgaacggtacactcttccatctcatccatgaaaaccatggtaatcacatctctctaatcactcgccttcggattgcccatgagtctgctgaggcgcttgcctacctccactcttgtgcttcaccaccaatcctacatggtgatgtcaagtcatccaacatcctccttgacaacaacttctcagcgaaagtctcagacttcggtgcttctatcttggctccaacggatgagatgcagtttgttacgctagtccaaggaacttgtgggtatcttgacccagagtacatgcaaacatgccaattaacagataagagtgatgtatagcttcggagttgttcttctcgaacttctcacacgcaagaaggcatgcaaccttgatgcaccagaacatgagaaagtcttgtcgatgatgtttctctctgcgatgaaggagaacaagctcgaggatatgttgaatgatcaaattaagaataacgagaatatggagtttctggaagaaatggcagagttagcaagaaaatgcttagacatgtcttccataaataggccatcaatgaaggaaattggagacgaacttggtaggctaaggaaggtcatggaacaccaatgcgcaagacagaacccagaagagatggagagctttcttggggattcatcttatgtgatcaactcaactgttgagagcacaaaaa

SEQ ID NO: 40225 - DNA, 457 bp, Oryza sativa
  unsure (1)..(457): unsure at all n locations
  Clone ID: PAT_MRT4530_43689C.1
cnacctgaaaataacttacactaataaatataaaaaagcattatcatttgcagtgtaagatatcaaacttagtatgaaatgtaatcctcagcacgagacgtagatgtgtacattgtactaacacaatcagatgtagacgggcacattacagtacgactgtgtacatataccatcctaatcctcaacatgagaaatacgtgtgtatatatagtactatgtatagttctataaatcctcctactacttgtcacgaggaaatcgggatcagaggatccataacatgtctagtgccttgacaacgctaagaactccaacaaaccccgctagcacagatccaacatgatataaagggcattaagtggaaatcctntatgtttaactttgaaattaactattttttgagaggatttacaacatgtggttgaataaattgggaattgttataatgaaagggttc

SEQ ID NO: 40226 - DNA, 320 bp, Oryza sativa
  unsure (1)..(320): unsure at all n locations
  Clone ID: PAT_MRT4530_4368C.1
cccaactccctctccagtctccactgtcacactccaccctcttgcctccccgcgtcggcgaccaccaccaccatggccgccgcctctcctcctccgctcgcgctcctcaccctcaccctctccctcaccnntctccctcgcctccgccggcctcgtcctggacgacggctacaccgtcaccaccgccgccgacctcaaccacccgggcgcncccgcngcgccccaaccctacgcgctccttccgcgnccggcgcnggggacctcgtcctgctcgantccgcgggctncggctctaaanctcgcccttccgttttcggggg

SEQ ID NO: 40227 - DNA, 649 bp, Oryza sativa
  Clone ID: PAT_MRT4530_43690C.1
gacaagcattgccaccttccccccctcgccgtcgaaatggaagagaaaaccgacgagctcgccgttcacaattgtacgtggtcaattgttgttatgcttacattagtagagttcttgattgatgatagctaccggcgtaaacaagagtaaagtgccatatatatatcatcacttagttgattttgcattggttggtgtctgttcttctgcgtcgtcgtcatcgtcatcaactggcctgaattttcgcggtgatggcgaaatgggttggaggtaggtgatgtggggggagtttggctttgcaaggagggagcaatctgagctttaggtttatggctaattgcgataattgggttgtgaataataagctgtttgagagagacaggtttaaggtgatgaattgaggaggatttgagtgttgcagtgttattatttcgggttgtatagagtgaagcttttgatggtttcttcttcagtgaaagcttcagctgagagccgggggatatgtttttagatcaagaaatctttcctaattaaattacttttgtatcacacctacttactgttattattcgattattattattatgataaaaaaaaaaaaaacttggatttaaactcgagactagtctctctctccctcgtgccgaat

SEQ ID NO: 40228 - DNA, 1996 bp, Oryza sativa
  Clone ID: PAT_MRT4530_43691C.1
cccgcgcgtccggaggacccccaccccgccttgtcgcgtgcgacgccggagcgcggagtccttttccgcccgccccggcgccatggccgccgccgcggtggtccacctctccgtgcacggccgcctccgccgctcgccggagctccacgcccggccataccaccgcccgtcgctgctccggtgccgcgcgttcaagcaggaggccgataacggcggggaggaggcttcgtcgtcgccgccgccgccgacgacggccgaggcgcggaggcgcaggaagggcccgctgtacaagctgaaggcggcgattcaggggctcgccgggtcgcggtcggcggccgcggaggcgtacgggggcgagtaccagcgcgccgtcgagaaggccgaggagatcttcttctcggttgctacgcaagtaggccgatatgttatcactatgatgagcagcggtgttgtacttggagttggatttcagttatcaggcggagacagccaaatgaatacactaatttggtatagttggctcgggggagtaattattggcacgatgatcgtcgagaaacagttgcaaggacattggttccgaggatgcgagttgtgaaaggaagtggaaaggcgataaactacttgacaccaccaaggatcttgcttgccttggttactgcatgggttcgccgaggccgatggtttgatgaagagggaagagcagtatatgcagcagaggctgatagaatccgtaattgggctgaaagtcgagcacgcttctctttcacagatgccatggagatgtacacagaaaacacatgggtttctgtgttctcgctctctgtcgtctgcgcattcataattctttccagctcaggtggacctcttccaggcacatgatcccaggagttgccaaactagatggctacacacaccatttttcttcagtacggggattctattatgtactgatatatgacacacgaaacttatgaaggggggaaattgaacccagaaagcttactgcgtacatacgcccaacggtgagaagcatcagctgccactcaccatttaaggtcaagctaaccatgtgctcagtaaaaaatgggtaaatagcgcttctcctggaatggtccttacggacctccttttgagcggttcttctctgagaaataaacagatgttcaatttaatatgtgagcttccagaaacagttgcaaggacattggttccgaggatgcgagttgtgaaaggaagtggaaaggcgataaactacttgacaccaccaaggatcttgcttgccttggttactgcatgggttcgccgaggccgatggtttgatgaagagggaagagcagtatatgcagcagaggctgatagaatccgtaattgggctgaaagtcgagcacgcttctctttcacagatgccatggagatgtacacagaaaacacatgggtttctgtgttctcgctctctgtcgtctgcgcattcataattctttccagctcagttgcacggttgcaccgtatgttgcaaccaccaatagaactgaaaccttgcagagtgatgattcttcttgatggggaagcaggacgttcacttcacctcgtacaaacaatgtacggatttctgtgtgcgagccatttcttcaatattgccatcatcatgtacatacatgccactgccagaccagtacagattattccaatgtggcgtggtgttcatcctgaacagtggctgatgtgccttgaggtcaatgatttttttggtttcttgacgcgactagacggatggagccatggaggaattcatgtagtcatgtattttatctcacacgacaagtgtcgccgcgaaaaaggacacagcagcaggagtaaccctcctttcactgacgcgtgggacccacctcgcagtaacgccaccctcacccaagtcaccgtcgcgcgtaacgcccccgccataatcacgccatgggccccaggaggaacgggttgcttcgccgaaaagcgcggg

SEQ ID NO: 40229 - DNA, 509 bp, Oryza sativa
  unsure (1)..(509): unsure at all n locations
  Clone ID: PAT_MRT4530_43692C.1
aggacaccagagacaatattttataatatccggatcaaaagaaatattcggatcaaaagaggcaagaatttttttgaaatggcaaagattgcccctggctccatcttcctccacctgaaatcacacacacacacaaaaatagcagggagcagctgccggcgaggttgtcgacggcaagggagggagcgcgaggccggcggcgtggagcgcgagcaggaggcggccactgtcgtcgccgtggtttgagccgccgtcgccgcagtccaaagcgtcgatgccttgccgtgccgttcctccttcgccgcccaaccataccacagccaccacgtgtgagcgccgccgtcgtcaaccaatccatggacagagctccacttttctccacacaaaaccgagctctctctttttntctttctcttctcatgccgggtaaagccagctgccggccgatctccttccttggagccccgccggccataacctttcaccattagccttgcctcgccgaggag

SEQ ID NO: 40230 - DNA, 1253 bp, Oryza sativa
  unsure (1)..(1253): unsure at all n locations
  Clone ID: PAT_MRT4530_43693C.1
ttttnccnnnnnggnnggggggctttngggcnngngcccccccaantttttttcccgggggaaaaaaaccgggaaaagggggcctttgggttttttnaaaccttnggggtncccccaattnggggggtttttncccnaaaaaaaaaaatttttnttncctgnntttttngggttttttnaaacccttncccccccccccctttntttggggaaagggcccctttnaaaaaagggncccttttttggggaaaattttttggggttttccccccccctttctttntttccccttttttggggnccngggttttttatttccccgggngggaaaaggnaaaaaaagggtttttttnaaatttcccnaaacccaaangggggggncccaannggttttggggggggaaaacccnaaccctttntttccccccccccctttttttttttggggaaaaccnttttttncccaaagggnaaaatttggggcccnaaatttttttccccaaaaaaannggnaaaanaaagggggggtttttttaaaatttccccaaaacccttttggggggggcccccccaaaaggnngggncccccccttttccccaaanaaaaaaagggggggggaaaatttggggttttggggaaaaatttggggcccctttttccccaaangggncccaaaantttttttggggnttttggggccccnaaattttggggnccccggggaaaaaatttgggnccccttttcccccngggnggggggggtttttgggggggggccccttttggggaaaaanttttccccggggccccttttgggggccccnaaaccccccccggggnttttttttnccccggggnccccaaaacccctttttttttnggggcccctttttggggnccccgggggcccccttttggggggtttttnaaaccccaaaattttngggggggggttttttttttttttttncccccaaaacccccccccccccccnttttntttggggggtttttttttnttttcccccaaaaaaaangggnccccttttttttnaaaaattttgggggggggggtttcccccccgggaaaaanccccnaaangggggggggggtttttttttntttgggggggggggggcccccnggggggggggccccnggggttttttttttccccccccccccggggntttttccccccgggnaaaaaaaagggntttttttcccccccccccaaaaaaaagggggggg

SEQ ID NO: 40231 - DNA, 420 bp, Oryza sativa
  Clone ID: PAT_MRT4530_43694C.1
acgaccatctgtgtcaggtatcagacctgaatagattgatgggcaacgtgaacacggagctgttgcactgggcgatggcgatggctgggcgcggcgacctatctttcatgctctgagttccatgaccaagatcaggcatgctcaagacccccgcgaagcacacggcggccgagcagcaatactgcacggagaacagcaccgtctgcatcatctacgctcagtcctgatctggctgagagcgcagggcacgctagcctggagcctgacgatgtatccaaggcccgactacggttagcaacagacgcgatgttctccaacaacaagctgacgtgcaccaagaaccggtagcttgaggtgatgaggtttgcccgctcatgttgggcacgctctggtcggagaagatcaaggagctggccacca

SEQ ID NO: 40232 - DNA, 2703 bp, Oryza sativa
  Clone ID: PAT_MRT4530_43695C.1
atgtctgcgcctggagccggagctgccgccggtgccgctgctgctgctggaggagatggcgcacctggagccggaggtggcgtgccaggagccggaggtggtgcggcgaacaacaacaccaacggaggcaattctgcctcacaatccagcggagggcctttctcggggtatatccttctccttcttctgttcctgctattagcgctctactgctttgttcctgttcctgatgttcatgatgcctctagcatgtttgtgcgctatgttcctgttcctaatattcatgatgcctctagcatgtttgtgcgctatgtttctgttcttgatattcatggaaggcggccaaacgcaactctaattagtgggagaagggcagagccacactacactcccaagaagccctcaaaaatagcaatgccagcggaagatcacagatggccttccgagagaatggactccagaaccactgagaccgaagagagcgtagagtcaaaaaccctagagtttcattacttccacagctaccaagagaccaagaggactagggagtcgaagctggctgaagatgctcaaatcagccatccagcagcgctattgaaaaccaaaccagaggaagaatttgcatttagcagggcccttcacgtgccagagcagattggcatacgcaaaggagtgctggccaaggaagaacgcctgctatatgctcttttatctatctacattcaatttattgtacacacaaccatcgcgcgctcctcggcgccgtcgacctcgtcttcgtcgtcgcgtccctcgtcgtcctcgcccttccccgcggcgacggtggcggcgctggggatggtcccgaacgggaaggggcttctgccgaagcctcgggcgtcgggaaggcctttccgggtcgcggtcgcgctcggggcgtcgggggtgttcgcggcggcgtcggccatcctcctcgcgctcgcgttgttcctcctgccgaacacggtatggagggtttgggaatccgccttcctcgccgtccacttcgtcgcgcacgccgtggcggcgtggaccatcgcgtcgcggaggggagcggccggtggcgccctccctctgcagctccgcgtgttttgggtcgtgacggccctcgtcggcgcgctcttctccgcttcggccgcggtccgctgggccgaggattcgctgcttttccccgacgaccccctcgcattcgccggcctcgccctctcgctgcctctggtgtatgtagccatcaccgcctcatccggcgaggtcgcaggtacgtgcgaacgcgaacccgctgacgtcaccaccgcggcggagccctctacgccgtacgacgcggcgtcgtggctgtcgcgcgcgacgttcagttggatcaatccactggtctccaaggggtacgccagcgactcgctcgccgccgaagacgtcccgccggtgtcgccggcccaccgcgccgaggcgtcgtacgctcggttcgtgtccaactggccggcgcaggggtcgcgctacccggtgggcgtcgcgctgtggctgtccttctggccgcgcgtcctattgacggcggcgctcggccttgtgcgcctcgccgccatgtacgttggcccgtcgctcatcaaccatttcgtcgacttcatcagccatggcggcacgacgtgggagggcctccggcttgtcgccatcctcgtcgccggcaaggcggtgcagacgctggcctcgcaccactacaacttccaggggcagctgctggggatgcgcatccgcggcgcgctgctcacggcgctgtaccgcaagtcgctgcgtctgtccaccggcgcgcgccgcgcgcacggtcgggcgccatcgtcaactacatgcaggtggacgccgggacggtgtcctacgccatgcacgatcgtggtggcgcttgtcctgctgtacgcctacctcggcccctccgtgctcatgacgcttgccgtgatcaccgcggtcaccgtgatcaccgcgttcgccaacaagctcaacttggcctaccagctcaagttcctcggcgtccgcgacagccgcatcaaggccatcaccgagatgctgaaccacatgcgtgtcatcaagctgcaggcctgggaggagaaattcggtggcaaggtgcgagaactcaggcagactgagatggggtggttgaccaagattgtactcttcatgtgcgccaacaatgtcgtgttctccagcggcccactcgccatgactgtgctggtctttgggacctacctcgccaccggaggagagctagatgccgggaaggtgttcacggccaccgcgttcttctcaatgctcgaggggcctatgcacaacttcccgcagacgatcgtgatgtgtatgcaagcgtttgtgtcacttggcaggctgaacaagttcctgtctgatgccgagattgacagcacggctgtggagcgcattgctagtagcgccggtgatgcagcagcggtgaaagtacagaatggagtgtttgcttgggatgtgccagttgaaggtgcagaggatgcccggcagggccatggtacggagaatggccgagaggaggggccagagatggagatggtgctgaaggggattgaggtggaggtgaggaagggtgagctagctgcggtggttgggacagtgggctctggcaagtcgtcactgctgtcctgcattatgggagaaatgcacaaggtttccggcacg

SEQ ID NO: 40233 - DNA, 378 bp, Oryza sativa
  Clone ID: PAT_MRT4530_43696C.1
aaaaaaaaacactttccaaacaatttattccaaaaaaaacacccagggttcctttttttttttaaaaaacacatttttttttttaaaaccaaagtacacaaaaaatttttattaattttttaaacaaaccattccaaacccgagtcggggagtcctaaattttttaaacaaaattaacaaaattttttcctgcaatgctcaaaaaattattttgaaagcccttaacaatcccccaattggacccctggtaaaaatttttataaactttttaaagaaaagcagtccattatgcaattgatgctgactttgcccactttttaactacctttttaaatttgaaaaaaccctggttttatgcaaaaaaatggggaaataatc

SEQ ID NO: 40234 - DNA, 2776 bp, Oryza sativa
  Clone ID: PAT_MRT4530_43697C.1
ttagttgtagttgagccttcgtccctgcatggcttgctggctcgtgtccgcgtcgtacgacgacctccctacgctgtgctcaatcgccatatcggtttgtcgatgaggttgatgcatggaggagttgctgttgtagggcgagctgtgcatgctgctccggccgccgccgctcatggtgttgcagagctgcatgttgtcctcgccgagggcgcggaggcggttgagctccgggagcacgacggtggcgaggtcggggcggtccttccggcggagctcgcagcagcggatggatatctcggcgaagcagcgcgcctcgtcgacgggccagtcgtggacggccgggtcgagcatgtcgacgatggtgccgtggtcgagcgcgcgcgcgacgtggtgggtgagccccatgggcggcttcgcggtgacgatctggagcagcatgacgccgagggagtagacgtccgacttgacgccgagcatgcccgtctgctggtactccgggtcgatgtagcagaaggtccccgccgccgacgtcatgtggcactgcgtgacgctgtcggcgacggagggcgggacgaggcgggcgaggccgacgtcgctgatcttgctgacgtagttgcggtcgaggaggatgttgcccggcttgaggtcgcggtggacgagcggctcgggcttggtctggtggaggaagagcaagccggtggcgatctcggcggcgatgcggaagcggtgctgccacgggatgaccgggccgccgccgcgccggaacaggcagtcgtcgaggctgccgttggccatgtactcgtagacgaggcagccgtactccgggcacgcgccgaggaggagcaccatgttggggtggcggatgcagctgagcacctccacctcctggttgaactgcgacctcccctgggcggcgtcggggcggagcaccttgatggccaccggcgtgtggtccaggtggcccttgtacaccgggccatagccgccctcgccgatcttgcggccgtcggcgaagtgctcggtggcgagctcgatctcctcgatggtgtacttgcggtaccggaccgcgccgcgcgagccgccgccgcccatggacttgagacgctcctcggtctccttgagcgccttcatctccgcgctgatccgcttctgcgcctccatctccgccagccgctgcgacgcctccgccgcctcgatggccgccctcgccttcgccttctcctgctcgatcagcgccatggccgactcctccgtcagccgcgtctcgtgcgaccgctgctcctcatccgtcttccagcgctgcagctccatcgccttctgtttagccgtgagcgcctccttgcacgcggtgctgtacatgtccatggtctgcttgagctcaagccgcagccgcttcatctcggcctccatgtcctccatgggaagggaggaagcgaaggaggagttgctggactgggagtcgctgccgaaggagtcgccgccccacatgctgggcggccgcgtcgcctcgaagctgtggtggtcgtgggcgtccgaaccggacgacagccgcggcgggtacaggtccaagctccggcgagggccggagctgatgaaggagatgtccgacgactccggcatcgagtagtccgggaacgccttcctcaccgacgtgttcgcccccctcgcgaacggcgacataatgaagttgtcctgtatcttcggtgtcccggcgatgtcaggtctcgtcgtggacggaggaggcggcggcgtccatttctgcgtggacacgttatcgggcttggggccctggatcattgtgcggagcggcgagacggccggcgcctggcggacggcctgccgcaccgacgtcaccttgccgcctttggagacgacgtacacggtgctgaagtccggcgccgtcttggagatgctgctcgagatctccgccttgaatcttttcaaatgccacaaaccaaattcaccccggtttcctcgacagctgacgaagccgcccctggcggtggcgccgacgacgagcttctcgatggcggcgtgcgcggcgaactcgacgatcgccttggacacgtcgtggtcgtccagcaccacgtccttgcagtggatgtctttccgcgtgcagaagcagcggaacgggaggaacaggtccttcatctgcgggtccgacggctgtttgtacccggccgcgtcctccacgccacttgaaatccgacgagagatttcagcggcgggggtccgggggatgcagtggttgcctgaggagcccttggtgtggacgtggacgagcacgatggtctggcccttgtgggcgagcgactccgtggcgtacttgagggcgttctggctgttcttgtccttgtcgatgcacaccgccaccagcgggtacccgccgccgccggggtcgccgccgtccttgcccattcgccggctggtggtgcattatccccggcggcgaggtggcccggtgctcgtcggggctgagtggccctcctccttgcatcctgcccgcctgcacttctccggtgagatctcacccgccttcgtcgtcgccgccgccgacgccgaccgtaatgtgatggatggatggaggtgatatcgccggccggatcagtggatgatgcgacggtgagtaggacggtggtgcaaggaaggagaagaagagagagggagagagaggctgagagagagagagagaaagggttttccttttccctcccctcctgctcttccttctcctctgtctctcttccttgcctccaaccttcctctcaaactcagc

SEQ ID NO: 40235 - DNA, 2763 bp, Oryza sativa
  unsure (1)..(2763): unsure at all n locations
  Clone ID: PAT_MRT4530_43698C.1
ttagttgtagttgagccttcgtccctgcatggcttgctggctcgtgtccgcgtcgtacgacgacctccctacgctgtgctcaatcgccatatcggtttgtcgatgaggttgatgcatggaggagttgctgttgtagggcgagctgtgcatgctgctccggccgccgccgctcatggtgttgcagagctgcatgttgtcctcgccgagggcgcggaggcggttgagctccgggagcacgacggtggcgaggtcggggcggtccttccggcggagctcgcagcagcggatggatatctcggcgaagcagcgcgcctcgtcgacgggccagtcgtggacggccgggtcgagcatgtcgacgatggtgccgtggtcgagcgcgcgcgcgacgtggtgggtgagccccatgggcggcttcgcggtgacgatctggagcagcatgacgccgagggagtagacgtccgacttgacgccgagcatgcccgtctgctggtactccgggtcgatgtagcagaaggtccccgccgccgacgtcatgtggcactgcgtgacgctgtcggcgacggagggcgggacgaggcgggcgaggccgacgtcgctgatcttgctgacgtagttgcggtcgaggaggatgttgcccggcttgaggtcgcggtggacgagcggctcgggcttggtctggtggaggaagagcaagccggtggcgatctcggcggcgatgcggaagcggtgctgccacgggatgaccgggccgccgccgcgccggacaggcagtcgtcgaggctccacctcctggttgaactgcgacctcccctgggcggcgtcggggcggagcaccttgatggccaccggcgtgtggtccaggtggcccttgtacaccgggccatagccgccctcgccgatcttgcggccgtcggcgaagtgctcggtggcgagctcgatctcctcgatggtgtacttgcggtaccggaccgcgccgcgcgagccgccgccgcccatggacttgagacgctcctcggtctccttgagcgccttcatctccgcgctgatccgcttctgcgcctccatctccgccagccgctgcgacgcctccgccgcctcgatggccgccctcgccttcgccttctcctgctcgatcagcgccatggccgactcctccgtcagccgcgtctcgtgcgaccgctgctcctcatccgtcttccagcgctgcagctccatcgccttctgtttagccgtgagcgcctccttgcacgcggtgctgtacatgtccatggtctgcttgagctcaagccgcagccgcttcatctcggcctccatgtcctccatgggaagggaggaagcgaaggaggagttgctggactgggagtcgctgccgaaggagtcgccgccccacatgctgggcggccgcgtcgcctcgaagctgtggtggtcgtgggcgtccgaaccggacgacagccgcggcgggtacaggtccaagctccggcgagggccggagctgatgaaggagatgtccgacgactccggcatcgagtagtccgggaacgccttcctcaccgacgtgttcgcccccctcgcgaacggcgacataatgaagttgtcctgtatcttcggtgtcccggcgatgtcaggtctcgtcgtggacggaggaggcggcggcgtccatttctgcgtggacacgttatcgggcttggggccctggatcattgtgcggagcggcgaaacggccggcgcctggcggacggcctgccgcaccgacgtcaccttgccgcctttggagacgacgtacacggtgctgaagtccggcgccgtcttggagatgctgctcgagatctccgccttgaatcttttcaaatgccacaaaccaaattcaccccggtttcctcgacagctgacgaagccgcccctggcggtggcgccgacgacgagcttctcgatggcggcgtgcgcggcgaactcgacgatcgccttggacacgtcgtggtcgtccagcaccacgtccttgcagtggatgtctttccgcgtgcagaagcagcggaacgggaggaacaggtccttcatctgcgggtccgacggctgtttgtacccggccgcgtcctccacgccacttgaaatccgacgagagatttcagcggcgggggtccgggggatgcagtggttgcctgaggagcccttggtgtggacgtggacgagcacgatggtctggcccttgtgggcgagcgactccgtggcgtacttgagggcgttctggctgttcttgtccttgtcgatgcacaccgccaccagcgggtacccgccgccgccggggtcgccgccgtccttgcccatggatgatgttggaggcgccggtgagnaggtggtcgacgacccacttcacggcgagctggctgttccggtcacggtccacggcgacgacgatcgtcatcgccggctggtggtgcattatccccggcggcgaggtggcccggtgctcgtcggggctgagtggccctcctccttgcatcctgcccgcctgcacttctccggtgagatctcacccgccttcgtcgtcgccgccgccgacgccgaccgtaatgagatggatggatggaggtgatatcgccggccggatcagtggatgatgcgacggtgagtaggacggtggtgcaaggaaggagaagaagagagagggagagagaggctgagagagagagagagaaagggttttccttttccctcccctcctgctcttccttctcctctgtctctcttccttgcctccaaccttac

SEQ ID NO: 40236 - DNA, 808 bp, Oryza sativa
  Clone ID: PAT_MRT4530_43699C.1
gcgtccacctggcccaaaggtggggtctagcgttcggggtggtatccatgtggtcaacggcgctggggcgcgccgccaccgggacgcgtgccggcggctggggcagcacgtggagctcgtcggcggcctgctgtgggagctggagctcgccgagctgatgcggcgggaggccaccaggcggcccctcgagcagctccagggcgcgctgcggcggtgctacgcgctcgtcacggcgtgccaggaggaccgcggctacctccaccgcctgctcctcggcgcccggatggccaacgagctccgcgccgcgcagcacgagatcgacatgtacatccgcctcatccctctcatcgctctcgtcgataacagcagcagcaatcgtcgtgtcacacaggcaaccgagggggtgcgtgctgtagtcccaagctgttcagaccatcacacaagttcagctgttgtgaatataccagtttttagggcgaaatcaggacctttgttttatggttttgacattaacggtgttaaccctcattcagtaacagtggacccgcaaccgcaagaagaaaaaataatggatatcgaggcagtactgaaactttttgtccatactgaagagaactacccaggatttaggaagttcgatttcattcagattgtggatgctacagatggtttttccgagaagagaatacttggaaagggtggatttggtactgtttacaagggccacttgcttgatggacttacagttgccataaagacatttgatgctgatacagcaatatttgatttgaaaagtgaattgcagctt

SEQ ID NO: 40237 - DNA, 401 bp, Oryza sativa
  unsure (1)..(401): unsure at all n locations
  Clone ID: PAT_MRT4530_4369C.1
ccngggtngcaggattcggcacgaggattcatccatttgcgggtancacttcctatatcctcatgcaccctgctagattggtgcatgagattcatcactttgtgagagttggcgtancanctgaagaatatcctgagtgaatgctgcgtgggaanacattgtccaattcattgtcagaacacgccgattatgtcaggggttgatatatcctgctgttaccgctgcacaattttgatctgtaaggtgtaaaagcatttttatnaccnnnatgttcattanaaagaggaggatgggganagggaggangaacactccangattcctttatacttgatatggttccccatgctgtnggctganantctgcttctgctttgatttatcccaaantttggctctct

SEQ ID NO: 40238 - DNA, 864 bp, Oryza sativa
  Clone ID: PAT_MRT4530_436C.1
gaacaaaagcccgagctcgctgcagtagcagaagcgtctcgctttcccctttgctgctgctgctgctgctgctgcgccgccgcctccgccgccgccgccgccgattccgctcccctcccttcccctccgagctcagcaatggcaaattcatcatctggagttgcaattcatgatgattgcaagctgaagttcaatgagctacagtccaaaaggatgcaccgcttcataactttcatgatggataacaaggggaaagagatcattgtggacaagattggggatcgcacaacaagctatgaggatttcactagcagcctgcctgaaggggactgccggtttgcaatctatgactttgacttccttactgcagaggatgtgccaaagagcaggatattctatatcttatggtccccagacaatgcaaaagtgaggagcaagatgctttatgctagctccaacgaaagattcaagaaggagctgaatggcattcagttggaagtgcaggctactgacgccggcgaaatcagtctcgatgcgctcaaagatcgtgtgaaataagcattgccatgcctttcatgatcttgcaatatggacttgtctattatggatttgtgtgtcactataaatttggtagtgtgagactgcttgatggtttgtgggtttgttcatggaaccatggagatatggctctatcctgtatttcgttgttgcgctcagaatgtatgggcctgtgatgcactgttccaagtttaattgagatgtgtcaatgttcaagttacagaataaattgctgatatgttctcagttctcatggacaccttgtgaggattgaatggttctgactactcatggaggttgagtcca

SEQ ID NO: 40239 - DNA, 175 bp, Oryza sativa
  Clone ID: PAT_MRT4530_43700C.1
gctcggcacagtttgatgcttgcactgatggcatatgccagcagcagccgtttaggcaacccgatgaatgaacccggcatatgagttcgtgaggcaacagtgcagccccgtgaaagcctacttgggacaagtcacgcagctacaactgacagctgccagtgatcgcaacaatctt

SEQ ID NO: 40240 - DNA, 449 bp, Oryza sativa
  Clone ID: PAT_MRT4530_43701C.1
gctccctccttcctcccgtcgcctcatgcccccgcatccgcacggctgaagtcgcctacgcaggggaggagcgaaaccctagctccggattcttctcctctcctcctttcttctctccgatgcacccgagtgaccgagtgtgcggcggcgatggtgacgacgacggtccggcggagtggtgcgcacgagctgtcggctgggggcgcagcgaggtgtgaacggcgcgcgtgcggtggcaccggcgcacccaagagggggcttggagtgcaagccagagcacgcaaggacggagcgtgtgccggcgcgcgaggacggtgttgcatgcttcctggcggtggctgcacagcgagcttatgccttgatgttcttcggtggtttagggctccaattcgggttattgggcttgacgaattttgtgattttgggactgtgcgtgatctgccggcacc

SEQ ID NO: 40241 - DNA, 1827 bp, Oryza sativa
  Clone ID: PAT_MRT4530_43702C.1
atggagggaggagccctcgcactcccgcacttccgctcgcgcgtcggcatcggctcgcccatcctgctctccgccgaccccggcgccgcccgcaggagctccggcgcctccgggaggagtagggtttcgagggttaatccaggagcgtatccgagaagtgcagggagaggtaggacttggaagcgtgacagcccggaggctccacctcgccgatcaggaattactagagttccaaatcgtagtcctgagatgcctactgaaagagcagggaggactaaggtttcaaatgtaaatttggaggtatctcatcacagagcagttgcagcagtgaggttgctaaggattgagaaggggaaggcatttgtggaccttttgaatgagaaaggaaacagttccggagagaatgagatgagctatgtcgaaaggacactagggttcagcatacggtgtttggataacagggatataagattggttactgtcatagtcgctggaactgtgcgttggaaacggtaccttgattatctgatcatgtcactctgtagtgaggagaaggtgttcagggagatggaaccactacttctgcagatattacgaattggtttctttgaaattctcaagctcaatgtgccagcttatgctgctgttgatgagaatgtaaggcttgctaaagtagctctaaggcctggtgctgggaacctggtgaatgcaattctgcgtaaacttctactgctaaaggaggcaaactctcttcctcttccaaagatagaaggtgatgatcgtgcccaagctcgcgcactttccattatttattctcatcctgtctggatggtgagaagatggattcgttttctgggcaaagaagaagctctaaaattaatgaaatggaataacagtgatcctcatttcagtataagggtcaacacagcaaatgggtatacaagggctgatcttatagatcgattggaaagtttgcaggttcattatgagaagtcaactatggatgaatttgtccgtattcaggagggtatgcagaattatcttaatttgttccatgtacagactgtcctgcaagctggactactgaaagaaggcatgtgtgctgtgcaggatgagagtgcaggcaagtttccatgtctaagtgatagtggtacttctcatttgagtaagcacttgatacttatgctaagacatgaagaatctattgtaggtcttgtggtgtctgtggtcgatccacaacctggggaaacaatcattgattgttgtgctgcacctggtggcaaaactttgttcatggcagcccgtttatcgggacaagggaagatatgggcacttgacataaacaaaggtcggttgagaattctcatggaggcagcaaagttacacaatcttgatgctatgatcagtgacatccatgctgatcttcgactatatgctaaggaaaccactgcaacatttgacaaggtactgttggatgctccatgctctgggttaggagttctttccaagagggcagacttgcggtggaatagacaattcgaagatttggaggagctaatgtgtttgcaagatgagcttcttgattctgcatcaatgttagtaaagcctggtggtatattagtctacagtacatgttccattgaccctgaagaaaacgagcacagaattgctgcttttgttcagaggcatccggactttgtcctacagagcgtgcatggatatgttcctgctgaatttgtcacagatgagggtttctattcctcaagtccaactaagcactctattgatggggcatttgctgctcgtcttgttcggtccgtcctctag

SEQ ID NO: 40242 - DNA, 414 bp, Oryza sativa
  Clone ID: PAT_MRT4530_43703C.1
ggatttgtacaagaaaaacctagcacatcaagaacaaccgctagggaagaaaagagacgcggatccgctcatctcaatcaaattcctaaatggcgagcagcgagcgcattgcgggcacggacggagtttccacggggagatggcgaacggcggcccagccccctctcctctgcgccctgggccacgcggaaccggtgggtaaagatacggaggaagctctctcccctggggcacctcctcgccactcccggccatgagaaggggggaggaggaaaagacggcatcaaagaaaggggcggtgccaccaggagaggaggaggagggggagtggcagcgagtggagaggggggagcgagagggagagatgcggaggaggaggagcgcacgcccgtcgtcgccgtcatctcagccacg

SEQ ID NO: 40243 - DNA, 199 bp, Oryza sativa
  Clone ID: PAT_MRT4530_43704C.1
aaatgttgttgttttaagctttaatgagttttgttgtatcatcacaatcgaaataaataaaagatgttctggaacatcatttttggtacttatggtttgcaataattttatgtaagatcaaagaatccttgcaagtttattattaatgagtgcaattcaaaatgcaaatagctcacttgccctcttctattaaaaaaaa

SEQ ID NO: 40244 - DNA, 813 bp, Oryza sativa
  Clone ID: PAT_MRT4530_43705C.1
atggcgccgtcgtccaagctcgccgccctcttcttcgccttcgccgtcgtggcggcggcggcgctggcaccggccgcagaagcgagggtccaagggttcaaccatgaagcggcgtccgagcctgccattgccgcagccggggagtccaaagctgccaccggaggaggagcgccgacattgccgggattacccggcttgccgttcccgctcttcccgttcctcacgctcccgttcccgctgatccccatcggcggctcttctggcggcggcggcgccgctccgccttcggctggctctggcttccggttcccgttcccgctcccgctgccgttccctgcgcccgcctcgccgggcggcgctccgccgtcgtctgggtccggcttcccggcgttcccgttcccgttccccagctcgccggtctcgccaccgtctcaagcatcacccgcctcgccggcggcaccggcgccgccatcgccgccgcagccaaaggagtgcttgacgccgctgttgtcgatgatgtcgtgcgcggactacctgacgaacagcagcgcgcagacgccgccgggcacctgctgcgaggggttcaagtcgctggtgagcacggcgcccatctgcctgtgccacggcatcaatggcgacctgagcaagttcctcccgctccccgtcgacatgatgaagatgatgacgctccccaacacctgcggcgccacggtcccacttcagacgttctccatgtgcaacacgccctcggtgcctccattgatgcctcagagcccatctgctgctgctccagcgcctggtgtgtcaccgtag

SEQ ID NO: 40245 - DNA, 442 bp, Oryza sativa
  Clone ID: PAT_MRT4530_43706C.1
gcaaaaacataatttctggggaggcagtatccgttaacggatcccattttatttagaaaactagatgttagtatcccttttacaaatcagtatgacaaaaaccgctctgaccgaagctggaaaaaaaaactctgtgccaatggtccggtcagatgctaaattaactatgcctgggtctaattgggtggggcaaaattagtcgatggactggcttttttttgaggctgggggggctagggctgctggtgatgctttggctgggggggtgactgttgatgatgcttccgctgtggctaagcaggcgtggttcctgctggtagtgctctttgcatatagttttaagaatgcggggtttcatcttgctcatggcggaagagccaactgttttggggaaaaattcataatttctttcttcaggaatttattgatcctggaaggaatg

SEQ ID NO: 40246 - DNA, 2981 bp, Oryza sativa
  unsure (1)..(2981): unsure at all n locations
  Clone ID: PAT_MRT4530_43707C.1
cggacntgggctnggnaagaggaggggagantccacgtaannanaggaggaggananngaggagatccctctcccgcncgcatccgcccctctcgccgatccccaattcgccatggatccaccctacgcaggagtacctattgatcctgctaaatgccgattgatgagtgtggatgaaaagcgggaacttgtccgtgaattatcgaagcggccagaaagtgctcctgacaaactgcagtcttggagtcgccgtgaaattgtagagattctttgtgctgatttaggaagggaaaggaagtacactggattatcgaagcagagaatgttggaatatctcttcagagttgtgactggcaaatcatctggtggtggcgttgtggagcatgtgcaagagaaggagcctacccctgaacccaacacagccaaccatcagtcccctgcgaaacggcagcgaaagagtgacaacccatcacgactaccaattgttgcaagcagtccaactacagaaatacccaggccagcaagtaatgctcgcttctgccacaatttagcttgcagagcgactcttaatccagaagataaattttgcagacgctgttcatgctgtatttgtttcaagtacgatgacaataaggatcctagcctctggttattctgtagttcagatcaacccttgcagaaagattcttgtgtattttcgtgccatcttgaatgtgctcttaaggatggaagaactggcatcatgcagagtgggcagtgcaagaaacttgatggtggttattactgcactcgctgtcggaaacagaatgatctgcttgggtcctggaagaaacaactggtgatagctaaagatgctcgccggttggatgtattgtgtcatcggatttttttgagtcataagattcttgtctccacggagaagtacttggttttgcatgaaattgttgacacagcgatgaagaaactggaggctgaggttggtcctatatctggagttgcaaatatgggtcgtggaattgtgagccggcttgctgttggtgctgaagttcagaaactttgtgctcgagcaatagaaaccatggagtctctgttttgtggatctccttctaacttgcaatttcaacgttcacggatgataccatcaaacttcgtaaagtttgaagctataacccaaacatctgtcactgtagttttggatttgggtcctatacttgctcaagatgtaacatgctttaatgtatggcacagagtggcagccacaggctcgttctcatcaagtccaactggcatcatacttgcaccattaaaaacgttagtggtcactcaacttgtgccagctacaagctatatattcaaggtagttgccttcagtaactacaaggagtttggatcgtgggaagccaaaatgaagacaagctgtcagaaggaagttgatctgaagggtttgatgccaggtgggtctgggctagaccaaaacaatgggagcccaaaggcaaacagtggtggtcagtctgatccttcttcagaaggtgtggactcaaataataacactgcggtgtatgctgatctcaataaatcaccagaaagtgattttgaatattgtgaaaatcctgagatacttgattcagacaaagcaagtcatcaccccaatgaacctacaaacaactcacagagtatgccgatggtcgtagctagggttacggaggtatctggattggaggaagctcctggactctcagcatcagctttggacgaggagcccaattcagcagttcaaacacaattacttagagaatcctcaaattcaatggagcagaaccagagaagcgaagttcctggatcacaggatgcatcaaatgctcctgctggaaatgaggtggtgattgttccacctcgatattctggctctattccaccaactgcacctagatatatggaaaatggtaaggatatcagtgggaggagcttgaaagcaaaacctggtgataacatccttcaaaatggctcttccaagcctgaaagggaaccagggaattcttcaaataaaagaacatcaggtaaatgtgaggaaatcggccacaaggatggatgcccagaagcatcttatgagtactgtgttaaggtggtcaggtggctggaatgtgagggttacattgagaccaacttcagagtgaagtttctgacttggtatagccttcgtgctacccctcatgacaggaagatagtcagcgtctacgtaaacactcttattgatgatcctgttagcctttctggccagcttgctgacactttctctgaggccatctacagcaaaaggccaccttctgttcgctccggtttctgcatggaactttggcattaaagagaggggagctcgtaccgttctctttgtaggggagcatattttggtcccattctttcgtagcagatcgttgcattgattcttcattggaaatttcattgaagcggttaacttatacaatctgttcattgctctactttatttgctatgacagtaggtttaatttatccagcaacttatttctgttttttcacttaggagtccatagtttacagttctgttatccgtaccgccatgttggtacagagcatcaagagctgtgctcttttggtcagctttaggaacattctgaaattgccacaagtgtgtgggtacctgaagctctgttgctagctgctgtgagagggagggatgattctcaggatgtaccgggaaacattgggatgaagcaggcttcgtgtcgacactgacgaatccgagctaaccatgccttgtcaggataaatgatgatgtggtgctgtatctggggttgaaagaaatgcaaatgtgctgctgacttctatggggaatgggaggagtcctgatgtttttccttttcttaagacaatagatgcaaaatgtctgccctaaaaaaaaaaaaaaaaaaaaaaaaaaacctgcagcccgggggatccactag

SEQ ID NO: 40247 - DNA, 1736 bp, Oryza sativa
  unsure (1)..(1736): unsure at all n locations
  Clone ID: PAT_MRT4530_43708C.1
tttgtatttttattagtttttttttttttnccagcanaactgtaatgatataattcatttttttgaccacttgcaggaagttagaggcatgaattttctgctgttataaatgctttgctttaatcactacagttttggtttttttttttattggtaggtatagaaaacaacttgagcaaataggggccgcagattgctacttaggctacaaaagtgtaatggcagcaaatcctgaaccatcatattcgcttgcacagccaaatacaaacgacaatagagatgaagtcactgacaggataacactatcgctagaacagtacatgcattttgaatgcaattctgatcaggcaaattattcaaaattcaatagccacatgtgattgctggcatcattttttcctgagctttgtcttcatcctctcaaccgcggctctcagcgtctcatcatccttgcaaaaggtgaacctcaccaagttcttcccatcctcagggttgagataaaatacactaggtggtatggcgacaacaccgacttcgcgaatcaaatactcgcagaactcaatatcattgtcgaaaccaaatggggtgtggtcgaccatgacgaagtatgttccacttgaaggatagacaatgaaacctgcatccttgagtccgttgactagcaatgccttcttagctccataatccctcctcagttcctcatagtagctatctggtgctctcagagctgcagctgcagctgcttgcattggtgtgcaggtcgcaaacgtgaggaatgagtgtgcctgccttacaccccatgtcaggtgtggcggtgcgattgcccaaccgatcttccatcctgtaagagagaatgtcttcccaagagagttcatggtcacggtcctctcatacatgccaggaatagaagccattgatatatgatctgcctcaaaagctaacttgtcgtagacctcatcagcaaaaagcagcacatcattttccttgcagagagtggcaataaactcaagttcttcccttgtaaacattttcccagtaggattgtgcggggtgtttatcataatagctctggtgttcttcgagactgcagcctttagctcttcaagagggactgaaaaatctggaggacggagagtaatggcttttacgttggcaccagccattgacagggtagcctcatatgaatcatagaatggagcaaacaatatcacttcatcgcctggattaattagacctaaaattgttgcagctatagcttctgtgcatccagatgtgacagtaacttccttctccggatcgacttgcagtccgctgtccttcaggaatctttcagcaatagctgagttcagttcaggcacaccatatcctcttgcgtactgattcttcccagcattgatagcttgaatagcagcctcttttacaaagtcagggccatcgaaattcggaaaaccctggccaaggtttattgctccatgcttgatggcaagcatactcatctgtgtgaaaatggtcgtcttaaacttttccaaccgctttgcaacctgcacaggctgctgctgctgcttctccgccgccgccttggcggcgccgttctcggcggcgacggtggacgcggaggccatgggggagagcgccgcggccgccgccggcgaggccttccggagcgacgcgacgagcgagcggcgcccgagcgaggagaggaggaaggaggcggaggaggagggatttaacggcat

SEQ ID NO: 40248 - DNA, 330 bp, Oryza sativa
  Clone ID: PAT_MRT4530_43709C.1
atgctaatcgatcggccatttggggtgtggtcacggctcacgacagtcgttggaccaccaacacccacggcgatcattgctttgcttccgtccaccgttcgacagctaggaggcgttctcacggccctgaaacctgacaaaaccgccgccccagatggtgccaacgccgatcggcactgcacggacacgggctcggcagtcggcaccaccactgccccccacgcaccaccatcaagcagaaaaggcgatgatgatgagggtcacagcctcacagtcacagggtttattagcactgatgaacagataaatgacacttggtgccagtactga

SEQ ID NO: 40249 - DNA, 1542 bp, Oryza sativa
  Clone ID: PAT_MRT4530_4370C.1
atggcggggctgtcgctgcggtgcggcgactgcggcgtgctgctgcggagcgtggaggaggcgcaggcgcacgccgaggccaccaaccacgccaacttctccgagtccaccgaggccgtcctcaacctcgtctgcgccgcctgcggcaagccctgccgctcccagaccgaggtggacctgcacaccaagcgcacgggccacacggagttcactgacaagaccatggaggcggccaagccaattgatctcgaggcggcgccgccgaagccggccggcgaggccatggatgtcgatgcctcggcaagcgccgagccacaagagatggtggcgccggaggttaacaaggagatgctggcggacctcgaggcgatggggttcacgacggcgcgtgccactagggcacttcatttttctggtaatagcactattgaaggtgccattaactggctttccgagcaccaagaagatccagatattgacgaaccgcttctggtaccggctaatacaataactgaggctaataaaccctctttgtctcctgaggaaatgaagattaaagctcaggaattaagggaacgtgctcgtaaaaagaaagaagaagaaagagaaggatggaaagagaaagggagaagcatgatagaactgcgaagacttgagaaagaagaggagaaaagagctagagaaaaaatccgtcagaaactggaagaggacaaggctgaaaggagaaggaaacttggattgcccccggaagatccagctgctcctaaaccaagcgcaccacctccggttgaagagaagaagagggcattacctgtcaggccagccacaaaggccgagcgcatgagggattgcttaagaaatcttaagcagcagaacaaggatgacgatgctaaagtgaagagggcttttcaaacactccttacctacattggcaatgtagctaaaaatcctgacgaggagaaattcaggaagatcagactgaccaacgctacatttcaggagagggttggcaatctgcatggaggcatagagtttctccagctctgtggatttgagaaacttgaaggcaacgagttcttgttcttggcaagggacaaggttgacaaggccgtcctgaacactgctggagccgagctgaattctgctatcactaatcctttctttggagtcctttaaattcaggaagatcagactgtccaacgctacatttcaggaaagggttggcaatctgcatggaggcataaagtttctccagctctgtggatttaaaaaacttgaaggcaacgagttcttgttcttggcaagggccaaggttgccaaggccgtcctgaaccctgctggagccgagctgaattctgctatccctaatcctttctttggagccctttaaatcggaaaaaatttccagggacccttgaacccctctgtttcccctttgcttgaagcccaaatgcccagaaatattgatattgagcgaatgatctttccctgcgccccaaaaaaaaaaaaaaaaaaaaaaaaaaaaaaaaaaaaaaaaaacaa

SEQ ID NO: 40250 - DNA, 1686 bp, Oryza sativa
  Clone ID: PAT_MRT4530_43710C.1
atggcgactccccgattcaaggaggaagacctggggctgcgcgtgatctcgcttggcaaatgcagccgccacctcgttcacgcgcccaggtccgcctggttcatgctccacgcgccgtcgaggcgaagcttctcgacctcggcgtcctcctcgccgtgcacttcgccacccgcgccgcctgagaccagtccgccgaacacttcgacacccgcgccgcctgctccagatgtgccagagaacagttcgccgccggattatgatctctgctcagacaggtgctccttaggtgatatgcttgaagcgtcctatgatcctgtagagttcgtgcgcaactttccagcagtaatgttcagcaagccgaagaacgcccctgacactttgtacgatagatgggttttcaaaggctggttccaatctgctataagagacattttgagcaaactagaggatcatcacatagccggtctggagtttgaagatattaatactgagaccatgacaatagcttgcaatattgattcaagcgagttctatcccaggttcaattttcatgggaagaccaggaacattacttttgaaggacagaaaagaaattacactcagcttggcagcacccttgagaaattgatagccatctcagcaagtgctagtaatgtccatgcatatcatcatcaactcttgactgaagacgctaaagacttgctgaacaaaatgaggcatccttcccttgatcgttttgaggcatacatgctcagaaaccacccatctttacttcagatcgaagcgcatgcctctttctaccttacctgctttgatcacctgaagctattgcctcaaaagcctgttgaaaacttcttcaaaggactgccatacgcggtaggagaccagcatggcgattggattgcaattgcacatcaacacccgcttcttagcatgcagttaagccatggatatagaatcagcaactggtcgcaggcaacgtataggagggacgggtactgtcatagaactgaacctggatctaagtattcgatcgttcaaacgcacaggatatatcaccagtatttccctaggacactcccagctatgatgtggggaatggtggctctacgtcagcacaagggacaacgtacagttgatgttcggttcacactcaacagtcctgttcctgttttctttgacaaggacaaagtcaggcagtcgccggcgagcaggatgccgcacggccgcagcggcagcgcgcagccgccggctgcctcgggcctcggcgcggaacggcggacgccgacctgcaggctgcagctgtgcagcgcctgctcctgctcggctgacggcctggagcagcctcctgcctggctgcctcctgggcccctgcaggctgccgcgccggctgccgcacgcggcacgccgtcgcccgtcggtcacggtttgggtggccaaggcgccaggcgggtggggaattgggggaaaattgcaaatgggctgagatgtggcccaattagaccacagcatgcatcgttaaacaacattgactcccatgatctgcacctgtggcgaaaacaagaccaaagaggcaaagattgtcgcatcaaatgcaaatttagagactttttctcccttcgttctaacatggataagaagagccttatagtgtctacgttgtttgacagaaacgtgaatgtgtaa

SEQ ID NO: 40251 - DNA, 209 bp, Oryza sativa
  unsure (1)..(209): unsure at all n locations
  Clone ID: PAT_MRT4530_43711C.1
gacctctgctcgtaattgtttgttcctcttgaaagcaatggctcctcttccggccgccggcgcgggggngtcgcatcatcctggcgcacggcgcgtgcnacggcgggtggtgctggtacaaggtcgccgcgctnctccgcgccgcggtncaccggttngacgcgccggacctnggngggccggtnancgangnctgnncgttggcggcg

SEQ ID NO: 40252 - DNA, 796 bp, Oryza sativa
  Clone ID: PAT_MRT4530_43712C.1
ggccgcaaattttttttttttttttttgagcacaatagcattgtttcattaaccataaccaacagtaaagagtatttggaccccaaaattctgcaaaaagattactacacaagacctgttctatttgtacatgttgttcttgctgtgctcacagaaaaccatatatataatatcagtaagaacgcgaagactacaaataagttgtgaaagagcaacagctagctagcacgaatgttggttggtggtggtgttgttttggatgagggtatggatgagctgcagcagctgggtcctcatggccttgatgctgtcggcgttcacctccctcttcacggcctccaaccaatcggaatcggaattggaatggcgggcgcgggtgggccaccagttgcagatggccctggccaccgctagcacgaagacgccgcagtcgtagccgtttgtctgcctgggcgtggggccctcgatgagcgggatcgcggaggcggggagcagcgggcggagcacggcggcgaggcggcgcgcggagggcaggttggtgggtgggaggctgtcgtggtggacgaagcgggggccggagacggcgttggagttgtcgaggacgaggagggtccagtgggagccgccctcggcgtgggagacgtcggggttgtcgttgacggggaggaggacgaggcggcgggaggcgaggcggagggggtcggcgacggcggcgacggaggcggggtcggggaggttggagaggaggtaggggacggaggggggaagcaggagtaggtcgtcgtcgtggtggtcg

SEQ ID NO: 40253 - DNA, 552 bp, Oryza sativa
  Clone ID: PAT_MRT4530_43713C.1
atggcagagactgtggcggatgagggcttggagatcatggactcatggtgtcggcgcgggcgcttgaggacgaggaggagattacggcgtctatacgcaactgctcgtgtcgcgggtcttctctccgccccgcttcgcctgaacacctccgccacctccgccctcgtccttctcctcctccggcaagggcaccagcgacgggctggcgcgcttgagctcatggaactcggtggagacgggttcgttggattcggcaaggatccagtccacctcctcctgtggcagcagccacatcttcttcgccggaggatgctcctcctctggtcctccgtcaacggcggagtccgcctttctcttattggtagaggagacggagacggatacctcgccggcccagggttccccaaaccgccagggccggggttaccgtgtcccggtgagtcagggtcggagtcggggctggtgcgcgaccgaggccgtgtcggaatcggagatgaaaatgtgatccgagcgctggctaaccagctactctacagttttgggcctgcttaa

SEQ ID NO: 40254 - DNA, 198 bp, Oryza sativa
  Clone ID: PAT_MRT4530_43714C.1
atgtcggtgatgatattgcgccgtgtgcgccagtcaagagtagctcagcaaactcgtcttcgccatctttgtcttgctgacgcccgtatttggacaactaccaagacaatggtgagcatgacaaagaaagaagcaactcctacaagcacaggaaccaaaggaatgctaaagaatcgtatcctggataacttgtcttaa

SEQ ID NO: 40255 - DNA, 3336 bp, Oryza sativa
  Clone ID: PAT_MRT4530_43715C.1
atgccgccgccgccggcgccgccgtccgtggagcggcaggtggcggagatagccgccgagcccgaccgcgcctccgcgtacgcgcgtctcctccacctgcagcgcgcgtgcgccgatgacccctccgcggccgccgacctcgccgcagcctccccttccatcctcctcccgctcctcctacgcgacgccggtgaccgtgatgaggccgtcgccgcctccgcgctcaagtgccttggcttcacgctctaccatccggtcctcgtctccaccgtctcagggcagatggctcagtcagtattagataccgtgatacagctaatcatgaccactcagatgaaggctatttgtaatctgggtgtgtggtgcatctctgtgcaagaattggaggctgtcgttgtagatcatcgagcaacttctttgctaactgctattgttcatgccattgacaatccattttgttctttgtctacaacatttgaggctgttcaggctatcatgaaacttacgagtcaaaatccagaaaaaatgagggaactatcaagcatatgggttccaccgatataccgaagactcttgagtgttgataaggcagaaagggatatggcagaaaggtgcctgattaaagtgtcatctgttgttttaccaccacaatctcttctatcgaaggcaatagcttcagaccttgagcattctctgctctcttgtatgttgaatatgatccatgatcctgtaaagaaagttcaagcagtgaagtcatggggctggtacatatccttacttggcttacatgtggtggataatagacatctacttaataaaatccttaaggtccctgagcagttgttcattgattctgatacgcaagtccagattgccacaatggttgcctggagaaatttggtgaatgcatttcttcctcaggcttcggagactttggttccaaaaactaaaatttctcccattgaatccagagcagatacaaatgctcagttgaaaaagataaggctaattatgatgcctttgggtcgaattctgtcaagaagtcatagtattgctttaagttcttcctgcttgagcacatggcatcacctcttatataaacttggtgatttgataaatcagctacctattctggaggctgcttttgggccagtactcaaaatagttttctccattggaccagatattcagaataagccgctttattcattttgtgtcaatctgtttcatgaatatatttcaacaaaagtccgagacatggcctcacatggagagtatttgcccattccactgaatcagaacttgctgtcccaatcctgtatacatctcaagaccttgatggatggtcagtgtatcagatggttaccatgggatgttacttgctttgattttcatttggacatcctggtctgtattgtaaatccagaactacttcgtaagatgactcttgaaagcgtggtgactgttatggattctgctacgcatattttcagattgcttgttcagggagttcaagttgattgtaaagcaaaatgtgctaatggcaacgctcagatttgcgttgctaaggtgtgcaagtttgtgaagaaggtgtttatggatcttgtaggaaagcaaaacaacaacaattgttcagtgttactgcaatatgcttttcagtttgtgaaagttattttggaggaattggatcattgcctactggcttctggaatctgtgtgataggcttagacatcgaacacataaaagagatggaatatgcagattgcagcccaaagttatcatatccaggaatgaagtcatattcttacatggaaatggtttctccagaagtttacatgattgtcctgtctctatcaattgtagctgagtttactggagagctctcacatggagatgctgagcaattggctataattatttgcttatccaatttccaggacaattttcatgctgctgtttcttttatgtataagcagatcatgcttctgacagataataggctaagaatgagatggttgatggtgtggaacaaaattgcgaagcgcttgaatgggcaaattacgccaaacttaaaaaaaattatctgcggcgcaggtgtccatgatgtactctatcagttcttctgctatccattttttgctttcctattgcctgggaggaaatctactctctgtggctctgaaagttcttctgagtcatacctttctttgacacatgacctagaggtggaagtggctattgaggtttatagatccatttgtgcaaactccaatcatggtccagaggctgatcacaaggttttcctggagagcttttgtggatttgttgtaagcataattgatgaaaacatctccctgttccaagccaacattgagtactgttcagagaagaagtttaaaaattgtgctatcctttctactcttggcgaactagttagcggattattagagaatggtcatattttgaactacgctatcaaagagccaacagaagcaagtgaagagtctgctggatatagccagcctagcatccttctgtgttgcttgaggcttgttagcaggtttatgggactgtcaactattgttatcaaagcaaatccaactacccaacaccagatcatgagcagggttttttcatctttatctgcgttcgctgggtatcttctgttgaagaaagatgttcttctattctttgagataattggagagcaactaactgaatgtctctctttatctggcacattataccgtgaaatgcaacatggggaaaccattaatcagattgagaaactctggctcaagatcatcatgtgcctaaagatgagcaagctcatcaatgattgttccttccttcaaaagcagcaaatgctacttcaagcggcagtcagtcacccacatcgtcccatttcggttgcaactacaccagcctggagagcatcaagatatgatatctcaaccttgcagcactcatcattctccctttctaaactggataaattgccaatggagagaagaaaagatcttactgacccttgcactcctcacaatgccatcgcgctcgaagaaatcgacattttgaggaagttcaaacacccaatttctgagttggagaagaatgatgaatctattaagatctctgtgggtctagggagaaagaggttgaagatcatgaagtactcaatgaagccaagggaacctggaaaaagtacagttcctcctggtaattttagctctaaaaaggatactgatgctgatgccttctcatcgcattacatggaaagcaaagcgtgtaggaaaccggaattaatacttgaaatgcttaaaagaaaaagatag

SEQ ID NO: 40256 - DNA, 435 bp, Oryza sativa
  Clone ID: PAT_MRT4530_43716C.1
gtacgtataagacagcacctgtgctatctgtccgtgcctatgcacgcaccgcagtcgcagccctcatgttcaccatccacgaccccgtcgccccggccctccacgtcagccacgccgcgccacgctcgccggtttcgcccttccgtcactggcctcctgccgccgcggatccgcgatcaccgcattcgtcgggcgcgccgtccatggcgctacccctccgatctctccggtcgccttcggccacgcccggccccgtcttccggtcacgttccgccatcgccggtctgatcgcgagcgaggtcgcggcctccgcaacgtcctcgttgtcgccatcgatctcatcgccacggctgacgatctcctgtcgatgcgcgatccccacctcgtgtttcctcctccacatgtcttcttgatccaatgctgaaaccttatgct

SEQ ID NO: 40257 - DNA, 421 bp, Oryza sativa
  Clone ID: PAT_MRT4530_43717C.1
atacgtataagacagcacctgtgctatctgtccgtgcctatgcacgcaccgcagtcgcagccctcgtgttcaccgtccatgaccccgtcgtcccggccctccacgtccgccgcgccgcgccacgctcgccggtttcgccctttcatcactggcctcctgccgccgcggatccgcgatcaccacgtgcgtcgggcgcgccgtccatggcgctacccctcagatctctccagtcgccttcggccacgcccggccccgtcttccggtcattttccgccatcgccggtctgatcgcgagcgaggtcaccgcctccgcaacatcctcgttgtcgccatcgatctcatcgccacggctgacgatctcatgtcgatgcgtgatccccacctcgtgtttcctcctccacatgtcttcttgatctaatgc

SEQ ID NO: 40258 - DNA, 389 bp, Oryza sativa
  Clone ID: PAT_MRT4530_43718C.1
atagggcttgatcaccagctattttgttttcaaaacatttcattattcattatttgttttgatcactatctcgttgcatgcaacacagcaacggggtgatcctacttgctgtgaggcaagccagcttagcctagtactggccggcggcgaagatgctgcactgatggggcttaaccccgcacatttacggctggtgcaccgtgtactgccttgccctggtcagacttacgcgggtcatccccggctgctgctgatgctctgcttagtagaccttctcggaacacccctcggcttattacccatttttttactactacccctagacgccgttgatctccgaaagcgactatcacctgtcttgttctgggggcatacgaattctttatttg

SEQ ID NO: 40259 - DNA, 427 bp, Oryza sativa
  Clone ID: PAT_MRT4530_43719C.1
gtatgaagatttggtgtgggaacctggattgtgggaatcaagcactaaagtgcaattggttagagatgtttattggtgctacaacaaaaacaagaacagaatatctacacttaagaacaaaacagcccttggactcaaaagctttattgacaagttggaggtgaacaagtctagagcaccagacaaacaaatcaatgacgacaacttgtatgagtctctgttttttcttagagtttacatggttgcccacaaagacgatactattaaaggttacagtggcacaatggaaatgatgcatgacaagaaagccattgtaaggttgcttatgatagaacgccctgaatacatggtgacactcatttcagcaatacggaagttaggctggattaggcaatctccattttgcgcatggataaccagtacatga

SEQ ID NO: 40260 - DNA, 1599 bp, Oryza sativa
  Clone ID: PAT_MRT4530_4371C.1
ttggactacctgagcgacttggtctcgtctcctcgtcttctcgccgccgccgcgagcggaatccccctctctccgtctaaacctcgccgccgcggcgaagcaaaagcacctccctcttcgccgccgcccgccggcaatggcggggctgtcgctgcggtgcggcgactgcggcgtgctgctgcggagcgtggaggaggcgcaggcgcacgccgaggccaccaaccacgccaacttctccgagtccaccgaggccgtactcaacctcgtctgcgccgcctgcggcaagccctgccgctcccagaccgaggtggacctgcacaccaagcgcacgggccacacggagttcactgacaagaccatggaggcggccaagccaattgatctcgaggcggcgccgccgaagccggccggcgaggccatggatgtcgatgcctcggcaagcgccgagccacaagagatggtggcgccggaggttaacaaggagatgctggcggacctcgaggcgatggggttcacgacggcgcgtgccactagggcacttcatttttctggtaatagcactattgaaggtgccattaactggctttccgagcaccaagaagatccagatattgacgaaccgcttctggtaccggctaatacaataactgaggctaataaaccctctttgtctcctgaggaaatgaagattaaagctcaggaattaagggaacgtgctcgtaaaaagaaagaagaagaagagagaaggatggaaagagaaagggagaaggaaaggattcggatcggtaaagagcttcttgaagccaaaagaattgaggaggataatgaaaggaaacgcatgatagaactgcgaagacttgagaaagaagaggagaaaagagctagagaaaaaatccgtcagaaactggaagaggacaaggctgaaaggagaaggaaacttggattgcccccggaagatccagctgctcctaaaccaagcgcaccacctccggttgaagagaagaagagggcattacctgtcaggccagccacaaaggccgagcgcatgagggattgcttaagaaatcttaagcagcagaacaaggatgacgatgctaaagtgaagagggcttttcaaacactccttacctacattggcaatgtagctaaaaatcctgacgaggagaaattcaggaagatcagactgaccaacgctacatttcaggagagggttggcaatctgcatggaggcatagagtttctccagctctgtggatttgagaaacttgaaggcaacgagttcttgttcttggcaagggacaaggttgacaaggccgtcctgaacactgctggagccgagctgaattctgctatcactaatcctttctttggagtcctttaaatcgtatagaatttccatgtacacttgaacctctctgtttcacctttgcttgaagcacaaatgcacagaaatattgatattgagcgaatgatctttcactgcgctcacttctggtcgccagattgcacgagatggaaggatcttggaaagaatttcccaatatatttcttccaacgattcaagcaataaaacataaatacccacaaaaaaaaaaaaaa

SEQ ID NO: 40261 - DNA, 833 bp, Oryza sativa
  Clone ID: PAT_MRT4530_43720C.1
atggagtgcttcaaaactaccctagctggggtggtgctcgtcgtgctgctcctgcagcaggcgccggtgctacgggccaacgaccctgaccctctccagacttctgcgtcgccgacctcgacagcgaggttagccacgggcggcgacgtgaacgccaaccccaacggctccaacgtcacgcagctcgacgtcgcggggtggcccggggtgaacacgctcggcgtgtccatgaaccgcatcgacttcgcgcccggcggcaccaacccgccgcacgtccacccgcgcgccaccgaggtcggcatcgtgctacgcggcgagctcctcgtcggcatcatcggcagcctcgacaccgggaacaggtactactccagggtggtccgcggcggcgagacgttcgtcatcccgcgggggctcatgcacttccagttcaacgtcggcaagacggaggccaccatggtggtgtccttcaacagccagaaccctggcatcgtcttcgtcccgctcacattgttcggctccaacccacccatcccgacgccggtgctcgtcaaggcgctccgggtggacgccggcgtcgtcgagctgcttaagtccaagttcaccggtgggtactgattaatccgagagcattttcatggtgttctctgctaccagcagcatactttaagctcccgttgtgtggttgcatgttattggattgaataaactttctcccatgttatgggaatggaaataaaatgtaatacttctttgtgatgttttttttctccttataatgaattaagaatcgtgtatcttttctgtgtatgtgcaattatcatcatgttgttttg

SEQ ID NO: 40262 - DNA, 750 bp, Oryza sativa
  Clone ID: PAT_MRT4530_43721C.1
ccggccgggactcccgagtcccgactcgcattcctctgttcgccgccgccatctccctcctcgtattgttcacgcgaggacgccgccgcgctgctcctccaccagagcggtgaagagccgccgttgtccccctccactgttgtccaccttaggcatcaaggtcccggcgccgacgaactgtgcggcacctggcgctttgctgcccctcgccggcctcttcgcttccccagcccccgccggacacctcgctgccccaggccaagattctcggtgatctccccgccggccgcctgccctccttgtgcatggagtcaccgaccctcgtctgatttggattcggattcgtcggcacctctccatttgattcagaggagtggaggcgacagtagaagtttccatactggaatttgtcagtggttttgatatatctgtcatctgtgatcttcctatgctcgaggaccatggagaactttagcttttcaatggcattattggtgagccatgcagctagagggtttgtgatggctgtttgctttgattcagtgatgcattagaaattgaagttgtccatgcactgactgaagaacatcaattcagatacttgaagctactgaactcaataatgcctcttgctttgtttcattgtggataattgttctcctattagaacagtagagtttgagatattatatcatttatatgcaatgcaatgtgtttcatgccaaaaaaaaaaaaaaaaaatttgcggcc

SEQ ID NO: 40263 - DNA, 903 bp, Oryza sativa
  Clone ID: PAT_MRT4530_43722C.1
ttctatactactgcctctgccaggtgccatttcattactcaaagaaattgagccgagacctgaggaacatatacaagaattggctagctttgctcgttgattagcaatggagtgcttcaaaactaccctagctggggtggtgctcgtcgtgctgctcctgcagcaggcgccggtgctacgggccaacgaccctgaccctctccaagacttctgcgtcgccgacctcgacagcgaggtgacgttgaacgggtacccgtgcaagcccacgccggcggccggcgacgagttcctcttctcctccaggttagccacgggcggcgacgtgaacgccaaccccaacggctccaacgtcacgcagctcgacgtcgcggggtggcccggggtgaacacgctcggcgtgtccatgaaccgcatcgacttcgcgcccggcggcaccaacccgccgcacgtccacccgcgcgccaccgaggtcggcatcgtgctacgcggcgagctcctcgtcggcatcatcggcagcctcgacaccgggaacaggtactactccagggtggtccgcggcggcgagacgttcgtcatcccgcgggggctcatgcacttccagttcaacgtcggcaagacggaggccaccatggtggtgtccttcaacagccagaaccctggcatcgtcttcgtcccgctcacattgttcggctccaacccacccatcccgacgccggtgctcgtcaaggcgctccgggtggacgccggcgtcgtcgagctgcttaagtccaagttcaccggtgggtactgatctgacgatccgagagtattcttacgcggatctaggtctctgctactatagttgtgcgcagtgtatgttatttgattgaataaacttgtcgtcgccatcgcaggccacgaatg

SEQ ID NO: 40264 - DNA, 917 bp, Oryza sativa
  Clone ID: PAT_MRT4530_43723C.1
actagtggatcccgcaaagtatagcagcaaacaaagccagcttgtcactgcgcttctttcctagtttccttctcaattctcattctcaaaagagaatatattgagctgatcgagctagatatatagaagcactagctagttgatcaacaatggagcacagcttcaaaaccatagcagctggagtggtgatcgtcgtgctgctcctgcagcaggcgcccgtgctgattcgggccaccgacgcggaccctctccaggacttctgcgtcgccgacctcgacagcaaggtcacggtgaacgggcacgcgtgcaagccggcgtcggccgccggcgacgagttcctcttctcctccaagattgccacgggcggcgacgtgaacgccaacccgaacggctccaacgtcacggagctcgacgtcgccgagtggcccggcgtcaacacgctcggcgtgtccatgaaccgcgtcgacttcgcgcccggcggcaccaacccgccgcacgtccacccgcgcgccaccgaggtcggcatcgtgctccgcggcgagctcctcgtcggcatcatcggcaccctcgacaccgggaacaggtactactccaaggtggtccgtgccggcgagacgttcgtcatcccgagggggctcatgcacttccagttcaacgttggcaagacggaggccaccatggtggtgtccttcaacagccagaaccccggcatcgtcttcgtcccgctcacattgttcggctccaacccgcccatcccgacgccggtgcttgtcaaggcgctccgcgtggatgctggtgtagttgagctgctcaagtccaagttcaccggcgggtactaattaatccgagagcattttcatggcgcgctgcctgaggagctgcgcctccccatcctcaaccatgtccgttgcacctga

SEQ ID NO: 40265 - DNA, 669 bp, Oryza sativa
  Clone ID: PAT_MRT4530_43724C.1
atgagtccttcctcagttaatcttagatcatgcgcactgaccacacgatcgacagagaggaataatggtcaaaacgtcaagcagacggcccgcacgcacgcaccgacgcacgcaccggcgcgccgcgagggggtgtccagacaaaccggcgtctgtcacctacagagaaatcctgcggggatcgagctaggcgcggacgtatgcagtgcagggcagcgagagacagtttttgttggtcttggcccgagaattgatattgatttgttcgtagcgacgaattctgtgcttgtttcaacgttatatcgttgtcgctctgtcagcagcaacaagctaggtcgggaggaaggggaagacgtcgcgttccacggtgagttggagatcgatcggtgcacgtcgcgtggaccgcgacaaggccgcagggacagcgccgtgcgtgacctcctgtcgcttcgcgtagggtcatgcattgctgtgcctgtgccagtatgcgacaccaacctttgccaatatagcgtcaaggccgccccgcgcgtgatcgacaactggtgccactttgctctcagtttcaggcggccatatacagtcgcaaaccgtgacggcttcattaattacgtgcttccattttccattgctagtctcggaatgccatttatatttagtaaactttag

SEQ ID NO: 40266 - DNA, 147 bp, Oryza sativa
  Clone ID: PAT_MRT4530_43725C.1
gacacatacacgaggctgtgactagccatggctccacacgctaacctggaatgactacctcattgcgaacaccgtgcggctgtgcatgaaggcgggaaccaactagagggcgtactactgcgactgctacagactgatggccatatc

SEQ ID NO: 40267 - DNA, 425 bp, Oryza sativa
  Clone ID: PAT_MRT4530_43726C.1
agggcgcgttgaatgctcgcattcatggactccacctgctgctgctgctgctgctgcatctgaagctgatgcaactctctctctatctatctctctctttcgcccatccattatccagctagccatgatccatccatcaaaccatgcatcgttcaaaaaaaataactcttgtttaggttttcgtagcatttttgcatatcttttaatagctttctcctctctcatcagattgcaggaatttcattcgggttttttttattttatattacattttcgatcgctcttaggcatttatgcaagtcagtcaatcaatcagttttcaggacatcaccaatcaaccaatcaacagaaggctttcagaacgagggagtcaagaacgcaccatgcttgtcacttttcctcttgttgtaaccaccaaatcacac

SEQ ID NO: 40268 - DNA, 231 bp, Oryza sativa
  Clone ID: PAT_MRT4530_43727C.1
actttttctttcctttttttttttttcttccttttacttcttaccaacattccattccccacccttcaaaaagaggattatttccaccctctaacggaattcccaaccacccccatgttcttcttcacccccaaatgcttttaaccaaaccccccctcaatttcaaacaaacacccccccacatcccccactaatgcgcggacccccaaaaattcccaccgggcaccacac

SEQ ID NO: 40269 - DNA, 657 bp, Oryza sativa
  Clone ID: PAT_MRT4530_43728C.1
atggggaactgccaggcggccgacgcggcggccgtcgttatacagcacccgtcgtcgtcgtcgtcgtcgtcgtcgtcgtccgggaacggaggaggcggcggcggcggccgcgtcgagcgcgcgtatggcgcggtctccgcggccgccgtgatggccgccaaccccggccactacgtcgccgaggtcgttcgtcccgttgccaccgcgccggcggcgacggcggcgacggcgtcggcgcctgcggcgaggcggcggctgaagctgctccggcccgacgacacgctagtgctcggcggcgtctaccgcctcgtcaccttcgaagatgtgctgaagcagttcgtgtcgaagcggaacgccacgatgagccgcgccacgatcgccaccgctgccgaggacgacgatggtcaccggcgacagggtcaccgcggcggcgaggcggcagcggcggcgccagcgaaggtggcggcccagtctcgtcaagagaatccatccagcccaagcccgaccgatgaggcccggcctgagcctgaacccgagcccgagcccgatctcgtagcgacggccatggcgctcggcgggaggatgagcctctcccggcacgggcagtggaggccggcgctgccgagcatcgccgaagggagcgtcctgtgcttttaa

SEQ ID NO: 40270 - DNA, 402 bp, Oryza sativa
  Clone ID: PAT_MRT4530_43729C.1
gtcatacaaaggaacacgaaagattccttgcgaacaacaagcgataggagccaacagggtagagtcctaggcgtcgacaccaataatagccagcatgctcgactgaacggcaacgatagaccgccaccacatggaccagatggctggcagcctcggcgagcgaagtcagacaccacagggctgacacgtgtacgtgatgccgcgctgtctagcggctgaaaaacgccagagagtgggccacggagcacccggcggcgccgtggacgagcaactggcgcacgactgataggcagcagattgacgtactcgacgacagcaggtgcaagtgctcttatctcaaccacatggttggaggcattgacagggagctcacaaccacgcgagtgggaaaccccatgggcg

SEQ ID NO: 40271 - DNA, 314 bp, Oryza sativa
  Clone ID: PAT_MRT4530_4372C.1
ttattctttaataaaatccaatcttatcacatggttggtttttttgaaaaattcgggggctccaaaaaaaatcttatttctaaaacatgctttctgattttcataacttctgcttctactttaatatttaacatatatatccctatcactaatcttatccttcatataagacaaaacctttacatacagttctctcgggtttttacttactttatctccctttaatggatattcacactccaacatccttaccatgacatatctaatcactataagatctactcattacttctacatttattgtcttaaaaatt

SEQ ID NO: 40272 - DNA, 5004 bp, Oryza sativa
  Clone ID: PAT_MRT4530_43730C.1
atggcaggtccagaggataaagatgaggagggtgcatctcattccccacgcaccaaaggcatcatccaatactttacaaggcaagtgaagcagcacacagaaggacttgatacagatttgcaggtgacaaatgagaagattggacaattggagtccacgcagatctccaccaacactaagcttacagggctggagacagcggtcgcccgcattgacactagccttgctgctcttgtgaggcattttgatgctctcaatgctggaggcaatggtgggggtaatgacgatgacattgacggagagtacgtcgaggataatttggaggatgaatatattgctgacactgaacaagatgatcgagatgctcgagatcgtcgacggctacacaacaatcgacgaggtatgggtggtcgccgccgacgcgaggtacgcaataatgatgatgctttttctaaaattaaatttaagattcctccttttgatggaaaatatgatcctgatgcgtacctctcttgggagattgctgttgaccaaaaatttgcatgccatgagtttcctgagagcactagagttagagctgctacgagtgagttcaccgattttgcttcggtatggtggatagaacatggcaagaaaaatcctaataacatgccacaaacttgggatgctttgaaacgggtcatgcgggctagatttgttccttcttactatgcacgtgacttgctgaataggttgcaacaattgagacaggaggaaactgaggacactgccatggctagatttttgggtgggttaaaccgcgagatttatgacatcgtagactataaagattacactaatatgacccgattgtttcatcttgcttgtaaaacttcatcatggcagacacgcaccactcctccggccggccgtactgtttctccatcttccacacccacaaccagtcgagcagcacctcctccatctagtgacaagtcagcgacaaaggctgctcagccagcaccgagtgcttcttcaatggcatccacaggccgaatgagagatgttcagtgccaccgttgcaagggctttgggcatgtgcagcgtgactgccctagcaagcgagttttggtagtcaaaaacgatggtgagtactcctctgctattgatttcgatgatgatacacttgctttgcttgcggctgaccatgcagataatgagccaccggaagagcacattggggctgcatttgcggatcactatgagagcctcattatgcagcatgtccttagcgcacaaatggagaaggcggagcaaaatcagcgacacacgttgttccaaacaaagtgtgtcgtcaaagagcgttgttgccgcatgatcattgatggaggtagctgcaacaacttggctagcagcgagatggtggagaagcttgcacttagcaccaaaccgcacccacatccatactacatccaatggctgaacaacagtggtaaggcgaaggtaacaaaactggtgcacattaattttgcaattggaaattaccatgatgttgttgaatgtgatgttgtgcccatgcaagcatgtaatattctgctaggtagaccatggcaatttgatagggattctatgcatcatggtaagaaaattgtgttgcatcccatgtctcctgaagatattttgcgtgatgatgttgctaaggctgccaaatccaaatgtgagagtgataaaaaagcccaatctgatggcaagaaacctgagacaatcaatttgaaacccaaatgcttacttgctactaaatctgatattaatgagttgattgcatcaccttcagttgcctatgctttggagtactctgatgtgtttcccaaggaagtgccaccggggctgccaccggtgcgcggcattgagcatcaaatcgacttgatcccaggtgcttccctaccgaaccgtgcgccataccgaaccaaccctgaggaaaccaaggagattcagcgtcaagttcatgagttgcttgataaagggtatgtacgcgagtctcttagtccatgtgcggttctggtaattttggtaccaaagaaagatggttcatggcgtatgtgtgttgattgtagagctattaataacattaccattcgatatcgtcatcctattcctaggttagatgatatgcttgatgaattgagtggctctattgtgttctccaaagttgatttgcgtagtggttaccaccagattcgtatgaacttaggtgatgaatggaaaacagcatttaaaacgaagtttgggttgtatgagtggttagtgatgccttttggtttaactaatgcacccaccactttcatgaggttgatgaatgaggttttgcgtcctttcattggaaaatttgtggtggtctactttgatgatatcttgatttacagcaagtctatgggtgaacattttaatcatttacgtgctgtttttaatgctcttcgtgatgcacgtttatttggtaaccttgagaagtgcaccttttgcacagatagagtttcttttcttggctatgttgtaactccgcaggggattgaggttgatcaagccaaggttgaggcaattcagagttggccgactcctaaaacggtctcacaagtgcggagctttctaggactcgcggggttctatcgccgctttgtgcaggatttcagcaccattgctgcaccattgaatgcgcttacaaagaagggagtgcctttcacttggggcacatcacaagagaacgccttccacatgttgaaagataagttgacccatgcacctctccttcaacttcccgattttaataagacttttgaacttgaatgtgatgctagtgggattggattgggtggtgttttgctacaagaaggaaaacctgttgcatattttagtgaaaagttgagtgggcctgttctgaattattctacttatgataaggaattgtatgctcttgtgcgaactttagaaacatggcagcattatttgtggcccaaggaatttgtcatacattctgatcatgagtctttgaagcatattcatagtcaagggaagctgaaccgtagacatgctaaatgggttgaatttattgaatcttttccttatgttatcaaacacaagaaagggaaggagaacatcattgctgatgctttgtctagaagatacactttgttgacacaacttgactataagatttttggcctggaaacaatcaaagaccaatatgtgcatgatgctgattttaatgatgaagcgcatggaggcggtttgatgggacattttggtgccaagaagacacatgacatccttgctagtcatttcttttggccacagatgcgaagagatgttggcagggctgttttgaagaaaaatatcaagatgtgggaagaatgcttgcctcatattgaatttgcttataatcgttccttgcattctactacaaaaatgtgcccatttcagattgtgtatggtttgttgcctcgtgctccaattgatttgatgcctttaccatcttctgaaaaactgaattttgatgctaagcaacgtgctgagttgatgttaaaactgcatgagacaactaaagaaaacatagagcgcatgaatgctaagtataagtttgctggtgacaaaggtagaagggaattgaattttgaacctggagatttggtttggttgcatttgcgaaaagaacgatttcctgatttgagaaagtctaaattgatgcctagagctgatggaccatttaaagtgttagcaaagattaatgagaatgcatataagattgatttgcctgcagatttcggggttagtctcacatttaacgttgcagatttgaagccgtatttgggagaagaagatgagtttgagtcgaggacgactcaaatgcaagaaggggaggatgatgaggacatcaacaccatcgatacatccacgtccccccatgtacaacatgatggtcctattacccgcgctcgtgcacgtcaactaaattatcagtgggacaagcccgaccactcgtcggacccccatcccctaactggtgatggtgacttcggagacagagaggacaaagggcaaatttgcaattacatttctcaaaatcaaagcgcttttgtccgcaaaagggcaattcacgacaacttcctttatgtgcaaaacatggtaaagctgctccacaggacaaaaaaacaaagcctgttcatcaagatagacattgcgaaggcttttgacaccgtgaattggtcctacctcctagagattcttcgacaatttggttttggaaaccgatggttaaattggatcactaatcttttctccacctcctcatcccaggtgctcttaaatgggtccccggggcaaaaaatcaaccatgctaggggcctacgacaaggtgatccactatccccaatgcttttcatcctggctatgaagccttttcatcgaatcctaaaagaagcagaaaatgtcaatgtccttgctccccttggggtaagaaatgggagattcaggtgctcgctatatgctgacgatgttgcggtttttgcaaacccgaaacaagaagagttgacagctctttctcatatactggcatgctttgcacaagcttctgggctacacacaaatatcaacaaaactgaaatctaccccatcagatgcgaaggcatcgatctgcaaaatcttcttgctggatggccgggccaaacaaaatatttcccctgcaaatatcttggactacctcttcatttcagaaaactaaggaaaattgacttccttcctttaatagacaagattgggtctaggctaccaggttggaaagggcgttttttcacttctgcgggacgtcaagccctagtatcatctgttctaagtgctatgccaactcatcatcttactgtcctacaagctccaaagtgggttttcaaaagaatcgatcgtttcagaagatctttcctatggaagggtgaagatcccgaccattcaaacccgggagatagtctgatcaactggtaa

SEQ ID NO: 40273 - DNA, 5388 bp, Oryza sativa
  Clone ID: PAT_MRT4530_43731C.1
atggcaggtccagaggataaagatgaggagggtgcatctcattccccacgcaccaaaggcatcatccaatactttacaaggcaagtgaagcagcacacagaaggacttgatacagatttgcaggtgacaaatgagaagattggacaattggagtccacgcagatctccaccaacactaagcttacagggctggagacagcggtcgcccgcattgacactagccttgctgctcttgtgaggcattttgatgctctcaatgctggaggcaatggtggggttaatgatgatgacattgacggagagtacgtcgaggataatttggaggatgaatatattgctgacactgaacaagatgatcgagatgctcgagatcgtcgacggctacacaacaatcgacgaggtatgggtggtcgccgccgacgcgaggtatgcaacaatgatgatgctttttctaaaattaaatttaagattcctccttttgatggaaaatatgatcctgatgcgtacctctcttgggagattgctgttgaccaaaaatttgcatgccatgagtttcctgagagcactagagttagagctgctacgagtgagttcaccgattttgcttcggtttggtggatagaacatggcaagaaaaatcctaataacatgccacaaacttgggatgctttgaaacgggtcatgcgggctagatttgttccttcttactatgcacgtgacttgctgaataggttgcaacaattgagacaggaggaaactgaggatgctgccatggctagatttttgggtgggttaaaccgcgagatttatgatatcgtagactataaagattacactaatatgacccgattgtttcatcttgcttgtaaggctgaaagggaagtgcagggacgacgtgctagtgccaaggctaatttttctgcaggtaaaacttcatcatggcagacacgcaccactcctctagccggccgtactgcttctccatcttccacacccacaactagtcgagcagcacctcctccatctagtgacaagtcagcgacaaaggctgctcagccagcaccgagtgcttcttcaatggcatccacaggccgaatgagagatgttcagtgccaccgttgcaagggctttgggcatgtgcagcgtgactgccctagcaagcgagttttggtagtcaaaaacgatggtgagtactcctctgctagtgatttcgatgatgatacacttgctttgcttgcggctgaccatgcagataatgagccaccggaagagcacattggggctgcatttgcggatcactatgagagcctcattgtgcagcgtgtccttagcgcacaaatggagaaggcggagcaaaatcagcgacacacgttgttccaaacaaagtgtgtcgtcaaagagcgttgttgccgcatgatcattgatggaggtagctgcaacaacttggctagcagcgagatggtggagaagcttgcacttagcaccaaaccgcacccacattcatactacatccaatggctgaacaacagtggtaaggcgaaggtaacaaaactggtgcacattaattttgcaattggaaattaccatgatgttgttgaatgtgatgttgtgcccatgcaagcatgtaatattctgctaggtagaccatggcaatttgatagggattctatgcatcatggtaggtccaaccagtactcttttctgtaccatgataagaaaattgtgttgcatcccatgtctcctgaagatattttgcgtgatgatgttgctaaggctgccaaatccaaatgtgagagtgataaaaaagcccaatctgatggcaagaaacctgagacaatcaatttgaaacccaaatgcttacttgctactaaatctgatattaatgagttgattgcatcaccttcagttgcctatgctttggtatgcaaagatgctttgatttcacttcacgatatgcagcattctttgccccctgctgttgctaacattttgcaggagtactctgatgtgtttcccaaggaagtgccaccggggctgccaccggtgcgcggcattgagcatcaaatcgacttgatcccaggtgcttccctaccgaaccgtgcgccataccgaaccaaccctgaggaaaccaaggagattcagcgtcaagttcatgagttgcttgataaagggtatgtacgcgagtctcttagtccatgtgcggttccggtaattttggtaccaaagaaagatggttcatggcgtatgtgtgttgattgtagagctattaataacattaccattcgatatcgtcatcctattcctaggttagatgatatgcttgatgaattgagtggctctattgtgttctccaaagttgaattgcgtagtggttaccaccagattcatatgaagttgggtgatgaatggaaaacagcatttaaaacgaagtttgggttgtatgagtggttagtgatgccttttggtttaactaatgcacccagcactttcatgaggttgatgaatgaggttttgcgtcctttcattggaaaatttgtggtggtctactttgatgatatcttgatttacagcaagtctatgggtgaacattttaatcatttacgtgctgtttttaatgctcttcgtgatgcacgtttatttggtaaccttgagaagtgcaccttttgcacagatcgagtttcttttcttggctatgttgtaactccgcaagggattgaggttgatcaagccaaggttgaggcaattcagagttggccgactcctaaaacggtctcacaagtgcggagctttctaggactcgcggggttctattgccgctttgtgcaggatttcagcaccattgctgcaccattgaatgcgcttacaaagaagggagtgcctttcacttggggcacatcacaagagaacgccttccacatgttgaaacataagttgacccatgcacctctcctccaacttcccgattttaataagacttttgaacttgaatgtgatgctagtgggattggattgggtggtgttttgctacaagaaggaaaacttgttgcatattttagtgaaaagttgagtgggcctgttctgaattattctacttatgataaggaattgtatgctcttgtgcgaactttagaaacatggcagcattatttgtggcccaaggaatttgtcatacattctgatcatgagtctttgaagcatattcgtagtcaagggaagctgaaccgtagacatgctaaatgggttgaatttattgaatcttttccttatgttatcaaacacaagaaagggaaggagaacatcattgctaatgctttgtctaggagatacactttgttgacacaacttgactacaagatttttggcctggaaacaatcaaagaccaatatgcgcatgatgctgattttaatgatgtgttgctgcattgtaaggatggaagaacatggaacaaattcgtcatcaatgatgggtttgttttcagagctaacaagctatgcattccagctagctccgttcgcttgttgttgttgcaggaagcgcatggaggcggtttgatgggacattttggtgccaagaagacacatgacatccttgctagccatttcttttggccacagatgcgaagagatgttggcaggttcgttgctcgctgcgctacatgtcaaaaggctaagtcacgcttacatccacatggtttgtatatgcctcttcctgttcctactgttccttgggaagatatttcaatggattttgtgttaggattgcctaggaccaagagggggcgtgatagcatttttgtggttgtggatagattttctaaaatggtacatttcataccatgtcataaaactgatgatgcttctcatatcgctgatttgttctttcgagaaattgttcgcttgcatggtgtgccaaacacaattgtttctgatcgtgacacaaaatttcttagccatttttggagaactttgtgggctaaattggggactaaacttttgttttctactacttgtcatccccaaactgatggacaaattgaagtggtgaatagaaccttgtctactatgcttagggctgttttgaagaaaaatatcaagatgtgggaagaatgcttgcctcatattgaatttgcttgtaatcgttccttgcattctactacaaaaatgtgcccatttcagattgtgtatagtttgttgcctcgtgctccaattgatttgatgcctttaccatcttctgaaaaactgaattttgatgctaagcaacgtgctgagttgatgttaaaactgcatgagacaactaaagaaaacatagagcgcatgaatgctaagtataagtttgctggtgacaaaggtagaagggaattgaattttgaacctggagatttggtttggttgcatttgcgaaaagaacgatttcctgatttgagaaagtctaaattgatgcctagagctgatggaccatttaaagtgttagcaaagattaatgagaatgcatataagattgatttgcctgcagatttcggggttagtcccacatttaacgttgcagatttgaagccgtatttgggagaagaagatgagcttgagtcgaggacgactcaaatgcaagaaggggaggatgatgagaacatcaacaccatcgatacatccacgtccccccatgtacagcatgatggtcctattacccgcgctcgtgcacgtcaactaaattatcaggtgagttctttcttgagttcatattcctcgtctttataccccggagacgcgtgcactcgtgttttactcaggaacgatggagaggatccaaagggaagaggattcgcgcggggtggattcggactgcagggcagcgccaacttctgacggccgccacgacttcatgcgaactccgatttgggcgtgcaagacgagtgtcctcgtggccgggttgacgcgcaccacaagttcgcggcgaccattggagacgcgcctctgagcggcggcggcggtggtaccccacgagcagcggcgacggcgcccctcctcccgcgagcggtggcgactgcggcggcggtggcgcctctccccccgagcccaagcggcggcggcggcgccctcccctcgagcagcggcggcggcgacggcgcctctctcaccgagcccaagcggcagcggcggtgccctccccccgccagcggcgacgacggctcccccatcaccggcggtgcggccgtgtcctccctcaccaccggcagcgcggcgacgtcctcccccaccaccggcggcggcgcccggggaggcgtcggcggctcgccagcatcccaacggcggtggcgcccctcccctctgtcggatccagcgggaggggagctgcggcggcctggcgtccctatgacaacggcggcgctgtag

SEQ ID NO: 40274 - DNA, 3498 bp, Oryza sativa
  unsure (1)..(3498): unsure at all n locations
  Clone ID: PAT_MRT4530_43732C.1
atgggggagccggacgagctgccgccgttgccgctcgccctccacccgccgcatctcatcccgccggcgcccgccgccgacccccgcgccctctccttcctccccgacctcggcggcctcccctgggtcgcctacggcgccgcctccttcctngttgtctcccacctcccctcccctccccgcgagggaagcagcagcagcggcggcggcggcggcggcgacgacgatggcccgttcttccgccaggccatcgacctccgtgcccccgtgtccgccgtctcctggtgccgacgtggcgggggcgagctcgccgccgccgccgggagctccgtgtccgtgttccagccggcgccgtcctcttccccaggatcgtttggctgggtgctgagatgggctatcaccgagaccttcgccgtcgccgccgtggcctggacgggctccggcgacggcattctgttggccggcgagggcgttgccatgtgggctagggcagaatcctcctggaagctcgcgtggaggtgctcgcctcaggtggctcagtcccttgcctccgctacacacttcctccagggtcccgtcgcgacagcggcggctactccttcttccgagggcggcgtgcctcctgttctggtgattgtgaatgatgccaaggtgggtgtggagaaagtcgagcttgcgcaccctaaaccagtatccatgatccagtggagacctaggtcgttgtttgtcagtgatcagtctgaagtgaggcgagagatactcatgacgtgctgcttggacgggactctccggctgtggagcgaggatgaggcagccaagtcaaagaagcatcgggttttgcaaaggtccttcagtgtcattgcggtaattgagatgagcaacactctgaatggagtgctgggagttgatataactgtgaaatgggcaattgaaactggcagtgttgtatcgagagatgaagatgacaatttcacattgttttcaggtgaccctgggcacaaccaggtaggcaaatgcgagtggttggcagatgtggaatactcatgtctgtgttgggctccttctgttattcaacaaaataggtttcttgtccttggaagtgaaaaaggagccgattgttttgtagtcagtattcagaacgaaggggatgttctttcatgtcagaaaatgttcacaattcctttctttgaagatcaagggagacatggaacttaccttaatgctgatatgttttcagcagttatttgtaaaggttcttcagtcttccctacatgcctggatggagaatatcctacatgtgtttctgcaacgccactgaacaatactgtattatctctacagcagcatggttcaggaactgcttcatgttatcacattgctactgggtattctgatggcactgtgaaactgtggaagatgtcttttgcagataaccctttgcatactgagaaagagagccacatctggcaactagtaggcacgtttggtgccgatcgaggaccaattactgcaatttcactgtccaattgtggtagaattgctactgttggtagaaatgttcagaagaataccacctccattcatatctggaaagcagtaaaactcatgggagatgggagttttctcctggaggatgcactaacgcttcaaggttctgttgttggtttggattggctatctttaggcgatgggagatttttacttgcagtctaccttctcaatgagttgcacatatattctcataagcacccttcctttaagaatgtattacacactgtgaattcaaaagagaagcatctttggagctgtattgcactatcccattctccacatgacattgctagcttcctttgggggccaaaggcaactggtgtgcttgttcataagaatcatcttgcactcttcagttcatggttagtaagaagagccaatgaatctagtacccagatatgtgattgtccagctgcagacatacatgaattgccttgtactaagcattttaatgaagatatctttggtagattcagtttatcagaaaattacagcaacacaatgttactacagaaacacagtgctcactgttctaatgatctatggaacttgtcggatatagctgccaaaatgagtggacctgtggcatcatatcacccgagagcacttattcagtctctttattcaggtcaatggaaacgggcaaacactgttctgcagcatcttgttcaatccatgcaagcaaataaaatatcaaacaccttgttggagtgcagtttctgtggtaaatcatgccataatattcctgaatgccctttatctgaaagcttcaccgatatgacatctaatgacatatctaatagagggttactttggggtgacaatcaacgtagcacagcctttagtttgctatcaccatcaaattcatatcctcggatggaggatatcaacaccaccactagcacatctcaaagttcagaaataaataagctccttgctacgaatgttagcatatcaacaataagtgacatggagagaacccagatagttgcactttctgatcttttgggtaaaattactgatcagagccatgcatctccctataaaagccttgatgaagcagggagaaggttctgggttgctgtgcagttcgaacgcctatatgcacttaggagatctgaagatccatccagtgccgaagtcttccatgttgattctgcttctatcgcgtgggccttacagtctgattgtcaggatgatctacttaattctgttcttcctgcagaaccaagttggtctgagatgcgaaaccttggtatggggttatggtacaccaacgtgtcccagttaagaaccaagatggagaagttggcaaggctgcaatatcttaaaagcaaggacccaaaggactgtgctcttctctatatagcattaaatagaacaaaagtattagttggcctattcaagattagcagagatgaaaaggataaacgtctctatgagtttctctccaggaacttccagggatctggagggcccttggagcgtaatctcattgctaatgtactgctccctgaagcagttgataaaggagaccactggctttcaagcctacttgaatggatgttagggaactactctcagtctgtgaatcaattacttgattgccacctcaagtcactgattgaagaatccagcattcccggtgatacaaatgtctttgcagaccctggagtgggtcagtattgtgcaatcattgcgacaaaaagtagtttcagaaactgtgttggtgaagctcaatctgcaaatttatctaagctttcattagcaatggcttcatgcgccttgaacagatgtggactgcctcttgaagcacttgaatacctatgttgtaactcgggcatagagggaaaggacaacacctcactggatggcggagacaagaagattgtttatggaatattgaaccctttccatgcttcgtccaactggctctcagcatctgta

SEQ ID NO: 40275 - DNA, 8937 bp, Oryza sativa
  Clone ID: PAT_MRT4530_43733C.1
atggcaggtccagaggataaagatgaggagggtgcatctcattccccacgcaccaaaggcatcatccaatactttacaaggcaagtgaagcagcacacagaaggacttgatacagatttgcaggtgacaaatgagaagattggacaattggagtccacgcagatctccaccaacactaagcttacagggctggagacagcggtcgcccgcattgacactagccttgctgctcttgtgaggcattttgatgctctcaatgctggaggcaatggtgggggtaatgatgatgacattgacggagagtacgtcgaggataatttggaggatgaatatattgctgacactgaacaagatgatcgagatgctcgagatcgtcgacggctacacaacaatcgacgaggtatgggtggtcgccgccgacgcgaggtacgcaacaatgatgatgctttttctaaaattaaatttaagattcctccttttgatggaaaatatgatcctgatgcgtacctctcttgggagattgctgttgaccaaaaatttgcatgccatgagtttcctgagagcactagagttagagctgctacgagtgagttcaccgattttgcttcggtttggtggatagaacatggcaagaaaaatcctaataacatgccacaaacttgggatgctttgaaacgggtcatgcgggctagatttgttccttcttactatgcacgtgacttgctgaataggttgcaacaattgagacagggtgcgaaaagtgtagaggaatattatcaggagttacaaatgggcttgcttcgttgtaatttagaggaaactgaggacgctgccatggctagatttttgggtgggttaaaccgcgagatttatgacatcgtagactataaagattacactaatatgacccgattgtttcatcttgcttgtaaggctgaaagggaagtgcagggacgacgtgctagtgccaaggctaatttttctgcaggtaaaacttcatcatggcagacacgcaccactcctccggccggccgtactgcttctccatcttccacacccacaaccagtcgagcagcacctcctccatctagtgacaagtcagcgacaaaggctgctcagcccgcaccgagtgcttcttcaatggcatccacaggccgaatgagagatgttcagtgccaccgttgcaagggctttgggcatgtgcagcgtgactgccctagcaagcgagttttggtagtcaaaaacgatggtgagtactcctctgctagtgatttcgatgatgatacacttgctttgcttgcggctgaccatgcagataatgagccaccggaagagcacattggggctgcatttgcggatcactatgagagcctcattgtgcagcgtgtccttagcgcacaaatggagaaggcggagcaaaatcagcgacacacgttgttccaaacaaagtgtgtcgtcaaagagcgttgttgccgcatgatcattgatggaggtagctgcaacaacttggctagcagcgagatggtggagaagcttgcacttagcacaaaaccgcacccacatccatactacatccaatggctgaacaacagtggtaaggcgaaggtaacaaaactggtgcacattaattttgcaattggaaattaccatgatgttgttgaatgtgatgttgtgcccatgcaagcatgtaatattctgctaggtagaccatggcaatttgatagggattctatgcatcatggtaggtccaaccagtactcttttctgtaccatgataagaaaattgtgttgcattccatgtctcctgaagatattttgcgtgatgatgttgctaaggctgccaaatccaaatgtgagagtgataaaaaagcccaatctgatggcaagaaacctgagacaatcaatttgaaacccaaatgcttacttgctactaaatctgatattaatgagttgattgcatcaccttcagttgcctatgctttggtatgcaaagatgctttgatttcacttcacgatatgcagcattctttgccccctgctgttgctaacattttgcaggagtactctgatgtgtttcccaaggaagtgccaccggggctgccaccggtgcgcggcattgagcatcaaatcgacttgatcccaggtgcttccctaccgaaccgtgcgccataccgaacaaaccctgaggaaaccaaggagattcagcgtcaagttcatgagttgcttgataaagggtatgtacgcgagtctcttagtccatgtgcggttccggtaattttggtaccaaagaaagatggttcatggcgtatgtgtgttgattgtagagctattaataacattaccattcgatatcgtcatcctattcctaggttagatgatatgcttgatgaattgagtggctctattgtgttctccaaagttgatttgcgtagtggttaccaccagattcgtatgaagttgggtgatgaatggaaaacagcatttaaaacgaagtttgggttgtatgagtggttagtgatgccttttggtttaactaatgcacccagcactttcatgaggttgatgaatgaggttttgcgtcctttcattggaaaatttgtggtggtctactttgatgatatcttgatttacagcaagtctatgggtgaacattttaatcatttacgtgctgtttttaatgctcttcgtgatgcacgtttatttggtaaccttgagaagtgcaccttttgcacagatcgagtttcttttcttggctatgttgtaactccgcaggggattgaggttgatcaagccaaggttgaagcaattcagagttggccgactcctaaaacggtctcacaagtgcggagctttctaggactcgcggggttctatcgccgctttgtgcaggatttcagcaccattgctgcaccattgaatgtgcttacaaagaagggagtgcctttcacttggggcacatcacaagagaacgccttccacatgttgaaagataagttgacccacgcacctctcctccaacttcccgattttaataagacttttgaacttgaatgtgatgctagtgggattggattgggtggtgttttgctacaagaaggaaaacctgttgcatattttagtgaaaagttgagtgggcctgttctgaattattctacttatgataaggaattgtatgctcttgtgcgaactttagaaacatggcagcattatttgtggcccaaggaatttgtcatacattctgatcatgagtctttgaagcatattcgtagtcaagggaagctgaaccgtagacatgctaaatgggttgaatttattgaatcttttccttatgttatcaaacacaagaaagggaaggagaacatcattgctgatgctttgtctaggagatacactttgttgacacaacttgactacaagatttttggcctggaaacaatcaaagaccaatatgcgcatgatgctgattttaatgatgtgttgctgcattgtaaggatggaagaacatggaacaaattcgtcatcaatgatgggtttgttttcagagctaacaagctatgcattccagctagctccgttcgcttgttgttgttgcaggaagcgcatggaggcggtttgatgggacattttggtgccaagaagacacatgacatccttgctagtcatttcttttggccacagatgcgaagagatgttggcaggttcgttgctcgctgcgctacatgtcaaaaggctaagtcacgcttacatccacatggtttgtatatgcctcttcctgttcctactgttccttgggaagatatttcaatggattttgtgttaggattgcctaggaccaagagggggcgtgatagcatttttgtggttgtggatcgattttctaaaatggcacatttcataccatgtcataaaactgatgatgcttctcatatcgctgatttgttctttcgagaaattgttcgcttgcatggtgtgccaaacacaattgtttctgatcgtgacacaaaatttcttagccatttttggagaactttgtgggctaaattggggactaaacttttgttttctactacttgtcatccccaaactgatggacaaactgaagtggtgaatagaaccttgtctactatgcttagggctgttttgaagaaaaatatcaagatgtgggaagaatgcttgcctcatattgaatttgcttataatcgttccttgcattctactacaaaaatgtgcccatttcagattgtgtatggtttgttgcctcgtgctccaattgatttgatgcctttaccatcttctgaaaaactgaattttgatgctaagcaacgtgctgagttgatgttaaaactgcatgagacaactaaagaaaacatagagcgcatgaatgctaagtataagtttgctggtgacaaaggtagaagggaattgaattttgaacctggagatttggtttggttgcatttgcgaaaagaacgatttcctgatttgagaaagtctaaattgatgcctagagctgatggaccatttaaagtgttagcaaagattaatgagaatgcatataagattgatttgcctgcagatttcagggttagtcccacatttaacgttgcagatttgaagccgtatttgggagaagaagatgagcttgagtcgaggacgactcaaatgcaagaaggggaggatgatgaggacatcaacaccatcgatacatccacgtccccccatatacagcatgatggtcctattacccgcgctcgtgcacgtcaactaaattatcaggacgagtgccctcgtggccgggttgacgcgcaccacaagttcgcggcgaccattggagacggtccagaggataaagatgaggagggtgcatctcattccccacgcaccaaaggcatcatccaatactttacaaggcaagtgaagcagcacacagaaggacttgatacagatttgcagatctccaccaacactaagcttacagggttggagacagcggtcgcccgcattgacactagccttgctgctcttgtgaggcattttgatgctctcaatgctggaggcaatggtgggggtaatgacgatgacattgacggagagtacatcgaggataatttagaggatgaatatattgctgacactgaacaagatgatcgagatgctcaagatcgtcgacggctacacaacaatcgacgaggtatgggtggtcgccgccgacgcgaggtacgcaacaatgatgatgctttttctaaaattaaatttaagattcctccttttgatggaaaatatgatcctgatgcgttcctctcttgggagattgctgttgaccaaaaatttgcataccatgagtttcctgagaacactagagttagagctgctacgagtgagttcaccgattttgcttcggtttggtggatagaacatggcaagaaaaatcctaataacatgccacaaacttgggatgctttgaaacgggtcatgcgggctagatttgttccttcttactatgcacgtgacttgctgaatagattgcaacaattgagacagggtgcgaaaagtgtagaggaatattatcaggagttacaaatgggcttgcttcgttgtaatttagaggaaactgaggacactgccatggctagatttttgggtgggttaaaccgcgagatttatgacatcgtagactataaagattacactaatatgacccgattgtttcatcttgcttgtaaggctgaaagggaagtgcaaggacgacgtgctagtgccaaggctaatttttctgcaggtaaaacttcatcatggcagacacgcaccactcctccggccggccgtactgcttctccatcttccacacccacaaccagtcgagcagcacctcctccatctagtgacaagtccgtgacaaaggccgctcagccagcaccgagtgcttcttcaatggtatccacaggccgaatgagagatgttcagtgccaccgttgcaagggctttgggcatgtgcagcgtgactgccctagcaagcgagttttggtagtcaaaaacgatggtgagtactcctctgctagtgatttcgatgatgatacacttgctttgcttgcggctgaccatgcagataatgagccaccggaagagcacattggggctgcatttgcggatcactatgagagcctcattgtgcagcgtgtccttagcgcacaaatggagaaggcggagcaaaatcagcgacacacgttgttccaaacaaagtgtgtcctcaaagagcgttgttgccgcatgatcattgatggaggtagctgcaacaacttggctagcagcgagatggtggagaagcttgcacttagcaccaaaccgcacccacatccatactacatccaatggctgaacaacagtggtaaggtgaaggtaacaaaactggtgcacattaattttgcaattggaaattaccatgatgttgttgaatgtgatgttgtgcccatgcaagcatgtaatattctgctaggtagaccatggcaatttgatagggattctatgcatcatggtaggtccaaccagtactcttttctgtaccatgataagaaaattgtgttgcatcccatgtcttctgaagatattttgcgtgatgatgttgctaaggctgccaaatccaaatgtgagagtgataaaaaagcccaatctgatggcaagaaacctgagacaatcaatttgaaacccaaatgcttacttgctactaaatctgatattactgagttgattgcatcaccttcagttgcctatgctttggagtactctgatgtgtttcccaaggaagtgccaccggggctgccaccggtgcgcggcattgagcatcaaatcgacttgatcccaggtgcttccctaccgaaccgtgcgccataccgaaccaaccctgaggaaaccaaggagattcagcgtcaagttcatgagttgcttgataaagggtatgtacgcgagtctcttagtccatgtgcggttccggtaattttggtaccaaagaaagatggttcatggcgtatgtgtgttgattgtagagctattaataacattaccattcgatatcgtcatcctattcctaggttagatgatatgcttgatgaattgagtggctctattgtgttctccaaagttgatttgcgtagtggttaccaccagattcgtatgaagttgggtgatgaatggaaaacaacatttaaaacgaagtttgggttgtatgagtggttagtgatgccttttggtttaactaatgcacccagcactttcatgaggttgatgaatgaggttttgcgtcctttcattggaaaatttgtggtggtctactttgatgatatcttgatttacagcaagtctatgggtgaacattttaatcatttacgtgctgtttttaatgctcttcgtgatgcacgtttatttggtaaccttgagaagtgcaccttttgcacagatcgagtttcttttcttggctatgttgtaactccgcaggggattgaggttgatcaagccaaggttgaggcaattcagagttggccgactcctaaaacggtctcacaagtgcggagctttctaggactcgcggggttctatcgccgctttgtgcaggatttcagcaccattgctgcaccattgaatgcgcttacaaagaagggagtgcctttcacttggggcacatcacaagagaacgccttccacatgttgaaagataagttgacccatgcacctctcctccaacttcccgattttaataagacttttgaacttgaatgtgatgctagtgggattggattgggtgaaacatggcagcattatttgtggcccaaggaatttgtcatacattctgatcatgagtctttgaagcatattcgtattcaagggaagctgaaccgtagacatgctaaatgggttgaatttattgaatcttttccttatgttatcaaacacaagaaagggaaggagaacatcattgctgatgctttgtctaggagatacactttgttgacacaacttgactacaagatttttggcctagaaacaatcaaagaccaatatgcgcatgatgctgattttaatgatgaagcgcatggaggcagtttgatgggacattttggtgccaagaagacacatgacatccttgctagtcatttcttttggccacagatgcgaagagatgttggcagggctgttttgaagaaaaatatcaagatgtgggaagaatgcttgcctcatattgaatttgcttataatcgttccttgcattctactacaaaaatgtgcccatttcagattgtgtatggtttgttgcctcgtgctccaattgatttgatgcctttaccatcttctgaaaaactgaattttgatgctaagcaacgtgctgagttgatgttaaaactgcatgagacaactaaagaaaacatagagcgcatgaatgctaagtataagtttgctggtgacaaaggtagaagggagttgaattttgaacctggagatatggtttggttgcatttgcgaaaagaacgatttcctgatttgagaaagtctaaattgatgcctagagctgatggaccatttaaagtgttagcaaagattaatgagaatgcatataagattgatttgcctgcagatttcagggttagtcccacatttaacgttgcagatttgaagccgtatttgggagaagaagatgagcttgagtcgaggacgactcaaatgcaagaaggggaggatgatgaggacatcaacaccatcgatacatccacgtccccccatatacagcatgatggtcctattacccgcgctcgtacacgtcaactaaattatcaggacgagtgcccttgtggccgggttgacgcgcaccacaagttcgcggcgaccattggagacggtgtatcggttgctaaggtgcagcgtctttggacagttgtagtcgggccgtga

SEQ ID NO: 40276 - DNA, 643 bp, Oryza sativa
  Clone ID: PAT_MRT4530_43734C.1
cacagtagtaggacaaaatatttcaattttggcaatagtataacagcaactgcatcacccatgcataggacgagtttatgatattcagatccaaattgtcgaagcggctgtactatgttactcttatgtacattttgaaaattcttcatctcctgaaggtaatcctttattcttgttgcatgacaccacattttgacaattacaaataggatcacctcaagcaatccaatggaaacgatatcgatggccactaaaaagagcaacatcttgatgtaaaactgctgaaatctgtcgcggaaacttgtatagattgtccctctctgacagcaccagcaccagctaccagcctcatctgcagccaatgccttcttgctgatgatccgatagatctaaaagaccactgtctgaaaagctttatccacattcatcgcgcccaacgccgaggtctcaaagaaagataggccctccttctctgcaaagcttgtagcgtcctccaaggacactgaccgaaaatgcttgaggaccatcttgttgcccatgagccctgacgacaatgttggagttcctatggacacggagctctttgacccacctcttaacattctcaaaaattgtggcctttgtgacataataaactagcaat
